United States Patent Application Publication US 2017/0114356 A1 - sequence listing, part 46

SEQ ID NO: 61919 - DNA, 2750 bp, Zea Mays
cgctagggccatcgcggatgcgcccgtgccgtcgcgggggtttgccatacgaaatcctaggcggcgatctcaacgggattgtcgggtgcttacggaagcggtccggcgggagggcgggatgcggggctgccggcgggatgcgggttggggtgcggtcgcgggcgggatgtgggctgcgcgtggcagaacggcagaaccataggtgtggacgcctatgttactcacataattagtagtagagattatattgaagttgacaaaagagagcatgtcagacatatagtgttttcgattttgagcaaccacatttagtctcgatgggaactccctttctttagcctgtacgtatgttttgtgaagcagcaactattaatagaaatgggtggtttttttgtaaatatagtagttttctaatttgtgtgcattataacctgagttcatgctgtttgtgcaagtagatgtataatgtagaaatattacctttttggaggagattcaaacgaaggcatattatcttttgctttgagttgcctagtgctagttgtttggtcctgcagaaggaaaaatgtagtgggcttttttatgtgctcattttgttgatgcatttctacctttctggtcattagtttttggaataaggtggaggaactgtacctttgtgatttcttctttagcattacatttggatctatgttcttcagtatcagatgtagaagtctgttggctgctatatgcatcttgatacatgttaatcctttattatacacgatatacatttctaaaaaaaactaaaaacaacctatattttggaatgtaagtagtttatttatggcaaacatcagtatggaattcagatcatataaattgatattgttggataattagaatctaagccataaggatgaagtaacaaacttagatcagcaatgccacaattgtataaaaagagggttaaaagcacatctagactattaaagcacaacaaccttcacccgtttttgtttttgaaaagatcaaataccatccgagtactcaataacatatgtgtatacatgtgcatttatattgtaggatctctatgcatatatttattcatgtataacatcgttatcaatcctatgtaattgagcacttattcgaagtacatatatacatatatgtaatttgcttagatacataagtggatacacagggtgtggtcatggtgtttattgtatagaaaatacctctttcgaatagaacttacagaatgtgcgattcaccttgctccgattagaaaatagcaggtgaccatgccgaaaatagcaagtaaaatgatatatgtggttgtcatgagtgtggaaaataaatagataacatattgcttgttgggaaaaacatacatgttcccaacgtaagtcgtaggttgttcaaatgagttgttgacgattcaaattagttgttcaacatgcgaaaatgcaacagaaaacaaatgagattcgtgatctataaattgttcaagaatgtgaacaacagtaaacatgggaaaatgcaagggaaaacaaatgagattcgtaacctataagctgattaagaatgtgaacaatagtaaaccaacaatgcattgatacataagtacgtatggagggacatcatgttaagctatacagggaggataaagtttatcttgtttatgagaatataaaaattgagtatatcgacaccgcctgtttcgccgtgattattgagtattcaatcctttcaagataggtaatgggctatggtaacctaccaaatgataatatctacaatgttataatcttagtatttcccatcacttgacattccgcaaataaacaatattgcatctgttaaatggctcttctaacaaaagaattttgaaaacagagaggaaggacatgggtgcaaagaaaacaaataaaaagaggagcaaggtagactccagcttatgacctgcttccttgtggaattgttgtgattgcctaatggaaactgacatcagtacaaagcaagcagctcgaacacttagttactttttccaaaagaaaaagaaaaagtgaaaagggtatacatagaaggaagctaaccatcctaatttagggttccattttgtttttattttaaaaaaaatggacaatttacaggaccaccacatgtgagatagctaaaataaagacattcaaatataaaattttattcaaactccaataagatattaaaatttcatggtggaagcaaaatagtagtgtaataatacaacaaagatgagtgtataatggatcacctgattttttttcagcaactctttttcaaaagctgcagggaaattagctttattcaaagctaacatgtaggcatcgaaacaaagcaaattactccaaaaggcatacacaatttagagaccaaaagtaggaagacctcatgacgatgggataaggaatattctaatgttagtggagatatggatgagggaaatccactaaatcatgaaggtgtgattattggaccaccagtagcaatgcggagccgtagagtgctcctactcgacctgaattgacgacctccattcctaatgtgaagctatggagtgagagcgcacgatgtggaggagcggatgcaaaccctaacacgaataacacacagatctggggaagatttgatgggaaaagggtattcatacctgggccaaccgtagagacgacgaccaagcgtgtggaggagcaacggagactaacgaatggcgactgaag

SEQ ID NO: 61920 - DNA, 3472 bp, Zea Mays
attttgggaatttaaaagtgaattagtgaaaagaaaaggagaaggaaagatcatgtcatccttatcatgggtcgccgctcaacaggagatatttttccaatcgttcgtatcctttcggacaaagtgctgtgcaccagttccagatctggaagaattcctgccgcccaccagactccacgttcctcacgtcttcttcctccccagcactctctcattcatgtcacctcttttcctcactatccctctctgttccctcgacggtcaggcctctccttaaccgcggatgccgatctctgccaccagcgcacggtacgctagttgatcacgtgatatggaggactagaaccgagtcgaccacaagatgttgttaagcgcgagtttcttcgtaaggtgatgctgatggataaacttaaggatggatggcctgatcaagtgccaggacaaggaagatcatcaagagatcgtcgtctaaccaacactgacttagtgttattccaggtaagccccggtgcattttccacctccttgctgttttaaaatttttatcaccttgtttgacgcattaggtgataggagttgtgtgctaaaccattgatgcatttccttccttggaaaattgattacccttccttgatacccttttatgaaatggatttttgatgcttagccttgctttagaaaaacaaaatgttttgttttaaaacaaaagtgatgctacaaattggatgggaagttttcaaaaataaaacttgatggtgaatccatcatggccatgatggattcaacatcggaaaagatgtacctatgccaggtaccaaactttgggtttaaataataaagctgagaccggacgggtgacttgcacgagaaaggagtcttggtgtagtgtctccgtctatgtcaattaaggaccataccgattgttggcctgctgatctaggaccctttatctggccacatacctcgtcatgggtaagcttgaacccgactattccatacatgaaaagacaatcgcgcactgggagtggagagatggcgagagtggcacgtaccctcctggcaaaggactgcctaaaaggggtggtgtgctctcgggtggcgcggacctgttcatgtggtggaggatccgtgggaatggtagacatgtgcaaaagagttaagagaagcatatgtcgtgtggttggagatccccagctgggtattaatcgatttggatcgccgaacttctcggatatgaatactggatcttcgaccctcatcgtagataacaagcgaaacaaaagttggattttaaaagaaagctagtgtaggacaagtgaatgctctagattaggcaaatctagattcaggaaaagtacttaacttgtgatgtaaaattttggcttaaggacccacttctagtaagcttttatgcaaaaagagtctttgaaacttgatgagccttaccttgaatccctctagccagcatacccttgagagtcttttctttagtcgggtaagtcttgctgagtaattccgtactcagggttttattccctgttgtttttcaggttttactttgtgctgctgttgatggtgttaagtgccggtgggctcggccttcttataagtctaagtaactcttctatacttcttattgaggatggtcacttgagctagcatatatttcaaacttataaataatttataacatttcaaagtttatcactttgaaccacttttgtaaccactccgataaatataatgtaaatttgttgtaacttgtaaaatttggtaataagatttctgctgcaaaatgttcgtgtgtgatttgtgtttacttaatcttgcgatcctggttgtaagtggtttatctggggtccctgggacactcagacatatcctattaagttatttagtgcacatgcatagccgtctgaggtctttgagacaagggtaggtgcatgtggggccaataacttgggaggttctgccacaacacgacacgacccggtccatataatgccagtgccatgcctgggccaccagctcggcccatagtgtcgacccaagccgacacggttaactggactggcacggcccaggcgccagcgcggcccaggcccagctagctaagcgaaacgcgccatatgcccccgcccccatatcccaaagccgcgcctgcacaactaaaccctaaacgtcgtcacgaagctgcgaactcctcccccggtccctctgcctccgctcagcgctcaggctcagatctatcctctctccgctccggtctccctctcctctattcggtctccggctcgacggctctccctctcccccactctagcctcaagacctcaacagaattgcgcgtttgtggaaccgggtaactcttatctgtaaccctagctccggtctccctctcctctcccatatcttcttctccccctccggtgtcatctacaccaactggctgaaactggcacacggcacaacatcatcctcgtctacctcatcgtctccctcgagctcatacgccgtcggctgctatggtactctggattcaaatccgtcaaggaaccgggtggccagatcgattgttcgtcgacggtcgaccggtcaacgtcgcctgcggagatctcggtgctccagcttattaggcaaccctaaccctaacctcttttagtatgtaaccctagctctggtctccctctcctctctcctatcttcttctcccccttcggtgtcatctacactaactggccggcactagcacacgacacaacatcatcctcgtctacctcatcgtctccctcgagctcatacaccgtcggctgctacggtgctctagatttaaatccgtcgaggaaccgggtagccggatcggttgttcgtcgacggtcgatcagtcgacgtcgcctgtggagatcccggtgctccggcttattaggtaaccctaacctcttttattatgtaaccctaaccctaatattgtattcctattgtagccgttgaggaaccgggactccgaggtgggtcgatgaccgtctccgacgatgaaactgttgagattgatgacaacgaggagaggcggttgtgtgggttgaccggagattacaatgaggatgaccttcgggaggatgctgcagcgctcttaggccatagcagtgagcatcccatccatgttggtgatgaacaacaaggcggtggtgaggaaggtcaaggtgaaggggacgaacacaacgccaagcattgtcgtccttctacttctccagtctggttagatttcgagaaacttttcaaaattgtgaacgtatatctcagattgccgcagttttctcatgcattcccattcacgtacgagctacagagcgtggcggcacaaagggcacgtgttgcttcgccgcaaccaattcgcaatgcagcggtggtggaactcgtggcggccggggcacggcgtgacgacgacctccacgccgtcctcgtagtcctctag

SEQ ID NO: 61921 - DNA, 986 bp, Zea Mays
attttgggaatttaaaagtgaattagtgaaaagaaaaggagaaggaaagatcatgtcatccttatcatgggtcgccgctcaacaggagatatttttccaatcgttcgtatcctttcggacaaagtgctgtgcaccagttccagatctggaagaattcctgccgcccaccagactccacgttcctcacgtcttcttcctccccagcactctctcattcatgtcacctcttttcctcactatccctctctgttccctcgacggtcaggcctctccttaaccgcggatgccgatctctgccaccagcgcacggtacgctagttgatcacgtgatatggaggactagaaccgagtcgaccacaagatgttgttaagcgcgagtttcttcgtaaggtgatgctgatggataaacttaaggatggatggcctgatcaagtgccaggacaaggaagatcatcaagagatcgtcgtctaaccaacactgacttagtgttattccagccgttgaggaaccgggactccgaggtgggtcgatgaccgtctccgacgatgaaactgttgagattgatgacaacgaggagaggcggttgtgtgggttgaccggagattacaatgaggatgaccttcgggaggatgctgcagcgctcttaggccatagcagtgagcatcccatccatgttggtgatgaacaacaaggcggtggtgaggaaggtcaaggtgaaggggacgaacacaacgccaagcattgtcgtccttctacttctccagtctggttagatttcgagaaacttttcaaaattgtgaacgtatatctcagattgccgcagttttctcatgcattcccattcacgtacgagctacagagcgtggcggcacaaagggcacgtgttgcttcgccgcaaccaattcgcaatgcagcggtggtggaactcgtggcggccggggcacggcgtgacgacgacctccacgccgtcctcgtagtcctctag

SEQ ID NO: 61922 - DNA, 880 bp, Zea Mays
attttgggaatttaaaagtgaattagtgaaaagaaaaggagaaggaaagatcatgtcatccttatcatgggtcgccgctcaacaggagatatttttccaatcgttcgtatcctttcggacaaagtgctgtgcaccagttccagatctggaagaattcctgccgcccaccagactccacgttcctcacgtcttcttcctccccagcactctctcattcatgtcacctcttttcctcactatccctctctgttccctcgacggtcaggcctctccttaaccgcggatgccgatctctgccaccagcgcacggtacgctagttgatcacgtgatatggaggactagaaccgagtcgaccacaagatgttgttaagcgcgagtttcttcgtaaggtgatgctgatggataaacttaaggatggatggcctgatcaagtgccaggacaaggaagatcatcaagagatcgtcgtctaaccaacactgacttagtgttattccaggttttactttgtgctgctgttgatggtgttaagtgccggtgggctcggccttcttataagtctaagatcatcgatgaacggaggaggaggttgaagtctgatgtggttgagatgttgacatgcattaaagattgggaggatgatgaagcaaggatgcaacacatggtgtatgacaaagagcttgaagaaacatttgaaaatctttatattgattagtctctttgtgaccatttgtgtaatgggactgtaatattatgcacttggactttgtttgttgtaaggacaatgaactttttaatgagctgtgctgtactcttttttcccgtctagggtttatcacaagggtgagttttagctagacaagtttttaacgaggcagcta

SEQ ID NO: 61923 - DNA, 1527 bp, Zea Mays
atgaagcatgtagtagttgtttcaaaaaggatagtgacaactttgcaggatgttcagttaaattcagtagtcctcgttgttcacaaaactataaagtaccaagctccagtgtatgttgaacaaccaaggcaacagcaggtgccaccaccacagcgccaaccacgcagaccaccagcacaattccagcagctagagtacgaaggtatggcgattcttatgcacggggtcgaggaagagggcgtgggcgtggaaggggctggggtagaggtggctacggtggctatggtggatatggaaacaaccaaggtggctatcatcagggtggtgggtattatgacaatcaaggtggttataatggctatgataatcaaggtggatatagtggctatgataatcaaagtggatatggtggtggatatggctataaacaaggcagatatgggaactatcaagaaaatggtggatataaccgagacccaggaagtggtatgcgaggaagatgcaattggggttaccaaggagcgcgaaccccttggtggccgcctccagctgcgcgaatgtgaactctccagggggtccttgaacgatgacgatggtcgtatatggttgccatatgatgttgccaattccattcctgaatgcagtagcattccgaattttccagctctatatggtaatcttcgaactgaagtcagaataaatgatctggcagacatgctccaaaggatcggggtgcggaagttgtctgggcatgacattgttaaaaatcacatcatggtgtccttgcgtaacggtttagatgctaatgtggctgatatagtgattagagagtatgtagtgaaagttgaaaaaactttatcccaagttgattctattctagcaggaggactttctctagctgatgtatctacaaaacaatgtacagtgtatgactgggagtcaccagaattatctagaattttatcaatattttcttcaaaaagatgcaaggaaaaatgtgtatatcttctggaagttcttgatagattctgggatgatcattatagggcaaaatctaggatcttcacagatgctacacattgtggtgaaaacagagcagttgaatcatcatttatgaagtgcattcaaagcttcaaatggatagcatcaagaatggatgaggatcttcattatgcaacagatttattctatgattgtgaaaatgtccgctctctttttggtagtgtggctccatatgttgtatcgcaggtatctagcagttcacttaagaaggccattggattcaaaacagaggtatcttactgtgatgcattgatggtcctgaagtcttggataacgtcaaaggttccctttagagcaagtatgagccagatgtggaaattctataccttattgtctgaaggcgtggcagacgcaaagattgacattaaacgggagttcatgtcgtctccctctatatttacaccactacagcgtcctcgggcaagtacgctagttgatcacgtgatatggaggactagaaccgag

SEQ ID NO: 61924 - DNA, 1622 bp, Zea Mays
gtcctatattccttacaaaccatggatacaagagcccagctgatgaaccaattcacttcagtaaagattatggaaattccgtggatgctactagactcttcagaatgtagaaataagttggattgaacttgatagtacctatttgcagcatcatggttcacagtcgtcatcatttgcactggaaaaatggaggcaattttttgaagaaatgggtgtgactgattttgtgcagtgtatgactgggagtcaccagaattatctagaattttatcaatattttcttcaaaaagatgcaaggaaaaatgtgtatatcttctggaagttcttgatagattctgggatgatcattatagggcaaaatctaggatcttcacagatgctacacattgtggtgaaaacagagcagttgaatcatcatttatgaagtgcattcaaagcttcaaatggatagcatcaagaatggatgaggatcttcattatgcaacagatttattctatgattgtgaaaatgtccgctctctttttggtagtgtggctccatatgttgtatcgcaggtatctagcagttcacttaagaaggccattggattcaaaacagaggtatcttactgtgatgcattgatggtcctgaagtcttggataacgtcaaaggttccctttagagcaagtatgagccagatgtggaaattctataccttattgtctgaaggcgtggcagacgcaaagattgacattaaacgggagttcatgtcgtctccctctatatttacaccactacagcgtcctcgggcaatttaaagacatcccatctattggacgctccatcactagctgcaatagacaaaacttagaggagccatttccactatttcatctattaaaacaagtaagaaaatagaaaggcttggaagcaatggtgttccacccagaacaagccgactcaagtgaggcaacgagtcaggaagcgcaccatggtcggatgaacgaagaagaaaaatctgttgcatggaatggatgtatgttattagattaaaataacaaaatttatgtatggatagaatcacaaatgaattctgaaacattttctcataacagtataacgcacacatgtacataagttatcgtgttgttatacggttccgttgcaacgtacgggcactcacctagtcatataatagagaataatctccaccttggatttttaacatattttttatgttatttttatattgtcataaaatgcactcataataaaaattccagcatgatgcataatttagtgtcatatatttttattaattgtttttaaaaggtggtgttcacatgtgatgacaaatggatggatacactcatataaatactcatataaataaaggaaaacacttttctgcttttaatatgatctctaacaaattaggtgttccacatactttggtggaaggctctcctttttttcaggatgatgaggcgcacacttagggatgccttatccgtgtcgttcgacaatgctggagagtcttagtcttagcataggaaggtctccagagtagcttcgaaaattttggagcgatcaaggtttcgatgcctttagccggcagtatagatggccatatggcactaac

SEQ ID NO: 61925 - DNA, 1797 bp, Zea Mays
gttcatcttcagtcttcttgcaccagctgtaactttgaaagaggagagatagtgtcagaactacggaagagtcctatattccttacaaaccatggatacaagagcccagctgatgaaccaattcacttcagtaaagattatggaaattccgtggatgctactagactcttcagaatgtagaaataagttggattgaacttgatagtacctatttgcagcatcatggttcacagtcgtcatcatttgcactggaaaaatggaggcaattttttgaagaaatgggtgtgactgattttgtgcaggtacagtgtatgactgggagtcaccagaattatctagaattttatcaatattttcttcaaaaagatgcaaggaaaaatgtgtatatcttctggaagttcttgatagattctgggatgatcattatagggcaaaatctaggatcttcacagatgctacacattgtggtgaaaacagagcagttgaatcatcatttatgaagtgcattcaaagcttcaaatggatagcatcaagaatggatgaggatcttcattatgcaacagatttattctatgattgtgaaaatgtccgctctctttttggtagtgtggctccatatgttgtatcgcaggtatctagcagttcacttaagaaggccattggattcaaaacagaggtatcttactgtgatgcattgatggtcctgaagtcttggataacgtcaaaggttccctttagagcaagtatgagccagatgtggaaattctataccttattgtctgaaggcgtggcagacgcaaagattgacattaaacgggagttcatgtcgtctccctctatatttacaccactacagcgtcctcgggcaatttaaagacatcccatctattggacgctccatcactagctgcaatagacaaaacttagaggagccatttccactatttcatctattaaaacaagtaagaaaatagaaaggcttggaagcaatggtgttccacccagaacaagccgactcaaggtatggcatggtcttgtcggcccctgtggcagcacatggccttcattgctagctgcactgatgtgagtagcgactttttgtctactctttgcaaaacagtgaggcaacgagtcaggaagcgcaccatggtcggatgaacgaagaagaaaaatctgttgcatggaatggatgtatgttattagattaaaataacaaaatttatgtatggatagaatcacaaatgaattctgaaacattttctcataacagtataacgcacacatgtacataagttatcgtgttgttatacggttccgttgcaacgtacgggcactcacctagtcatataatagagaataatctccaccttggatttttaacatattttttatgttatttttatattgtcataaaatgcactcataataaaaattccagcatgatgcataatttagtgtcatatatttttattaattgtttttaaaaggtggtgttcacatgtgatgacaaatggatggatacactcatataaatactcatataaataaaggaaaacacttttctgcttttaatatgatctctaacaaattaggtgttccacatactttggtggaaggctctcctttttttcaggatgatgaggcgcacacttagggatgccttatccgtgtcgttcgacaatgctggagagtcttagtcttagcataggaaggtctccagagtagcttcgaaaattttggagcgatcaaggtttcgatgcctttagccggcagtatagatggccatatggcactaac

SEQ ID NO: 61926 - DNA, 2548 bp, Zea Mays
ggatttttccgtctgttgcaaaatgatccagttataatgtttcaattggagctacacacaagagcgtttcaaataacctcgcttgcgcgaaccccttggtggccgcctccagctgcgcgaatgtgaactctccagggggtccttgaacgatgacgatggtcgtatatggttgccatatgatgttgccaattccattcctgaatgcagtagcattccgaattttccagctctatatggtaatcttcgaactgaagtcagaataaatgatctggcagacatgctccaaaggatcggggtgcggaagttgtctgggcatgacattgttaaaaatcacatcatggtgtccttgcgtaacggtttagatgctaatgtggctgatatagtgattagagagtatgtagtgaaagttgaaaaaactttatcccaagttgattctattctagcaggaggactttctctagctgatgtatctacaaaacaatgtacagtgtatgactgggagtcaccagaattatctagaattttatcaatattttcttcaaaaagatgcaaggaaaaatgtgtatatcttctggaagttcttgatagattctgggatgatcattatagggcaaaatctaggatcttcacagatgctacacattgtggtgaaaacagagcagttgaatcatcatttatgaagtgcattcaaagcttcaaatggatagcatcaagaatggatgaggatcttcattatgcaacagatttattctatgattgtgaaaatgtccgctctctttttggtagtgtggctccatatgttgtatcgcaggtatctagcagttcacttaagaaggccattggattcaaaacagaggtatcttactgtgatgcattgatggtcctgaagtcttggataacgtcaaaggttccctttagagcaagtatgagccagatgtggaaattctataccttattgtctgaaggcgtggcagacgcaaagattgacattaaacgggagttcatgtcgtctccctctatatttacaccactacagcgtcctcgggcaagtgagttcatgtcgtctccctcaatattgccactcaagtttctgtttacaagatcgacagttactcgtcagaatagccagaagtgctagcacttccttttgagtaatgacagtaactccatttatatttggtgaaaatgtttagcgtcacatgatctgtgttcttaggatattgaggtctaaatgactacttcaatctgtaatcagatttaatatgttgctgggttgatgagatgagaaaaaaatgtccactatactgtttagcaatattttcactctttaaatggcatgtaagtctgtgacaaagagctgcatgggaggattaatgtgattttaataatatcctcacccttcaagtgtcctgtgactaatagttgcacattaggattagccagacagtagtatgtgattaatggagacatttgccatgccagtttaattgtgcattactgaatacatgaacacaatagttattattcttgcaacacaatagctagctgttcactgaattgcatcttttgttctatgttgtcttcataggtggaagagactttgttaaaacgaactaaagtgtttctctgctcatattccagtgtttatttataacatgcctttgttttattattttggttttttaaatgtcatgcttatatcctggtttggatatccagtttaaagacatcccatctattggacgctccatcactagctgcaatagacaaaacttagaggagccatttccactatttcatctattaaaacaagtaagaaaatagaaaggcttggaagcaatggtgttccacccagaacaagccgactcaagtgaggcaacgagtcaggaagcgcaccatggtcggatgaacgaagaagaaaaatctgttgcatggaatggatgtatgttattagattaaaataacaaaatttatgtatggatagaatcacaaatgaattctgaaacattttctcataacagtataacgcacacatgtacataagttatcgtgttgttatacggttccgttgcaacgtacgggcactcacctagtcatataatagagaataatctccaccttggatttttaacatattttttatgttatttttatattgtcataaaatgcactcataataaaaattccagcatgatgcataatttagtgtcatatatttttattaattgtttttaaaaggtggtgttcacatgtgatgacaaatggatggatacactcatataaatactcatataaataaaggaaaacacttttctgcttttaatatgatctctaacaaattaggtgttccacatactttggtggaaggctctcctttttttcaggatgatgaggcgcacacttagggatgccttatccgtgtcgttcgacaatgctggagagtcttagtcttagcataggaaggtctccagagtagcttcgaaaattttggagcgatcaaggtttcgatgcctttagccggcagtatagatggccatatggcactaac

SEQ ID NO: 61927 - DNA, 2439 bp, Zea Mays
atgaagcatgtagtagttgtttcaaaaaggatagtgacaactttgcaggatgttcagttaaattcagtagtcctcgttgttcacaaaactataaagtaccaagctccagtgtatgttgaacaaccaaggcaacagcaggtgccaccaccacagcgccaaccacgcagaccaccagcacaattccagcagctagagtacgaaggtatggcgattcttatgcacggggtcgaggaagagggcgtgggcgtggaaggggctggggtagaggtggctacggtggctatggtggatatggaaacaaccaaggtggctatcatcagggtggtgggtattatgacaatcaaggtggttataatggctatgataatcaaggtggatatagtggctatgataatcaaagtggatatggtggtggatatggctataaacaaggcagatatgggaactatcaagaaaatggtggatataaccgagacccaggaagtggtatgcgaggaagatgcaattggggttaccaaggagcgcgaaccccttggtggccgcctccagctgcgcgaatgtgaactctccagggggtccttgaacgatgacgatggtcgtatatggttgccatatgatgttgccaattccattcctgaatgcagtagcattccgaattttccagctctatatggtaatcttcgaactgaagtcagaataaatgatctggcagacatgctccaaaggatcggggtgcggaagttgtctgggcatgacattgttaaaaatcacatcatggtgtccttgcgtaacggtttagatgctaatgtggctgatatagtgattagagagtattgtatgactgggagtcaccagaattatctagaattttatcaatattttcttcaaaaagatgcaaggaaaaatgtgtatatcttctggaagttcttgatagattctgggatgatcattatagggcaaaatctaggatcttcacagatgctacacattgtggtgaaaacagagcagttgaatcatcatttatgaagtgcattcaaagcttcaaatggatagcatcaagaatggatgaggatcttcattatgcaacagatttattctatgattgtgaaaatgtccgctctctttttggtagtgtggctccatatgttgtatcgcaggtatctagcagttcacttaagaaggccattggattcaaaacagaggtatcttactgtgatgcattgatggtcctgaagtcttggataacgtcaaaggttccctttagagcaagtatgagccagatgtggaaattctataccttattgtctgaaggcgtggcagacgcaaagattgacattaaacgggagttcatgtcgtctccctctatatttacaccactacagcgtcctcgggcaagtggaagagactttgttaaaacgaactaaagtgtttctctgctcatattccagtgtttatttataacatgcctttgttttattattttggttttttaaatgtcatgcttatatcctggtttggatatccagtttaaagacatcccatctattggacgctccatcactagctgcaatagacaaaacttagaggcaattacttatctcaatcttacttctacatttatatttccctcttgtgttttaccttttgcttatatcctttgcgtgacataggagccatttccactatttcatctattaaaacaagtaagaaaatagaaaggcttggaagcaatggtgttccacccagaacaagccgactcaagtgaggcaacgagtcaggaagcgcaccatggtcggatgaacgaagaagaaaaatctgttgcatggaatggatgtatgttattagattaaaataacaaaatttatgtatggatagaatcacaaatgaattctgaaacattttctcataacagtataacgcacacatgtacataagttatcgtgttgttatacggttccgttgcaacgtacgggcactcacctagtcatataatagagaataatctccaccttggatttttaacatattttttatgttatttttatattgtcataaaatgcactcataataaaaattccagcatgatgcataatttagtgtcatatatttttattaattgtttttaaaaggtggtgttcacatgtgatgacaaatggatggatacactcatataaatactcatataaataaaggaaaacacttttctgcttttaatatgatctctaacaaattaggtgttccacatactttggtggaaggctctcctttttttcaggatgatgaggcgcacacttagggatgccttatccgtgtcgttcgacaatgctggagagtcttagtcttagcataggaaggtctccagagtagcttcgaaaattttggagcgatcaaggtttcgatgcctttagccggcagtatagatggccatatggcactaac

SEQ ID NO: 61928 - DNA, 2636 bp, Zea Mays
atgaagcatgtagtagttgtttcaaaaaggatagtgacaactttgcaggatgttcagttaaattcagtagtcctcgttgttcacaaaactataaagtaccaagctccagtgtatgttgaacaaccaaggcaacagcaggtgccaccaccacagcgccaaccacgcagaccaccagcacaattccagcagctagagtacgaaggtatggcgattcttatgcacggggtcgaggaagagggcgtgggcgtggaaggggctggggtagaggtggctacggtggctatggtggatatggaaacaaccaaggtggctatcatcagggtggtgggtattatgacaatcaaggtggttataatggctatgataatcaaggtggatatagtggctatgataatcaaagtggatatggtggtggatatggctataaacaaggcagatatgggaactatcaagaaaatggtggatataaccgagacccaggaagtggtatgcgaggaagatgcaattggggttaccaaggagcgcgaaccccttggtggccgcctccagctgcgcgaatgtgaactctccagggggtccttgaacgatgacggtccgctccgcttccgcgtcatcacacgcgacagctgccaccggaataggatgcgcgcccgcgacccgtacggtttgtgacttcaaaaataacagcaagaagcctcgaagacattcttttggataaagttaggaaagtaccatgcatcccactttcagatggttcatttacctctatttcagatggtcgtatatggttgccatatgatgttgccaattccattcctgaatgcagtagcattccgaattttccagctctatatggtaatcttcgaactgaagtcagaataaatgatctggcagacatgctccaaaggatcggggtgcggaagttgtctgggcatgacattgttaaaaatcacatcatggtgtccttgcgtaacggtttagatgctaatgtggctgatatagtgattagagagtattgtatgactgggagtcaccagaattatctagaattttatcaatattttcttcaaaaagatgcaaggaaaaatgtgtatatcttctggaagttcttgatagattctgggatgatcattatagggcaaaatctaggatcttcacagatgctacacattgtggtgaaaacagagcagttgaatcatcatttatgaagtgcattcaaagcttcaaatggatagcatcaagaatggatgaggatcttcattatgcaacagatttattctatgattgtgaaaatgtccgctctctttttggtagtgtggctccatatgttgtatcgcaggtatctagcagttcacttaagaaggccattggattcaaaacagaggtatcttactgtgatgcattgatggtcctgaagtcttggataacgtcaaaggttccctttagagcaagtatgagccagatgtggaaattctataccttattgtctgaaggcgtggcagacgcaaagattgacattaaacgggagttcatgtcgtctccctctatatttacaccactacagcgtcctcgggcaagtggaagagactttgttaaaacgaactaaagtgtttctctgctcatattccagtgtttatttataacatgcctttgttttattattttggttttttaaatgtcatgcttatatcctggtttggatatccagtttaaagacatcccatctattggacgctccatcactagctgcaatagacaaaacttagaggagccatttccactatttcatctattaaaacaagtaagaaaatagaaaggcttggaagcaatggtgttccacccagaacaagccgactcaaggtatggcatggtcttgtcggcccctgtggcagcacatggccttcattgctagctgcactgatgtgagtagcgactttttgtctactctttgcaaaacagtgaggcaacgagtcaggaagcgcaccatggtcggatgaacgaagaagaaaaatctgttgcatggaatggatgtatgttattagattaaaataacaaaatttatgtatggatagaatcacaaatgaattctgaaacattttctcataacagtataacgcacacatgtacataagttatcgtgttgttatacggttccgttgcaacgtacgggcactcacctagtcatataatagagaataatctccaccttggatttttaacatattttttatgttatttttatattgtcataaaatgcactcataataaaaattccagcatgatgcataatttagtgtcatatatttttattaattgtttttaaaaggtggtgttcacatgtgatgacaaatggatggatacactcatataaatactcatataaataaaggaaaacacttttctgcttttaatatgatctctaacaaattaggtgttccacatactttggtggaaggctctcctttttttcaggatgatgaggcgcacacttagggatgccttatccgtgtcgttcgacaatgctggagagtcttagtcttagcataggaaggtctccagagtagcttcgaaaattttggagcgatcaaggtttcgatgcctttagccggcagtatagatggccatatggcactaac

SEQ ID NO: 61929 - DNA, 2315 bp, Zea Mays
atgaagcatgtagtagttgtttcaaaaaggatagtgacaactttgcaggatgttcagttaaattcagtagtcctcgttgttcacaaaactataaagtaccaagctccagtgtatgttgaacaaccaaggcaacagcaggtgccaccaccacagcgccaaccacgcagaccaccagcacaattccagcagctagagtacgaaggtatggcgattcttatgcacggggtcgaggaagagggcgtgggcgtggaaggggctggggtagaggtggctacggtggctatggtggatatggaaacaaccaaggtggctatcatcagggtggtgggtattatgacaatcaaggtggttataatggctatgataatcaaggtggatatagtggctatgataatcaaagtggatatggtggtggatatggctataaacaaggcagatatgggaactatcaagaaaatggtggatataaccgagacccaggaagtggtatgcgaggaagatgcaattggggttaccaaggagcgcgaaccccttggtggccgcctccagctgcgcgaatgtgaactctccagggggtccttgaacgatgacgatggtcgtatatggttgccatatgatgttgccaattccattcctgaatgcagtagcattccgaattttccagctctatatggtaatcttcgaactgaagtcagaataaatgatctggcagacatgctccaaaggatcggggtgcggaagttgtctgggcatgacattgttaaaaatcacatcatggtgtccttgcgtaacggtttagatgctaatgtggctgatatagtgattagagagtatgtagtgaaagttgaaaaaactttatcccaagttgattctattctagcaggaggactttctctagctgatgtatctacaaaacaatgtacagtgtatgactgggagtcaccagaattatctagaattttatcaatattttcttcaaaaagatgcaaggaaaaatgtgtatatcttctggaagttcttgatagattctgggatgatcattatagggcaaaatctaggatcttcacagatgctacacattgtggtgaaaacagagcagttgaatcatcatttatgaagtgcattcaaagcttcaaatggatagcatcaagaatggatgaggatcttcattatgcaacagatttattctatgattgtgaaaatgtccgctctctttttggtagtgtggctccatatgttgtatcgcaggtatctagcagttcacttaagaaggccattggattcaaaacagaggtatcttactgtgatgcattgatggtcctgaagtcttggataacgtcaaaggttccctttagagcaagtatgagccagatgtggaaattctataccttattgtctgaaggcgtggcagacgcaaagattgacattaaacgggagttcatgtcgtctccctctatatttacaccactacagcgtcctcgggcaatttaaagacatcccatctattggacgctccatcactagctgcaatagacaaaacttagaggagccatttccactatttcatctattaaaacaagtaagaaaatagaaaggcttggaagcaatggtgttccacccagaacaagccgactcaagtgaggcaacgagtcaggaagcgcaccatggtcggatgaacgaagaagaaaaatctgttgcatggaatggatgtatgttattagattaaaataacaaaatttatgtatggatagaatcacaaatgaattctgaaacattttctcataacagtataacgcacacatgtacataagttatcgtgttgttatacggttccgttgcaacgtacgggcactcacctagtcatataatagagaataatctccaccttggatttttaacatattttttatgttatttttatattgtcataaaatgcactcataataaaaattccagcatgatgcataatttagtgtcatatatttttattaattgtttttaaaaggtggtgttcacatgtgatgacaaatggatggatacactcatataaatactcatataaataaaggaaaacacttttctgcttttaatatgatctctaacaaattaggtgttccacatactttggtggaaggctctcctttttttcaggatgatgaggcgcacacttagggatgccttatccgtgtcgttcgacaatgctggagagtcttagtcttagcataggaaggtctccagagtagcttcgaaaattttggagcgatcaaggtttcgatgcctttagccggcagtatagatggccatatggcactaac

SEQ ID NO: 61930 - DNA, 2406 bp, Zea Mays
atgaagcatgtagtagttgtttcaaaaaggatagtgacaactttgcaggatgttcagttaaattcagtagtcctcgttgttcacaaaactataaagtaccaagctccagtgtatgttgaacaaccaaggcaacagcaggtgccaccaccacagcgccaaccacgcagaccaccagcacaattccagcagctagagtacgaaggtatggcgattcttatgcacggggtcgaggaagagggcgtgggcgtggaaggggctggggtagaggtggctacggtggctatggtggatatggaaacaaccaaggtggctatcatcagggtggtgggtattatgacaatcaaggtggttataatggctatgataatcaaggtggatatagtggctatgataatcaaagtggatatggtggtggatatggctataaacaaggcagatatgggaactatcaagaaaatggtggatataaccgagacccaggaagtggtatgcgaggaagatgcaattggggttaccaaggagcgcgaaccccttggtggccgcctccagctgcgcgaatgtgaactctccagggggtccttgaacgatgacggtccgctccgcttccgcgtcatcacacgcgacagctgccaccggaataggatgcgcgcccgcgacccgtacggtttgtgacttcaaaaataacagcaagaagcctcgaagacattcttttggataaagttaggaaagtaccatgcatcccactttcagatggttcatttacctctatttcagatggtcgtatatggttgccatatgatgttgccaattccattcctgaatgcagtagcattccgaattttccagctctatatggtaatcttcgaactgaagtcagaataaatgatctggcagacatgctccaaaggatcggggtgcggaagttgtctgggcatgacattgttaaaaatcacatcatggtgtccttgcgtaacggtttagatgctaatgtggctgatatagtgattagagagtattgtatgactgggagtcaccagaattatctagaattttatcaatattttcttcaaaaagatgcaaggaaaaatgtgtatatcttctggaagttcttgatagattctgggatgatcattatagggcaaaatctaggatcttcacagatgctacacattgtggtgaaaacagagcagttgaatcatcatttatgaagtgcattcaaagcttcaaatggatagcatcaagaatggatgaggatcttcattatgcaacagatttattctatgattgtgaaaatgtccgctctctttttggtagtgtggctccatatgttgtatcgcaggtatctagcagttcacttaagaaggccattggattcaaaacagaggtatcttactgtgatgcattgatggtcctgaagtcttggataacgtcaaaggttccctttagagcaagtatgagccagatgtggaaattctataccttattgtctgaaggcgtggcagacgcaaagattgacattaaacgggagttcatgtcgtctccctctatatttacaccactacagcgtcctcgggcaatttaaagacatcccatctattggacgctccatcactagctgcaatagacaaaacttagaggagccatttccactatttcatctattaaaacaagtaagaaaatagaaaggcttggaagcaatggtgttccacccagaacaagccgactcaagtgaggcaacgagtcaggaagcgcaccatggtcggatgaacgaagaagaaaaatctgttgcatggaatggatgtatgttattagattaaaataacaaaatttatgtatggatagaatcacaaatgaattctgaaacattttctcataacagtataacgcacacatgtacataagttatcgtgttgttatacggttccgttgcaacgtacgggcactcacctagtcatataatagagaataatctccaccttggatttttaacatattttttatgttatttttatattgtcataaaatgcactcataataaaaattccagcatgatgcataatttagtgtcatatatttttattaattgtttttaaaaggtggtgttcacatgtgatgacaaatggatggatacactcatataaatactcatataaataaaggaaaacacttttctgcttttaatatgatctctaacaaattaggtgttccacatactttggtggaaggctctcctttttttcaggatgatgaggcgcacacttagggatgccttatccgtgtcgttcgacaatgctggagagtcttagtcttagcataggaaggtctccagagtagcttcgaaaattttggagcgatcaaggtttcgatgcctttagccggcagtatagatggccatatggcactaac

SEQ ID NO: 61931 - DNA, 3802 bp, Zea Mays
atgggttcggtggtgtttgttcttggcgtgcgtgatttgggcgagtccggagctacccgcgagttctgcggacggttgaagaagacgcggtcctgggtggcccacgcgacaatgctgcgcgatgaagagctggcgcggcatggcaatgactggcgtccacacagtagcgggggtgcacggttctgcctgcctcaacgcccgcgctcctcaccaacgccgcaatcatcgcccacgcgcggatcccccacgatcctccccaccaccgccgccacaatcatcgctcacgcgcggatcccccatgatcctccctaccgtcgccgcaatcaacgcccacgcggatcctccccacgatccccaccccgcacacccccacccttccatcgccggccggaatcgatcgatccaaagctccctttagagctcgagctctatccaacccacgaacgggatcccgatgcccatggcggcctcggttcgtctcgccgcaccggctgcctcgcccccgctgacgtggtggaggtgggctcctcttctcgccgcgtcacatccacgggcgaacccgccgcctcccgcaccgcgcctgcgggcgcccgctctcttctccgggcctcccctgttccccgcgattccagcgccggagccatcgtccggaggacaccgtgtgcggcggcggcaataggtggaggtgtggaggcggagtccacggagcgggaggcgcccgatcgggatactctgaagcgggtggcgctgctcgcgcttggctgctgcactgcagccgccgctctcggcgtggcgcgggcagcggcgggggactccatcaaggcgtcaggattcaggctatgggtggcggagtcgctgcggaggctcggatggcccgatgacaccgtcgtgttcgcgctcgcaacgctgccggtgatcgagctgcggggggcgatcccgttgggtattggctgtggggcccatccccactgcccctctgtcgcaaaccccgcgcacgccgcctccactgcacacccccgccttccatcatcgggcctctgccgcaaaccccgcacacgtcgcctccaccgcacacctcgcccttccatcgtcgccaccgcgcactcaccctccacaccatcctcgccccaaatcgctcagcctaagcatagatggaagtccccccgcatccgctcccgcgcatcccgacatcagtggattgcggcagaggcccttcgtgcacgatctgtttccccctccacgcatggcggttccgcctccacctaccgtcgccccatccactcaaggccaattgcatccaaatgtcacgcaggccgcacgtcatcctcatccttgtggcgtcaacaaccatgtgcggcaagcagcggatgcggtagatgattgtttgcgtcccatatagctcaatatatgcctgcccccgatgccatctacatgcctagaggcgacggtcggacgggccaagtaggagccaaaaagaagcaagccccgtcgccgtcatggaaggaggaggccatcccacccacgctgacgaggagccaccaatagcaggtgccaccaccacccaaggagaaagccgcccaaggagacctttcatttcagattggagatgactcggcatgtttccatgatttcaattacactgtcccctagagagctggacaagcacactcctgggtaccaagctccagtgtatgttgaacaaccaaggcaacagcaggtgccaccaccacagcgccaaccacgcagaccaccagcacaattccagcagctagagtacgaaggtatggcgattcttatgcacggggtcgaggaagagggcgtgggcgtggaaggggctggggtagaggtggctacggtggctatggtggatatggaaacaaccaaggtggctatcatcagggtggtgggtattatgacaatcaaggtggttataatggctatgataatcaaggtggatatagtggctatgataatcaaagtggatatggtggtggatatggctataaacaaggcagatatgggaactatcaaggcaatgacacattttgataagttgatccagaaaatggtggatataaccgagacccaggaagtggtatgcgaggaagatgcaattggggttaccaaggagggcagactcagtgctggatgctccctgggtctggtgaagcgcgaaccccttggtggccgcctccagctgcgcgaatgtgaactctccagggggtccttgaacgatgacgatggtcgtatatggttgccatatgatgttgccaattccattcctgaatgcagtagcattccgaattttccagctctatatggtagtgaaagttgaaaaaactttatcccaagttgattctattctagcaggaggactttctctagctgatgtatctacaaaacaatgtacagtgtatgactgggagtcaccagaattatctagaattttatcaatattttcttcaaaaagatgcaaggaaaaatgtgtatatcttctggaagttcttgatagattctgggatgatcattatagggcaaaatctaggatcttcacagatgctacacattgtggtgaaaacagagcagttgaatcatcatttatgaagtgcattcaaagcttcaaatggatagcatcaagaatggatgaggatcttcattatgcaacagatttattctatgattgtgaaaatgtccgctctctttttggtagtgtggctccatatgttgtatcgcaggtatctagcagttcacttaagaaggccattggattcaaaacagaggtatcttactgtgatgcattgatggtcctgaagtcttggataacgtcaaaggttccctttagagcaagtatgagccagatgtggaaattctataccttattgtctgaaggcgtggcagacgcaaagattgacattaaacgggagttcatgtcgtctccctctatatttacaccactacagcgtcctcgggcaatttaaagacatcccatctattggacgctccatcactagctgcaatagacaaaacttagaggagccatttccactatttcatctattaaaacaagtaagaaaatagaaaggcttggaagcaatggtgttccacccagaacaagccgactcaagtgaggcaacgagtcaggaagcgcaccatggtcggatgaacgaagaagaaaaatctgttgcatggaatggatgtatgttattagattaaaataacaaaatttatgtatggatagaatcacaaatgaattctgaaacattttctcataacagtataacgcacacatgtacataagttatcgtgttgttatacggttccgttgcaacgtacgggcactcacctagtcatataatagagaataatctccaccttggatttttaacatattttttatgttatttttatattgtcataaaatgcactcataataaaaattccagcatgatgcataatttagtgtcatatatttttattaattgtttttaaaaggtggtgttcacatgtgatgacaaatggatggatacactcatataaatactcatataaataaaggaaaacacttttctgcttttaatatgatctctaacaaattaggtgttccacatactttggtggaaggctctcctttttttcaggatgatgaggcgcacacttagggatgccttatccgtgtcgttcgacaatgctggagagtcttagtcttagcataggaaggtctccagagtagcttcgaaaattttggagcgatcaaggtttcgatgcctttagccggcagtatagatggccatatggcactaac

SEQ ID NO: 61932 - DNA, 4633 bp, Zea Mays
atgggttcggtggtgtttgttcttggcgtgcgtgatttgggcgagtccggagctacccgcgagttctgcggacggttgaagaagacgcggtcctgggtggcccacgcgacaatgctgcgcgatgaagagctggcgcggcatggcaatgactggcgtccacacagtagcgggggtgcacggttctgcctgcctcaacgcccgcgctcctcaccaacgccgcaatcatcgcccacgcgcggatcccccacgatcctccccaccaccgccgccacaatcatcgctcacgcgcggatcccccatgatcctccctaccgtcgccgcaatcaacgcccacgcggatcctccccacgatccccaccccgcacacccccacccttccatcgccggccggaatcgatcgatccaaagctccctttagagctcgagctctatccaacccacgaacgggatcccgatgcccatggcggcctcggttcgtctcgccgcaccggctgcctcgcccccgctgacgtggtggaggtgggctcctcttctcgccgcgtcacatccacgggcgaacccgccgcctcccgcaccgcgcctgcgggcgcccgctctcttctccgggcctcccctgttccccgcgattccagcgccggagccatcgtccggaggacaccgtgtgcggcggcggcaataggtggaggtgtggaggcggagtccacggagcgggaggcgcccgatcgggatactctgaagcgggtggcgctgctcgcgcttggctgctgcactgcagccgccgctctcggcgtggcgcgggcagcggcgggggactccatcaaggcgtcaggattcaggctatgggtggcggagtcgctgcggaggctcggatggcccgatgacaccgtcgtgttcgcgctcgcaacgctgccggtgatcgagctgcggggggcgatcccgttgggtattggctgtggggcccatccccactgcccctctgtcgcaaaccccgcgcacgccgcctccactgcacacccccgccttccatcatcgggcctctgccgcaaaccccgcacacgtcgcctccaccgcacacctcgcccttccatcgtcgccaccgcgcactcaccctccacaccatcctcgccccaaatcgctcagcctaagcatagatggaagtccccccgcatccgctcccgcgcatcccgacatcagtggattgcggcagaggcccttcgtgcacgatctgtttccccctccacgcatggcggttccgcctccacctaccgtcgccccatccactcaaggccaattgcatccaaatgtcacgcaggccgcacgtcatcctcatccttgtggcgtcaacaaccatgtgcggcaagcagcggatgcggtagatgattgtttgcgtcccatatagctcaatatatgcctgcccccgatgccatctacatgcctagaggcgacggtcggacgggccaagtaggagccaaaaagaagcaagccccgtcgccgtcatggaaggaggaggccatcccacccacgctgacgaggagccaccaatagcaggtgccaccaccacccaaggagaaagccgcccaaggagacctttcatttcagattggagatgactcggcatgtttccatgatttcaattacactgtcccctagagagctggacaagcacactcctgggtaccaagctccagtgtatgttgaacaaccaaggcaacagcaggtgccaccaccacagcgccaaccacgcagaccaccagcacaattccagcagctagagtacgaaggtatggcgattcttatgcacggggtcgaggaagagggcgtgggcgtggaaggggctggggtagaggtggctacggtggctatggtggatatggaaacaaccaaggtggctatcatcagggtggtgggtattatgacaatcaaggtggttataatggctatgataatcaaggtggatatagtggctatgataatcaaagtggatatggtggtggatatggctataaacaaggcagatatgggaactatcaaggcaatgacacattttgataagttgatccagaaaatggtggatataaccgagacccaggaagtggtatgcgaggaagatgcaattggggttaccaaggagggcagactcagtgctggatgctccctgggtctggtgaagcgcgaaccccttggtggccgcctccagctgcgcgaatgtgaactctccagggggtccttgaacgatgacgatggtcgtatatggttgccatatgatgttgccaattccattcctgaatgcagtagcattccgaattttccagctctatatggtaatcttcgaactgaagtcagaataaatgatctggcagacatgctccaaaggatcggggtgcggaagttgtctgggcatgacattgttaaaaatcacatcatggtgtccttgcgtaacggtttagatgctaatgtggctgatatagtgattagagagtatgtagtgaaagttgaaaaaactttatcccaagttgattctattctagcaggaggactttctctagctgatgtatctacaaaacaatgtacagtgtatgactgggagtcaccagaattatctagaattttatcaatattttcttcaaaaagatgcaaggaaaaatgtgtatatcttctggaagttcttgatagattctgggatgatcattatagggcaaaatctaggatcttcacagatgctacacattgtggtgaaaacagagcagttgaatcatcatttatgaagtgcattcaaagcttcaaatggatagcatcaagaatggatgaggatcttcattatgcaacagatttattctatgattgtgaaaatgtccgctctctttttggtagtgtggctccatatgttgtatcgcaggtatctagcagttcacttaagaaggccattggattcaaaacagaggtatcttactgtgatgcattgatggtcctgaagtcttggataacgtcaaaggttccctttagagcaagtatgagccagatgtggaaattctataccttattgtctgaaggcgtggcagacgcaaagattgacattaaacgggagttcatgtcgtctccctctatatttacaccactacagcgtcctcgggcaagtgagttcatgtcgtctccctcaatattgccactcaagtttctgtttacaagatcgacagttactcgtcagaatagccagaagtgctagcacttccttttgagtaatgacagtaactccatttatatttggtgaaaatgtttagcgtcacatgatctgtgttcttaggatattgaggtctaaatgactacttcaatctgtaatcagatttaatatgttgctgggttgatgagatgagaaaaaaatgtccactatactgtttagcaatattttcactctttaaatggcatgtaagtctgtgacaaagagctgcatgggaggattaatgtgattttaataatatcctcacccttcaagtgtcctgtgactaatagttgcacattaggattagccagacagtagtatgtgattaatggagacatttgccatgccagtttaattgtgcattactgaatacatgaacacaatagttattattcttgcaacacaatagctagctgttcactgaattgcatcttttgttctatgttgtcttcataggtggaagagactttgttaaaacgaactaaagtgtttctctgctcatattccagtgtttatttataacatgcctttgttttattattttggttttttaaatgtcatgcttatatcctggtttggatatccagtttaaagacatcccatctattggacgctccatcactagctgcaatagacaaaacttagaggagccatttccactatttcatctattaaaacaagtaagaaaatagaaaggcttggaagcaatggtgttccacccagaacaagccgactcaagtgaggcaacgagtcaggaagcgcaccatggtcggatgaacgaagaagaaaaatctgttgcatggaatggatgtatgttattagattaaaataacaaaatttatgtatggatagaatcacaaatgaattctgaaacattttctcataacagtataacgcacacatgtacataagttatcgtgttgttatacggttccgttgcaacgtacgggcactcacctagtcatataatagagaataatctccaccttggatttttaacatattttttatgttatttttatattgtcataaaatgcactcataataaaaattccagcatgatgcataatttagtgtcatatatttttattaattgtttttaaaaggtggtgttcacatgtgatgacaaatggatggatacactcatataaatactcatataaataaaggaaaacacttttctgcttttaatatgatctctaacaaattaggtgttccacatactttggtggaaggctctcctttttttcaggatgatgaggcgcacacttagggatgccttatccgtgtcgttcgacaatgctggagagtcttagtcttagcataggaaggtctccagagtagcttcgaaaattttggagcgatcaaggtttcgatgcctttagccggcagtatagatggccatatggcactaac

SEQ ID NO: 61933 - DNA, 3862 bp, Zea Mays
atgggttcggtggtgtttgttcttggcgtgcgtgatttgggcgagtccggagctacccgcgagttctgcggacggttgaagaagacgcggtcctgggtggcccacgcgacaatgctgcgcgatgaagagctggcgcggcatggcaatgactggcgtccacacagtagcgggggtgcacggttctgcctgcctcaacgcccgcgctcctcaccaacgccgcaatcatcgcccacgcgcggatcccccacgatcctccccaccaccgccgccacaatcatcgctcacgcgcggatcccccatgatcctccctaccgtcgccgcaatcaacgcccacgcggatcctccccacgatccccaccccgcacacccccacccttccatcgccggccggaatcgatcgatccaaagctccctttagagctcgagctctatccaacccacgaacgggatcccgatgcccatggcggcctcggttcgtctcgccgcaccggctgcctcgcccccgctgacgtggtggaggtgggctcctcttctcgccgcgtcacatccacgggcgaacccgccgcctcccgcaccgcgcctgcgggcgcccgctctcttctccgggcctcccctgttccccgcgattccagcgccggagccatcgtccggaggacaccgtgtgcggcggcggcaataggtggaggtgtggaggcggagtccacggagcgggaggcgcccgatcgggatactctgaagcgggtggcgctgctcgcgcttggctgctgcactgcagccgccgctctcggcgtggcgcgggcagcggcgggggactccatcaaggcgtcaggattcaggctatgggtggcggagtcgctgcggaggctcggatggcccgatgacaccgtcgtgttcgcgctcgcaacgctgccggtgatcgagctgcggggggcgatcccgttgggtattggctgtggggcccatccccactgcccctctgtcgcaaaccccgcgcacgccgcctccactgcacacccccgccttccatcatcgggcctctgccgcaaaccccgcacacgtcgcctccaccgcacacctcgcccttccatcgtcgccaccgcgcactcaccctccacaccatcctcgccccaaatcgctcagcctaagcatagatggaagtccccccgcatccgctcccgcgcatcccgacatcagtggattgcggcagaggcccttcgtgcacgatctgtttccccctccacgcatggcggttccgcctccacctaccgtcgccccatccactcaaggccaattgcatccaaatgtcacgcaggccgcacgtcatcctcatccttgtggcgtcaacaaccatgtgcggcaagcagcggatgcggtagatgattgtttgcgtcccatatagctcaatatatgcctgcccccgatgccatctacatgcctagaggcgacggtcggacgggccaagtaggagccaaaaagaagcaagccccgtcgccgtcatggaaggaggaggccatcccacccacgctgacgaggagccaccaatagcaggtgccaccaccacccaaggagaaagccgcccaaggagacctttcatttcagattggagatgactcggcatgtttccatgatttcaattacactgtcccctagagagctggacaagcacactcctgggtaccaagctccagtgtatgttgaacaaccaaggcaacagcaggtgccaccaccacagcgccaaccacgcagaccaccagcacaattccagcagctagagtacgaaggtatggcgattcttatgcacggggtcgaggaagagggcgtgggcgtggaaggggctggggtagaggtggctacggtggctatggtggatatggaaacaaccaaggtggctatcatcagggtggtgggtattatgacaatcaaggtggttataatggctatgataatcaaggtggatatagtggctatgataatcaaagtggatatggtggtggatatggctataaacaaggcagatatgggaactatcaaggcaatgacacattttgataagttgatccagaaaatggtggatataaccgagacccaggaagtggtatgcgaggaagatgcaattggggttaccaaggagcgcgaaccccttggtggccgcctccagctgcgcgaatgtgaactctccagggggtccttgaacgatgacgatggtcgtatatggttgccatatgatgttgccaattccattcctgaatgcagtagcattccgaattttccagctctatatggtaatcttcgaactgaagtcagaataaatgatctggcagacatgctccaaaggatcggggtgcggaagttgtctgggcatgacattgttaaaaatcacatcatggtgtccttgcgtaacggtttagatgctaatgtggctgatatagtgattagagagtattgtatgactgggagtcaccagaattatctagaattttatcaatattttcttcaaaaagatgcaaggaaaaatgtgtatatcttctggaagttcttgatagattctgggatgatcattatagggcaaaatctaggatcttcacagatgctacacattgtggtgaaaacagagcagttgaatcatcatttatgaagtgcattcaaagcttcaaatggatagcatcaagaatggatgaggatcttcattatgcaacagatttattctatgattgtgaaaatgtccgctctctttttggtagtgtggctccatatgttgtatcgcaggtatctagcagttcacttaagaaggccattggattcaaaacagaggtatcttactgtgatgcattgatggtcctgaagtcttggataacgtcaaaggttccctttagagcaagtatgagccagatgtggaaattctataccttattgtctgaaggcgtggcagacgcaaagattgacattaaacgggagttcatgtcgtctccctctatatttacaccactacagcgtcctcgggcaatttaaagacatcccatctattggacgctccatcactagctgcaatagacaaaacttagaggagccatttccactatttcatctattaaaacaagtaagaaaatagaaaggcttggaagcaatggtgttccacccagaacaagccgactcaagcgactttttgtctactctttgcaaaacagtgaggcaacgagtcaggaagcgcaccatggtcggatgaacgaagaagaaaaatctgttgcatggaatggatgtatgttattagattaaaataacaaaatttatgtatggatagaatcacaaatgaattctgaaacattttctcataacagtataacgcacacatgtacataagttatcgtgttgttatacggttccgttgcaacgtacgggcactcacctagtcatataatagagaataatctccaccttggatttttaacatattttttatgttatttttatattgtcataaaatgcactcataataaaaattccagcatgatgcataatttagtgtcatatatttttattaattgtttttaaaaggtggtgttcacatgtgatgacaaatggatggatacactcatataaatactcatataaataaaggaaaacacttttctgcttttaatatgatctctaacaaattaggtgttccacatactttggtggaaggctctcctttttttcaggatgatgaggcgcacacttagggatgccttatccgtgtcgttcgacaatgctggagagtcttagtcttagcataggaaggtctccagagtagcttcgaaaattttggagcgatcaaggtttcgatgcctttagccggcagtatagatggccatatggcactaac

SEQ ID NO: 61934 - DNA, 4140 bp, Zea Mays
atgggttcggtggtgtttgttcttggcgtgcgtgatttgggcgagtccggagctacccgcgagttctgcggacggttgaagaagacgcggtcctgggtggcccacgcgacaatgctgcgcgatgaagagctggcgcggcatggcaatgactggcgtccacacagtagcgggggtgcacggttctgcctgcctcaacgcccgcgctcctcaccaacgccgcaatcatcgcccacgcgcggatcccccacgatcctccccaccaccgccgccacaatcatcgctcacgcgcggatcccccatgatcctccctaccgtcgccgcaatcaacgcccacgcggatcctccccacgatccccaccccgcacacccccacccttccatcgccggccggaatcgatcgatccaaagctccctttagagctcgagctctatccaacccacgaacgggatcccgatgcccatggcggcctcggttcgtctcgccgcaccggctgcctcgcccccgctgacgtggtggaggtgggctcctcttctcgccgcgtcacatccacgggcgaacccgccgcctcccgcaccgcgcctgcgggcgcccgctctcttctccgggcctcccctgttccccgcgattccagcgccggagccatcgtccggaggacaccgtgtgcggcggcggcaataggtggaggtgtggaggcggagtccacggagcgggaggcgcccgatcgggatactctgaagcgggtggcgctgctcgcgcttggctgctgcactgcagccgccgctctcggcgtggcgcgggcagcggcgggggactccatcaaggcgtcaggattcaggctatgggtggcggagtcgctgcggaggctcggatggcccgatgacaccgtcgtgttcgcgctcgcaacgctgccggtgatcgagctgcggggggcgatcccgttgggtattggctgtggggcccatccccactgcccctctgtcgcaaaccccgcgcacgccgcctccactgcacacccccgccttccatcatcgggcctctgccgcaaaccccgcacacgtcgcctccaccgcacacctcgcccttccatcgtcgccaccgcgcactcaccctccacaccatcctcgccccaaatcgctcagcctaagcatagatggaagtccccccgcatccgctcccgcgcatcccgacatcagtggattgcggcagaggcccttcgtgcacgatctgtttccccctccacgcatggcggttccgcctccacctaccgtcgccccatccactcaaggccaattgcatccaaatgtcacgcaggccgcacgtcatcctcatccttgtggcgtcaacaaccatgtgcggcaagcagcggatgcggtagatgattgtttgcgtcccatatagctcaatatatgcctgcccccgatgccatctacatgcctagaggcgacggtcggacgggccaagtaggagccaaaaagaagcaagccccgtcgccgtcatggaaggaggaggccatcccacccacgctgacgaggagccaccaatagcaggtgccaccaccacccaaggagaaagccgcccaaggagacctttcatttcagattggagatgactcggcatgtttccatgatttcaattacactgtcccctagagagctggacaagcacactcctgggtaccaagctccagtgtatgttgaacaaccaaggcaacagcaggtgccaccaccacagcgccaaccacgcagaccaccagcacaattccagcagctagagtacgaagattcttatgcacggggtcgaggaagagggcgtgggcgtggaaggggctggggtagaggtggctacggtggctatggtggatatggaaacaaccaaggtggctatcatcagggtggtgggtattatgacaatcaaggtggatatagtggctatgataatcaaagtggatatggtggtggatatggctataaacaaggcagatatgggaactatcaagaaaatggtggatataaccgagacccaggaagtggtatgcgaggaagatgcaattggggttaccaaggagcgcgaaccccttggtggccgcctccagctgcgcgaatgtgaactctccagggggtccttgaacgatgacggtccgctccgcttccgcgtcatcacacgcgacagctgccaccggaataggatgcgcgcccgcgacccgtacggtttgtgacttcaaaaataacagcaagaagcctcgaagacattcttttggataaagttaggaaagtaccatgcatcccactttcagatggttcatttacctctatttcagatggtcgtatatggttgccatatgatgttgccaattccattcctgaatgcagtagcattccgaattttccagctctatatggtaatcttcgaactgaagtcagaataaatgatctggcagacatgctccaaaggatcggggtgcggaagttgtctgggcatgacattgttaaaaatcacatcatggtgtccttgcgtaacggtttagatgctaatgtggctgatatagtgattagagagtatgtagtgaaagttgaaaaaactttatcccaagttgattctattctagcaggaggactttctctagctgatgtatctacaaaacaatgtacagtgtatgactgggagtcaccagaattatctagaattttatcaatattttcttcaaaaagatgcaaggaaaaatgtgtatatcttctggaagttcttgatagattctgggatgatcattatagggcaaaatctaggatcttcacagatgctacacattgtggtgaaaacagagcagttgaatcatcatttatgaagtgcattcaaagcttcaaatggatagcatcaagaatggatgaggatcttcattatgcaacagatttattctatgattgtgaaaatgtccgctctctttttggtagtgtggctccatatgttgtatcgcaggtatctagcagttcacttaagaaggccattggattcaaaacagaggtatcttactgtgatgcattgatggtcctgaagtcttggataacgtcaaaggttccctttagagcaagtatgagccagatgtggaaattctataccttattgtctgaaggcgtggcagacgcaaagattgacattaaacgggagttcatgtcgtctccctctatatttacaccactacagcgtcctcgggcaatttaaagacatcccatctattggacgctccatcactagctgcaatagacaaaacttagaggagccatttccactatttcatctattaaaacaagtaagaaaatagaaaggcttggaagcaatggtgttccacccagaacaagccgactcaaggtatggcatggtcttgtcggcccctgtggcagcacatggccttcattgctagctgcactgatgtgagtagcgactttttgtctactctttgcaaaacagtgaggcaacgagtcaggaagcgcaccatggtcggatgaacgaagaagaaaaatctgttgcatggaatggatgtatgttattagattaaaataacaaaatttatgtatggatagaatcacaaatgaattctgaaacattttctcataacagtataacgcacacatgtacataagttatcgtgttgttatacggttccgttgcaacgtacgggcactcacctagtcatataatagagaataatctccaccttggatttttaacatattttttatgttatttttatattgtcataaaatgcactcataataaaaattccagcatgatgcataatttagtgtcatatatttttattaattgtttttaaaaggtggtgttcacatgtgatgacaaatggatggatacactcatataaatactcatataaataaaggaaaacacttttctgcttttaatatgatctctaacaaattaggtgttccacatactttggtggaaggctctcctttttttcaggatgatgaggcgcacacttagggatgccttatccgtgtcgttcgacaatgctggagagtcttagtcttagcataggaaggtctccagagtagcttcgaaaattttggagcgatcaaggtttcgatgcctttagccggcagtatagatggccatatggcactaac

SEQ ID NO: 61935 - DNA, 3795 bp, Zea Mays
atgggttcggtggtgtttgttcttggcgtgcgtgatttgggcgagtccggagctacccgcgagttctgcggacggttgaagaagacgcggtcctgggtggcccacgcgacaatgctgcgcgatgaagagctggcgcggcatggcaatgactggcgtccacacagtagcgggggtgcacggttctgcctgcctcaacgcccgcgctcctcaccaacgccgcaatcatcgcccacgcgcggatcccccacgatcctccccaccaccgccgccacaatcatcgctcacgcgcggatcccccatgatcctccctaccgtcgccgcaatcaacgcccacgcggatcctccccacgatccccaccccgcacacccccacccttccatcgccggccggaatcgatcgatccaaagctccctttagagctcgagctctatccaacccacgaacgggatcccgatgcccatggcggcctcggttcgtctcgccgcaccggctgcctcgcccccgctgacgtggtggaggtgggctcctcttctcgccgcgtcacatccacgggcgaacccgccgcctcccgcaccgcgcctgcgggcgcccgctctcttctccgggcctcccctgttccccgcgattccagcgccggagccatcgtccggaggacaccgtgtgcggcggcggcaataggtggaggtgtggaggcggagtccacggagcgggaggcgcccgatcgggatactctgaagcgggtggcgctgctcgcgcttggctgctgcactgcagccgccgctctcggcgtggcgcgggcagcggcgggggactccatcaaggcgtcaggattcaggctatgggtggcggagtcgctgcggaggctcggatggcccgatgacaccgtcgtgttcgcgctcgcaacgctgccggtgatcgagctgcggggggcgatcccgttgggtattggctgtggggcccatccccactgcccctctgtcgcaaaccccgcgcacgccgcctccactgcacacccccgccttccatcatcgggcctctgccgcaaaccccgcacacgtcgcctccaccgcacacctcgcccttccatcgtcgccaccgcgcactcaccctccacaccatcctcgccccaaatcgctcagcctaagcatagatggaagtccccccgcatccgctcccgcgcatcccgacatcagtggattgcggcagaggcccttcgtgcacgatctgtttccccctccacgcatggcggttccgcctccacctaccgtcgccccatccactcaaggccaattgcatccaaatgtcacgcaggccgcacgtcatcctcatccttgtggcgtcaacaaccatgtgcggcaagcagcggatgcggtagatgattgtttgcgtcccatatagctcaatatatgcctgcccccgatgccatctacatgcctagaggcgacggtcggacgggccaagtaggagccaaaaagaagcaagccccgtcgccgtcatggaaggaggaggccatcccacccacgctgacgaggagccaccaatagcaggtgccaccaccacccaaggagaaagccgcccaaggagacctttcatttcagattggagatgactcggcatgtttccatgatttcaattacactgtcccctagagagctggacaagcacactcctgggtaccaagctccagtgtatgttgaacaaccaaggcaacagcaggtgccaccaccacagcgccaaccacgcagaccaccagcacaattccagcagctagagtacgaagattcttatgcacggggtcgaggaagagggcgtgggcgtggaaggggctggggtagaggtggctacggtggctatggtggatatggaaacaaccaaggtggctatcatcagggtggtgggtattatgacaatcaaggtggttataatggctatgataatcaaggtggatatagtggctatgataatcaaagtggatatggtggtggatatggctataaacaaggcagatatgggaactatcaagaaaatggtggatataaccgagacccaggaagtggtatgcgaggaagatgcaattggggttaccaaggagcgcgaaccccttggtggccgcctccagctgcgcgaatgtgaactctccagggggtccttgaacgatgacgatggtcgtatatggttgccatatgatgttgccaattccattcctgaatgcagtagcattccgaattttccagctctatatggtaatcttcgaactgaagtcagaataaatgatctggcagacatgctccaaaggatcggggtgcggaagttgtctgggcatgacattgttaaaaatcacatcatggtgtccttgcgtaacggtttagatgctaatgtggctgatatagtgattagagagtattgtatgactgggagtcaccagaattatctagaattttatcaatattttcttcaaaaagatgcaaggaaaaatgtgtatatcttctggaagttcttgatagattctgggatgatcattatagggcaaaatctaggatcttcacagatgctacacattgtggtgaaaacagagcagttgaatcatcatttatgaagtgcattcaaagcttcaaatggatagcatcaagaatggatgaggatcttcattatgcaacagatttattctatgattgtgaaaatgtccgctctctttttggtagtgtggctccatatgttgtatcgcaggtatctagcagttcacttaagaaggccattggattcaaaacagaggtatcttactgtgatgcattgatggtcctgaagtcttggataacgtcaaaggttccctttagagcaagtatgagccagatgtggaaattctataccttattgtctgaaggcgtggcagacgcaaagattgacattaaacgggagttcatgtcgtctccctctatatttacaccactacagcgtcctcgggcaatttaaagacatcccatctattggacgctccatcactagctgcaatagacaaaacttagaggagccatttccactatttcatctattaaaacaagtaagaaaatagaaaggcttggaagcaatggtgttccacccagaacaagccgactcaagtgaggcaacgagtcaggaagcgcaccatggtcggatgaacgaagaagaaaaatctgttgcatggaatggatgtatgttattagattaaaataacaaaatttatgtatggatagaatcacaaatgaattctgaaacattttctcataacagtataacgcacacatgtacataagttatcgtgttgttatacggttccgttgcaacgtacgggcactcacctagtcatataatagagaataatctccaccttggatttttaacatattttttatgttatttttatattgtcataaaatgcactcataataaaaattccagcatgatgcataatttagtgtcatatatttttattaattgtttttaaaaggtggtgttcacatgtgatgacaaatggatggatacactcatataaatactcatataaataaaggaaaacacttttctgcttttaatatgatctctaacaaattaggtgttccacatactttggtggaaggctctcctttttttcaggatgatgaggcgcacacttagggatgccttatccgtgtcgttcgacaatgctggagagtcttagtcttagcataggaaggtctccagagtagcttcgaaaattttggagcgatcaaggtttcgatgcctttagccggcagtatagatggccatatggcactaac

SEQ ID NO: 61936 - DNA, 4010 bp, Zea Mays
atgggttcggtggtgtttgttcttggcgtgcgtgatttgggcgagtccggagctacccgcgagttctgcggacggttgaagaagacgcggtcctgggtggcccacgcgacaatgctgcgcgatgaagagctggcgcggcatggcaatgactggcgtccacacagtagcgggggtgcacggttctgcctgcctcaacgcccgcgctcctcaccaacgccgcaatcatcgcccacgcgcggatcccccacgatcctccccaccaccgccgccacaatcatcgctcacgcgcggatcccccatgatcctccctaccgtcgccgcaatcaacgcccacgcggatcctccccacgatccccaccccgcacacccccacccttccatcgccggccggaatcgatcgatccaaagctccctttagagctcgagctctatccaacccacgaacgggatcccgatgcccatggcggcctcggttcgtctcgccgcaccggctgcctcgcccccgctgacgtggtggaggtgggctcctcttctcgccgcgtcacatccacgggcgaacccgccgcctcccgcaccgcgcctgcgggcgcccgctctcttctccgggcctcccctgttccccgcgattccagcgccggagccatcgtccggaggacaccgtgtgcggcggcggcaataggtggaggtgtggaggcggagtccacggagcgggaggcgcccgatcgggatactctgaagcgggtggcgctgctcgcgcttggctgctgcactgcagccgccgctctcggcgtggcgcgggcagcggcgggggactccatcaaggcgtcaggattcaggctatgggtggcggagtcgctgcggaggctcggatggcccgatgacaccgtcgtgttcgcgctcgcaacgctgccggtgatcgagctgcggggggcgatcccgttgggtattggctgtggggcccatccccactgcccctctgtcgcaaaccccgcgcacgccgcctccactgcacacccccgccttccatcatcgggcctctgccgcaaaccccgcacacgtcgcctccaccgcacacctcgcccttccatcgtcgccaccgcgcactcaccctccacaccatcctcgccccaaatcgctcagcctaagcatagatggaagtccccccgcatccgctcccgcgcatcccgacatcagtggattgcggcagaggcccttcgtgcacgatctgtttccccctccacgcatggcggttccgcctccacctaccgtcgccccatccactcaaggccaattgcatccaaatgtcacgcaggccgcacgtcatcctcatccttgtggcgtcaacaaccatgtgcggcaagcagcggatgcggtagatgattgtttgcgtcccatatagctcaatatatgcctgcccccgatgccatctacatgcctagaggcgacggtcggacgggccaagtaggagccaaaaagaagcaagccccgtcgccgtcatggaaggaggaggccatcccacccacgctgacgaggagccaccaatagcaggtgccaccaccacccaaggagaaagccgcccaaggagacctttcatttcagattggagatgactcggcatgtttccatgatttcaattacactgtcccctagagagctggacaagcacactcctgggtaccaagctccagtgtatgttgaacaaccaaggcaacagcaggtgccaccaccacagcgccaaccacgcagaccaccagcacaattccagcagctagagtacgaagattcttatgcacggggtcgaggaagagggcgtgggcgtggaaggggctggggtagaggtggctacggtggctatggtggatatggaaacaaccaaggtggctatcatcagggtggtgggtattatgacaatcaaggtggttataatggctatgataatcaaggtggatatagtggctatgataatcaaagtggatatggtggtggatatggctataaacaaggcagatatgggaactatcaagaaaatggtggatataaccgagacccaggaagtggtatgcgaggaagatgcaattggggttaccaaggagcgcgaaccccttggtggccgcctccagctgcgcgaatgtgaactctccagggggtccttgaacgatgacgatggtcgtatatggttgccatatgatgttgccaattccattcctgaatgcagtagcattccgaattttccagctctatatggtaatcttcgaactgaagtcagaataaatgatctggcagacatgctccaaaggatcggggtgcggaagttgtctgggcatgacattgttaaaaatcacatcatggtgtccttgcgtaacggtttagatgctaatgtggctgatatagtgattagagagtattgtatgactgggagtcaccagaattatctagaattttatcaatattttcttcaaaaagatgcaaggaaaaatgtgtatatcttctggaagttcttgatagattctgggatgatcattatagggcaaaatctaggatcttcacagatgctacacattgtggtgaaaacagagcagttgaatcatcatttatgaagtgcattcaaagcttcaaatggatagcatcaagaatggatgaggatcttcattatgcaacagatttattctatgattgtgaaaatgtccgctctctttttggtagtgtggctccatatgttgtatcgcaggtatctagcagttcacttaagaaggccattggattcaaaacagaggtatcttactgtgatgcattgatggtcctgaagtcttggataacgtcaaaggttccctttagagcaagtatgagccagatgtggaaattctataccttattgtctgaaggcgtggcagacgcaaagattgacattaaacgggagttcatgtcgtctccctctatatttacaccactacagcgtcctcgggcaagtggaagagactttgttaaaacgaactaaagtgtttctctgctcatattccagtgtttatttataacatgcctttgttttattattttggttttttaaatgtcatgcttatatcctggtttggatatccagtttaaagacatcccatctattggacgctccatcactagctgcaatagacaaaacttagaggcaattacttatctcaatcttacttctacatttatatttccctcttgtgttttaccttttgcttatatcctttgcgtgacataggagccatttccactatttcatctattaaaacaagtaagaaaatagaaaggcttggaagcaatggtgttccacccagaacaagccgactcaagtgaggcaacgagtcaggaagcgcaccatggtcggatgaacgaagaagaaaaatctgttgcatggaatggatgtatgttattagattaaaataacaaaatttatgtatggatagaatcacaaatgaattctgaaacattttctcataacagtataacgcacacatgtacataagttatcgtgttgttatacggttccgttgcaacgtacgggcactcacctagtcatataatagagaataatctccaccttggatttttaacatattttttatgttatttttatattgtcataaaatgcactcataataaaaattccagcatgatgcataatttagtgtcatatatttttattaattgtttttaaaaggtggtgttcacatgtgatgacaaatggatggatacactcatataaatactcatataaataaaggaaaacacttttctgcttttaatatgatctctaacaaattaggtgttccacatactttggtggaaggctctcctttttttcaggatgatgaggcgcacacttagggatgccttatccgtgtcgttcgacaatgctggagagtcttagtcttagcataggaaggtctccagagtagcttcgaaaattttggagcgatcaaggtttcgatgcctttagccggcagtatagatggccatatggcactaac

SEQ ID NO: 61937 - DNA, 1896 bp, Zea Mays
atgaagcatgtagtagttgtttcaaaaaggatagtgacaactttgcaggatgttcagttaaattcagtagtcctcgttgttcacaaaactataaagtaccaagctccagtgtatgttgaacaaccaaggcaacagcaggtgccaccaccacagcgccaaccacgcagaccaccagcacaattccagcagctagagtacgaaggtatggcgattcttatgcacggggtcgaggaagagggcgtgggcgtggaaggggctggggtagaggtggctacggtggctatggtggatatggaaacaaccaaggtggctatcatcagggtggtgggtattatgacaatcaaggtggttataatggctatgataatcaaggtggatatagtggctatgataatcaaagtggatatggtggtggatatggctataaacaaggcagatatgggaactatcaaggcaatgacacattttgataagttgatccagaaaatggtggatataaccgagacccaggaagtggtatgcgaggaagatgcaattggggttaccaaggagggcagactcagtgctggatgctccctgggtctggtgaagcgcgaaccccttggtggccgcctccagctgcgcgaatgtgaactctccagggggtccttgaacgatgacgatggtcgtatatggttgccatatgatgttgccaattccattcctgaatgcagtagcattccgaattttccagctctatatggtagtgaaagttgaaaaaactttatcccaagttgattctattctagcaggaggactttctctagctgatgtatctacaaaacaatgtacagtgtatgactgggagtcaccagaattatctagaattttatcaatattttcttcaaaaagatgcaaggaaaaatgtgtatatcttctggaagttcttgatagattctgggatgatcattatagggcaaaatctaggatcttcacagatgctacacattgtggtgaaaacagagcagttgaatcatcatttatgaagtgcattcaaagcttcaaatggatagcatcaagaatggatgaggatcttcattatgcaacagatttattctatgattgtgaaaatgtccgctctctttttggtagtgtggctccatatgttgtatcgcaggtatctagcagttcacttaagaaggccattggattcaaaacagaggtatcttactgtgatgcattgatggtcctgaagtcttggataacgtcaaaggttccctttagagcaagtatgagccagatgtggaaattctataccttattgtctgaaggcgtggcagacgcaaagattgacattaaacgggagttcatgtcgtctccctctatatttacaccactacagcgtcctcgggcaagtgagttcatgtcgtctccctcaatattgccactcaagtttctgtttacaagatcgacagttactcgtcagaatagccagaagtgctagcacttccttttgagtaatgacagtaactccatttatatttggtgaaaatgtttagcgtcacatgatctgtgttcttaggatattgaggtctaaatgactacttcaatctgtaatcagatttaatatgttgctgggttgatgagatgagaaaaaaatgtccactatactgtttagcaatattttcactctttaaatggcatgtaagtctgtgacaaagagctgcatgggaggattaatgtgattttaataatatcctcacccttcaagtgtcctgtgactaatagttgcacattaggattagccagacagtagtatgtgattaatggagacatttgccatgccagtttaattgtgcattactgaatacatgaacacaatagttattattcttgcaacacaatagctagctgttc

SEQ ID NO: 61938 - DNA, 2027 bp, Zea Mays
atgaagcatgtagtagttgtttcaaaaaggatagtgacaactttgcaggatgttcagttaaattcagtagtcctcgttgttcacaaaactataaagtaccaagctccagtgtatgttgaacaaccaaggcaacagcaggtgccaccaccacagcgccaaccacgcagaccaccagcacaattccagcagctagagtacgaaggtatggcgattcttatgcacggggtcgaggaagagggcgtgggcgtggaaggggctggggtagaggtggctacggtggctatggtggatatggaaacaaccaaggtggctatcatcagggtggtgggtattatgacaatcaaggtggttataatggctatgataatcaaggtggatatagtggctatgataatcaaagtggatatggtggtggatatggctataaacaaggcagatatgggaactatcaagaaaatggtggatataaccgagacccaggaagtggtatgcgaggaagatgcaattggggttaccaaggagggcagactcagtgctggatgctccctgggtctggtgaagcgcgaaccccttggtggccgcctccagctgcgcgaatgtgaactctccagggggtccttgaacgatgacgatggtcgtatatggttgccatatgatgttgccaattccattcctgaatgcagtagcattccgaattttccagctctatatggtaatcttcgaactgaagtcagaataaatgatctggcagacatgctccaaaggatcggggtgcggaagttgtctgggcatgacattgttaaaaatcacatcatggtgtccttgcgtaacggtttagatgctaatgtggctgatatagtgattagagagtatgtagtgaaagttgaaaaaactttatcccaagttgattctattctagcaggaggactttctctagctgatgtatctacaaaacaatgtacagtgtatgactgggagtcaccagaattatctagaattttatcaatattttcttcaaaaagatgcaaggaaaaatgtgtatatcttctggaagttcttgatagattctgggatgatcattatagggcaaaatctaggatcttcacagatgctacacattgtggtgaaaacagagcagttgaatcatcatttatgaagtgcattcaaagcttcaaatggatagcatcaagaatggatgaggatcttcattatgcaacagatttattctatgattgtgaaaatgtccgctctctttttggtagtgtggctccatatgttgtatcgcaggtatctagcagttcacttaagaaggccattggattcaaaacagaggtatcttactgtgatgcattgatggtcctgaagtcttggataacgtcaaaggttccctttagagcaagtatgagccagatgtggaaattctataccttattgtctgaaggcgtggcagacgcaaagattgacattaaacgggagttcatgtcgtctccctctatatttacaccactacagcgtcctcgggcaagtgagttcatgtcgtctccctcaatattgccactcaagtttctgtttacaagatcgacagttactcgtcagaatagccagaagtgctagcacttccttttgagtaatgacagtaactccatttatatttggtgaaaatgtttagcgtcacatgatctgtgttcttaggatattgaggtctaaatgactacttcaatctgtaatcagatttaatatgttgctgggttgatgagatgagaaaaaaatgtccactatactgtttagcaatattttcactctttaaatggcatgtaagtctgtgacaaagagctgcatgggaggattaatgtgattttaataatatcctcacccttcaagtgtcctgtgactaatagttgcacattaggattagccagacagtagtatgtgattaatggagacatttgccatgccagtttaattgtgcattactgaatacatgaacacaatagttattattcttgcaacacaatagctagctgttc

SEQ ID NO: 61939 - DNA, 658 bp, Zea Mays
atgaagcatgtagtagttgtttcaaaaaggatagtgacaactttgcaggatgttcagttaaattcagtagtcctcgttgttcacaaaactataaagtaccaagctccagtgtatgttgaacaaccaaggcaacagcaggtgccaccaccacagcgccaaccacgcagaccaccagcacaattccagcagctagagtacgaagattcttatgcacggggtcgaggaagagggcgtgggcgtggaaggggctggggtagaggtggctacggtggctatggtggatatggaaacaaccaaggtggctatcatcagggtggtgggtattatgacaatcaagaaaatggtggatataaccgagacccaggaagtggtatgcgaggaagatgcaattggggttaccaaggagcgcgaaccccttggtggccgcctccagctgcgcgaatgtgaactctccagggggtccttgaacgatgacggtccgctccgcttccgcgtcatcacacgcgacagctgccaccggaataggatgcgcgcccgcgacccgtacggtttgtgacttcaaaaataacagcaagaagcctcgaagacattcttttggataaagttaggaaagtaccatgcatcccactttcagatggttcatttacctctatttcag

SEQ ID NO: 61940 - DNA, 835 bp, Zea Mays
atgaagcatgtagtagttgtttcaaaaaggatagtgacaactttgcaggatgttcagttaaattcagtagtcctcgttgttcacaaaactataaagtaccaagctccagtgtatgttgaacaaccaaggcaacagcaggtgccaccaccacagcgccaaccacgcagaccaccagcacaattccagcagctagagtacgaagattcttatgcacggggtcgaggaagagggcgtgggcgtggaaggggctggggtagaggtggctacggtggctatggtggatatggaaacaaccaaggtggctatcatcagggtggtgggtattatgacaatcaaggtggttataatggctatgataatcaaggtggatatagtggctatgataatcaaagtggatatggtggtggatatggctataaacaaggcagatatgggaactatcaaggcaatgacacattttgataagttgatccagaaaatggtggatataaccgagacccaggaagtggtatgcgaggaagatgcaattggggttaccaaggagggcagactcagtgctggatgctccctgggtctggtgaagcgcgaaccccttggtggccgcctccagctgcgcgaatgtgaactctccagggggtccttgaacgatgacggtccgctccgcttccgcgtcatcacacgcgacagctgccaccggaataggatgcgcgcccgcgacccgtacggtttgtgacttcaaaaataacagcaagaagcctcgaagacattcttttggataaagttaggaaagtaccatgcatcccactttcagatggttcatttacctctatttcag

SEQ ID NO: 61941 - DNA, 2383 bp, Zea Mays
atgggttcggtggtgtttgttcttggcgtgcgtgatttgggcgagtccggagctacccgcgagttctgcggacggttgaagaagacgcggtcctgggtggcccacgcgacaatgctgcgcgatgaagagctggcgcggcatggcaatgactggcgtccacacagtagcgggggtgcacggttctgcctgcctcaacgcccgcgctcctcaccaacgccgcaatcatcgcccacgcgcggatcccccacgatcctccccaccaccgccgccacaatcatcgctcacgcgcggatcccccatgatcctccctaccgtcgccgcaatcaacgcccacgcggatcctccccacgatccccaccccgcacacccccacccttccatcgccggccggaatcgatcgatccaaagctccctttagagctcgagctctatccaacccacgaacgggatcccgatgcccatggcggcctcggttcgtctcgccgcaccggctgcctcgcccccgctgacgtggtggaggtgggctcctcttctcgccgcgtcacatccacgggcgaacccgccgcctcccgcaccgcgcctgcgggcgcccgctctcttctccgggcctcccctgttccccgcgattccagcgccggagccatcgtccggaggacaccgtgtgcggcggcggcaataggtggaggtgtggaggcggagtccacggagcgggaggcgcccgatcgggatactctgaagcgggtggcgctgctcgcgcttggctgctgcactgcagccgccgctctcggcgtggcgcgggcagcggcgggggactccatcaaggcgtcaggattcaggctatgggtggcggagtcgctgcggaggctcggatggcccgatgacaccgtcgtgttcgcgctcgcaacgctgccggtgatcgagctgcggggggcgatcccgttgggtattggctgtggggcccatccccactgcccctctgtcgcaaaccccgcgcacgccgcctccactgcacacccccgccttccatcatcgggcctctgccgcaaaccccgcacacgtcgcctccaccgcacacctcgcccttccatcgtcgccaccgcgcactcaccctccacaccatcctcgccccaaatcgctcagcctaagcatagatggaagtccccccgcatccgctcccgcgcatcccgacatcagtggattgcggcagaggcccttcgtgcacgatctgtttccccctccacgcatggcggttccgcctccacctaccgtcgccccatccactcaaggccaattgcatccaaatgtcacgcaggccgcacgtcatcctcatccttgtggcgtcaacaaccatgtgcggcaagcagcggatgcggtagatgattgtttgcgtcccatatagctcaatatatgcctgcccccgatgccatctacatgcctagaggcgacggtcggacgggccaagtaggagccaaaaagaagcaagccccgtcgccgtcatggaaggaggaggccatcccacccacgctgacgaggagccaccaatagcaggtgccaccaccacccaaggagaaagccgcccaaggagacctttcatttcagattggagatgactcggcatgtttccatgatttcaattacactgtcccctagagagctggacaagcacactcctgggtaccaagctccagtgtatgttgaacaaccaaggcaacagcaggtgccaccaccacagcgccaaccacgcagaccaccagcacaattccagcagctagagtacgaaggtatggcgattcttatgcacggggtcgaggaagagggcgtgggcgtggaaggggctggggtagaggtggctacggtggctatggtggatatggaaacaaccaaggtggctatcatcagggtggtgggtattatgacaatcaaggtggttataatggctatgataatcaaggtggatatagtggctatgataatcaaagtggatatggtggtggatatggctataaacaaggcagatatgggaactatcaaggcaatgacacattttgataagttgatccagaaaatggtggatataaccgagacccaggaagtggtatgcgaggaagatgcaattggggttaccaaggagcgcgaaccccttggtggccgcctccagctgcgcgaatgtgaactctccagggggtccttgaacgatgacggtccgctccgcttccgcgtcatcacacgcgacagctgccaccggaataggatgcgcgcccgcgacccgtacggtttgtgacttcaaaaataacagcaagaagcctcgaagacattcttttggataaagttaggaaagtaccatgcatcccactttcagatggttcatttacctctatttcag

SEQ ID NO: 61942 - DNA, 2422 bp, Zea Mays
atgggttcggtggtgtttgttcttggcgtgcgtgatttgggcgagtccggagctacccgcgagttctgcggacggttgaagaagacgcggtcctgggtggcccacgcgacaatgctgcgcgatgaagagctggcgcggcatggcaatgactggcgtccacacagtagcgggggtgcacggttctgcctgcctcaacgcccgcgctcctcaccaacgccgcaatcatcgcccacgcgcggatcccccacgatcctccccaccaccgccgccacaatcatcgctcacgcgcggatcccccatgatcctccctaccgtcgccgcaatcaacgcccacgcggatcctccccacgatccccaccccgcacacccccacccttccatcgccggccggaatcgatcgatccaaagctccctttagagctcgagctctatccaacccacgaacgggatcccgatgcccatggcggcctcggttcgtctcgccgcaccggctgcctcgcccccgctgacgtggtggaggtgggctcctcttctcgccgcgtcacatccacgggcgaacccgccgcctcccgcaccgcgcctgcgggcgcccgctctcttctccgggcctcccctgttccccgcgattccagcgccggagccatcgtccggaggacaccgtgtgcggcggcggcaataggtggaggtgtggaggcggagtccacggagcgggaggcgcccgatcgggatactctgaagcgggtggcgctgctcgcgcttggctgctgcactgcagccgccgctctcggcgtggcgcgggcagcggcgggggactccatcaaggcgtcaggattcaggctatgggtggcggagtcgctgcggaggctcggatggcccgatgacaccgtcgtgttcgcgctcgcaacgctgccggtgatcgagctgcggggggcgatcccgttgggtattggctgtggggcccatccccactgcccctctgtcgcaaaccccgcgcacgccgcctccactgcacacccccgccttccatcatcgggcctctgccgcaaaccccgcacacgtcgcctccaccgcacacctcgcccttccatcgtcgccaccgcgcactcaccctccacaccatcctcgccccaaatcgctcagcctaagcatagatggaagtccccccgcatccgctcccgcgcatcccgacatcagtggattgcggcagaggcccttcgtgcacgatctgtttccccctccacgcatggcggttccgcctccacctaccgtcgccccatccactcaaggccaattgcatccaaatgtcacgcaggccgcacgtcatcctcatccttgtggcgtcaacaaccatgtgcggcaagcagcggatgcggtagatgattgtttgcgtcccatatagctcaatatatgcctgcccccgatgccatctacatgcctagaggcgacggtcggacgggccaagtaggagccaaaaagaagcaagccccgtcgccgtcatggaaggaggaggccatcccacccacgctgacgaggagccaccaatagcaggtgccaccaccacccaaggagaaagccgcccaaggagacctttcatttcagattggagatgactcggcatgtttccatgatttcaattacactgtcccctagagagctggacaagcacactcctgggtaccaagctccagtgtatgttgaacaaccaaggcaacagcaggtgccaccaccacagcgccaaccacgcagaccaccagcacaattccagcagctagagtacgaaggtatggcgattcttatgcacggggtcgaggaagagggcgtgggcgtggaaggggctggggtagaggtggctacggtggctatggtggatatggaaacaaccaaggtggctatcatcagggtggtgggtattatgacaatcaaggtggttataatggctatgataatcaaggtggatatagtggctatgataatcaaagtggatatggtggtggatatggctataaacaaggcagatatgggaactatcaaggcaatgacacattttgataagttgatccagaaaatggtggatataaccgagacccaggaagtggtatgcgaggaagatgcaattggggttaccaaggagggcagactcagtgctggatgctccctgggtctggtgaagcgcgaaccccttggtggccgcctccagctgcgcgaatgtgaactctccagggggtccttgaacgatgacggtccgctccgcttccgcgtcatcacacgcgacagctgccaccggaataggatgcgcgcccgcgacccgtacggtttgtgacttcaaaaataacagcaagaagcctcgaagacattcttttggataaagttaggaaagtaccatgcatcccactttcagatggttcatttacctctatttcag

SEQ ID NO: 61943 - DNA, 1626 bp, Zea Mays
atgggttcggtggtgtttgttcttggcgtgcgtgatttgggcgagtccggagctacccgcgagttctgcggacggttgaagaagacgcggtcctgggtggcccacgcgacaatgctgcgcgatgaagagctggcgcggcatggcaatgactggcgtccacacagtagcgggggtgcacggttctgcctgcctcaacgcccgcgctcctcaccaacgccgcaatcatcgcccacgcgcggatcccccacgatcctccccaccaccgccgccacaatcatcgctcacgcgcggatcccccatgatcctccctaccgtcgccgcaatcaacgcccacgcggatcctccccacgatccccaccccgcacacccccacccttccatcgccggccggaatcgatcgatccaaagctccctttagagctcgagctctatccaacccacgaacgggatcccgatgcccatggcggcctcggttcgtctcgccgcaccggctgcctcgcccccgctgacgtggtggaggccgcacgtcatcctcatccttgtggcgtcaacaaccatgtgcggcaagcagcggatgcggtagatgattgtttgcgtcccatatagctcaatatatgcctgcccccgatgccatctacatgcctagaggcgacggtcggacgggccaagtaggagccaaaaagaagcaagccccgtcgccgtcatggaaggaggaggccatcccacccacgctgacgaggagccaccaatagcaggtgccaccaccacccaaggagaaagccgcccaaggagacctttcatttcagattggagatgactcggcatgtttccatgatttcaattacactgtcccctagagagctggacaagcacactcctgggtaccaagctccagtgtatgttgaacaaccaaggcaacagcaggtgccaccaccacagcgccaaccacgcagaccaccagcacaattccagcagctagagtacgaaggtatggcggtgattattcacactgattgtggtatttttgttgattatctagcatcttaattgttgctctgttagattcttatgcacggggtcgaggaagagggcgtgggcgtggaaggggctggggtagaggtggctacggtggctatggtggatatggaaacaaccaaggtggctatcatcagggtggtgggtattatgacaatcaaggtggttataatggctatgataatcaaggtggatatagtggctatgataatcaaagtggatatggtggtggatatggctataaacaaggcagatatgggaactatcaagaaaatggtggatataaccgagacccaggaagtggtatgcgaggaagatgcaattggggttaccaaggagcgcgaaccccttggtggccgcctccagctgcgcgaatgtgaactctccagggggtccttgaacgatgacggtccgctccgcttccgcgtcatcacacgcgacagctgccaccggaataggatgcgcgcccgcgacccgtacggtttgtgacttcaaaaataacagcaagaagcctcgaagacattcttttggataaagttaggaaagtaccatgcatcccactttcagatggttcatttacctctatttcag

SEQ ID NO: 61944 - DNA, 324 bp, Zea Mays
atgcctattgccggatacacaatacagtaccagaaagatctacaccgatctaaccttcagttttttttccccagtttgacaataaactctctaggtaacatagaagctgctaatgccactaccagttctcggtcgctggaaatgccgtaccataagctacatcaccacaactccaaaaaatacagcagggcagctcagctagagcagcagccacccttcttcaccgccgaaacatcatcctttatgttaatcttctcgcccttgccaggcccagatgctgcatcttcgcctgcttcaactgctctcttgctcacaatacggtag

SEQ ID NO: 61945 - DNA, 1703 bp, Zea Mays
agatagttgtttaaaagtcaaaatccttgctggtggccgagggctgggaactttcaaaaagcggactgcaaggtggtgtccatattgttaaggctgaggaagctgaattgattgcaagtaaaatgttaggccagattctgataacgaaacaaactggtccagagggaaagattgtgagcaaggtctacttgtgtgagaaactatctcttactaatgagatgtactttgccatcacccttgataggaaaactgctggtccgctcattattgcttgcagcaagggaggaaaacactatagttgacctcaatgttcaaaggatggccagaaagccaggaacagaacttaggcgttggcgattggcatctccctcccctaagccatggccaccgggcggcccgtacgactcgtgctggatgcctccctcctcctcgacccctcctccaccagggaggcggcggcggtggctctgcggcccggggtagaggagctgttgcggcggttgcgctactccaacctgaatgtggcaatctgctatgcagagggcatgccaactaatgagatgctctacttatctacattattattacatccctctgaagttgtatcttcagaagttcacattgacagtatttgcttcctcttgccatacttacccatcatggcccatggggtgtctatcttatcatgccatcttcaaagaatggcatcatgttaacaaaaatgaatgagaaatcagtcatttctaatggaaagcacttcttgcgaaaagtgggaatctttctctaactgaattaatgttagaatggagccaaacaagtttatgtttttatgcgacttcaagagttgacaaaggtttaagttctgagctccagaatcagaattggagagttctttctgtagctaatgaatgtagcatagaggttcctggtgttttaaatgttcaaaggcttcagcagttgcttctcaccttggctactctaataaaagggaactatgtgactcatctgttctggtgattggatatataatgaaaatattctgtgaggaagacttcgcaaggagatgtggttctgtcacttatgtgaccgttgtcgtgtatggagacgtgtatggagacgaggacaagccagcgcttataatgtttacagagatgtggttctgtgactgttgccgtgtactcaggctttatttcaacaagatttaaatatgagatgtagagtgattgatgtacatcacttcactaatcatgaaatctgtagaaggcgaaactactagccatatatgatatgcataatccgtgtggtaaacattatcaatatcacacaaattatttctaatgggttttgaattatcatagtgattgttgtcgttccgtttttatgtttcatacaaattttttactcccgtcgcaacgcacgggcactcacctagtatatatataatgttgcttaccaattttgaatacccaaccttcagatcctgtcggacctgccattgctctaaagtgacacactgtgcaacctctactggctacgagtttatatggataaataatggggttttagtatcaagatatgcaaatctcactatcaattagtgctacaatgacatgaagtttttggggtcgacatagtaattatacatattaccatttgtagggcaagttggaacaaacaatagacgacatatcagcaagacaaag

SEQ ID NO: 61946 - DNA, 1700 bp, Zea Mays
agatagttgtttaaaagtcaaaatccttgctggtggccgagggctgggaactttcaaaaagcggactgcaaggtggtgtccatattgttaaggctgaggaagctgaattgattgcaagtaaaatgttaggccagattctgataacgaaacaaactggtccagagggaaagattgtgagcaaggtctacttgtgtgagaaactatctcttactaatgagatgtactttgccatcacccttgataggaaaactgctggtccgctcattattgcttgcagcaagggaggaaaacactatagttgacctcaatgttcaaaggatggccagaaagccaggaacagaacttaggcgttggcgattggcatctccctcccctaagccatggccaccgggcggcccgtacgactcgtgctggatgcctccctcctcctcgacccctcctccaccagggaggcggcggcggtggctctgcggcccggggtagaggagctgttgcggcggttgcgctactccaacctgaatgtgtatttgcttcctcttgccatacttacccatcatggcccatggggtgtctatcttatcatgccatcttcaaagaatggcatcatgttaacaaaaatgaatgagaaatcagtcatttctaatggaaagcacttcttgcgaaaagtgggaatctttctctaactgaattaatgttagaatggagccaaacaagtttatgtttttatgcgacttcaagagttgacaaaggtttaagttctgagctccagaatcagaattggagagttctttctgtagctaatgaatgtagcatagaggttcctggtgttttaaatgttcaaaggcttcagcagttgcttctcaccttggctactctaataaaagggaactatgtgactcatctgttctggtgattggatatataatgaaaatattctgtgaggaagacttcgcaagggcaagttactttagagtttacagtgtaaatgaatattaacagctacttatgtattgtttaacaacatgaacatcacgctttttcatcttgcttacttacagagatgtggttctgtcacttatgtgaccgttgtcgtgtatggagacgtgtatggagacgaggacaagccagcgcttataatgtttacagagatgtggttctgtgactgttgccgtgtactcaggctttatttcaacaagatttaaatatgagatgtagagtgattgatgtacatcacttcactaatcatgaaatctgtagaaggcgaaactactagccatatatgatatgcataatccgtgtggtaaacattatcaatatcacacaaattatttctaatgggttttgaattatcatagtgattgttgtcgttccgtttttatgtttcatacaaattttttactcccgtcgcaacgcacgggcactcacctagtatatatataatgttgcttaccaattttgaatacccaaccttcagatcctgtcggacctgccattgctctaaagtgacacactgtgcaacctctactggctacgagtttatatggataaataatggggttttagtatcaagatatgcaaatctcactatcaattagtgctacaatgacatgaagtttttggggtcgacatagtaattatacatattaccatttgtagggcaagttggaacaaacaatagacgacatatcagcaagacaaag

SEQ ID NO: 61947 - DNA, 1752 bp, Zea Mays
agatagttgtttaaaagtcaaaatccttgctggtggccgagggctgggaactttcaaaaagcggactgcaaggtggtgtccatattgttaaggctgaggaagctgaattgattgcaagtaaaatgttaggccagattctgataacgaaacaaactggtccagagggaaagattgtgagcaaggtctacttgtgtgagaaactatctcttactaatgagatgtactttgccatcacccttgataggaaaactgctggtccgctcattattgcttgcagcaagggaggaaaacactatagttgacctcaatgttcaaaggatggccagaaagccaggaacagaacttaggcgttggcgattggcatctccctcccctaagccatggccaccgggcggcccgtacgactcgtgctggatgcctccctcctcctcgacccctcctccaccagggaggcggcggcggtggctctgcggcccggggtagaggagctgttgcggcggttgcgctactccaacctgaatgtggcaatctgctatgcagagggcatgccaactaatgagatgctctacttatctacattattattacatccctctgaagttgtatcttcagaagttcacattgacagtatttgcttcctcttgccatacttacccatcatggcccatggggtgtctatcttatcatgccatcttcaaagaatggcatcatgttaacaaaaatgaatgagaaatcagtcatttctaatggaaagtcaggctttcttgaaaaggtcgcaagctcacacttgtttggctctatagcacttcttgcgaaaagtgggaatctttctctaactgaattaatgttagaatggagccaaacaagtttatgtttttatgcgacttcaagagttgacaaaggtttaagttctgagctccagaatcagaattggagagttctttctgtagctaatgaatgtagcatagaggttcctggtgttttaaatgttcaaaggcttcagcagttgcttctcaccttggctactctaataaaagggaactatgtgactcatctgttctggtgattggatatataatgaaaatattctgtgaggaagacttcgcaaggagatgtggttctgtcacttatgtgaccgttgtcgtgtatggagacgtgtatggagacgaggacaagccagcgcttataatgtttacagagatgtggttctgtgactgttgccgtgtactcaggctttatttcaacaagatttaaatatgagatgtagagtgattgatgtacatcacttcactaatcatgaaatctgtagaaggcgaaactactagccatatatgatatgcataatccgtgtggtaaacattatcaatatcacacaaattatttctaatgggttttgaattatcatagtgattgttgtcgttccgtttttatgtttcatacaaattttttactcccgtcgcaacgcacgggcactcacctagtatatatataatgttgcttaccaattttgaatacccaaccttcagatcctgtcggacctgccattgctctaaagtgacacactgtgcaacctctactggctacgagtttatatggataaataatggggttttagtatcaagatatgcaaatctcactatcaattagtgctacaatgacatgaagtttttggggtcgacatagtaattatacatattaccatttgtagggcaagttggaacaaacaatagacgacatatcagcaagacaaag

SEQ ID NO: 61948 - DNA, 1554 bp, Zea Mays
agatagttgtttaaaagtcaaaatccttgctggtggccgagggctgggaactttcaaaaagcggactgcaaggtggtgtccatattgttaaggctgaggaagctgaattgattgcaagtaaaatgttaggccagattctgataacgaaacaaactggtccagagggaaagattgtgagcaaggtctacttgtgtgagaaactatctcttactaatgagatgtactttgccatcacccttgataggaaaactgctggtccgctcattattgcttgcagcaagggaggaaaacactatagttgacctcaatgttcaaaggatggccaggcaatctgctatgcagagggcatgccaactaatgagatgctctacttatctacattattattacatccctctgaagttgtatcttcagaagttcacattgacagtatttgcttcctcttgccatacttacccatcatggcccatggggtgtctatcttatcatgccatcttcaaagaatggcatcatgttaacaaaaatgaatgagaaatcagtcatttctaatggaaagtcaggctttcttgaaaaggtcgcaagctcacacttgtttggctctatagcacttcttgcgaaaagtgggaatctttctctaactgaattaatgttagaatggagccaaacaagtttatgtttttatgcgacttcaagagttgacaaaggtttaagttctgagctccagaatcagaattggagagttctttctgtagctaatgaatgtagcatagaggttcctggtgttttaaatgttcaaaggcttcagcagttgcttctcaccttggctactctaataaaagggaactatgtgactcatctgttctggtgattggatatataatgaaaatattctgtgaggaagacttcgcaaggagatgtggttctgtcacttatgtgaccgttgtcgtgtatggagacgtgtatggagacgaggacaagccagcgcttataatgtttacagagatgtggttctgtgactgttgccgtgtactcaggctttatttcaacaagatttaaatatgagatgtagagtgattgatgtacatcacttcactaatcatgaaatctgtagaaggcgaaactactagccatatatgatatgcataatccgtgtggtaaacattatcaatatcacacaaattatttctaatgggttttgaattatcatagtgattgttgtcgttccgtttttatgtttcatacaaattttttactcccgtcgcaacgcacgggcactcacctagtatatatataatgttgcttaccaattttgaatacccaaccttcagatcctgtcggacctgccattgctctaaagtgacacactgtgcaacctctactggctacgagtttatatggataaataatggggttttagtatcaagatatgcaaatctcactatcaattagtgctacaatgacatgaagtttttggggtcgacatagtaattatacatattaccatttgtagggcaagttggaacaaacaatagacgacatatcagcaagacaaag

SEQ ID NO: 61949 - DNA, 1452 bp, Zea Mays
agatagttgtttaaaagtcaaaatccttgctggtggccgagggctgggaactttcaaaaagcggactgcaaggtggtgtccatattgttaaggctgaggaagctgaattgattgcaagtaaaatgttaggccagattctgataacgaaacaaactggtccagagggaaagattgtgagcaaggtctacttgtgtgagaaactatctcttactaatgagatgtactttgccatcacccttgataggaaaactgctggtccgctcattattgcttgcagcaagggaggaaaacactatagttgacctcaatgttcaaaggatggccagaaagccaggaacagaacttaggcgttggcgattggcatctccctcccctaagccatggccaccgggcggcccgtacgactcgtgctggatgcctccctcctcctcgacccctcctccaccagggaggcggcggcggtggctctgcggcccggggtagaggagctgttgcggcggttgcgctactccaacctgaatgtgtatttgcttcctcttgccatacttacccatcatggcccatggggtgtctatcttatcatgccatcttcaaagaatggcatcatgttaacaaaaatgaatgagaaatcagtcatttctaatggaaagctaatgaatgtagcatagaggttcctggtgttttaaatgttcaaaggcttcagcagttgcttctcaccttggctactctaataaaagggaactatgtgactcatctgttctggtgattggatatataatgaaaatattctgtgaggaagacttcgcaaggagatgtggttctgtcacttatgtgaccgttgtcgtgtatggagacgtgtatggagacgaggacaagccagcgcttataatgtttacagagatgtggttctgtgactgttgccgtgtactcaggctttatttcaacaagatttaaatatgagatgtagagtgattgatgtacatcacttcactaatcatgaaatctgtagaaggcgaaactactagccatatatgatatgcataatccgtgtggtaaacattatcaatatcacacaaattatttctaatgggttttgaattatcatagtgattgttgtcgttccgtttttatgtttcatacaaattttttactcccgtcgcaacgcacgggcactcacctagtatatatataatgttgcttaccaattttgaatacccaaccttcagatcctgtcggacctgccattgctctaaagtgacacactgtgcaacctctactggctacgagtttatatggataaataatggggttttagtatcaagatatgcaaatctcactatcaattagtgctacaatgacatgaagtttttggggtcgacatagtaattatacatattaccatttgtagggcaagttggaacaaacaatagacgacatatcagcaagacaaag

SEQ ID NO: 61950 - DNA, 529 bp, Zea Mays
agatagttgtttaaaagtcaaaatccttgctggtggccgagggctgggaactttcaaaaagcggactgcaaggtggtgtccatattgttaaggctgaggaagctgaattgattgcaagtaaaatgttaggccagattctgataacgaaacaaactggtccagagggaaagattgtgagcaaggtctacttgtgtgagaaactatctcttactaatgagatgtactttgccatcacccttgataggaaaactgctggtccgctcattattgcttgcagcaagggaggaaaacactatagttgacctcaatgttcaaaggatggccaggtatttcttttttcctgtctctattcaactgttgtcgcatagctaatcttgaactacagattgcgacagccattagaatccagttatatatactttgctgcagtgagcagccaattggccatagaacgaacaatctcatgttcatgatgaaaaagaaaaaatgagggatttagagttttggaacccaatctgtttttaccttt

SEQ ID NO: 61951 - DNA, 605 bp, Zea Mays
ctcatcttggctacggtctcgccatagtttcaggaagcactttcagctgcaaaaaaagaaagcagcagtgaggatgaagatgacagtagtgaggaaagttcggatgatgagccaacaaaagttgaagaaaagaaggctccaaaagtatcagaaaatattggatctgaggatgaatcttctgaagacaagagtgataaagacagtgaagagcctcaggcatgccatcatttaacacctcagctcgcgagctgaactggctcgctctggctcgctcttttattgagccagaaaaaactctgctcgagcttgttctaagcacagtttctggatcggaggagcatccccgcctaggtctctgcagccatggttcgcggatcgctcggcaagcttgcatcgcgcgccctctccgtcgccgggagatggcagcaccagcagctccgccgcctcaacatccacgagtaccagggcgcggagttgatgggtaaatacgggatcaacgtgcccaggggcgcggcggctgggtccgtacatgaggtcaaggacgccttgaagaacatgttccccagcgagaaagaggtgatgacgccatagcttcctcatcgtct

SEQ ID NO: 61952 - DNA, 1090 bp, Zea Mays
atcctcatcttggctacggtctcgccatagtttcaggaagcactttcagctgcaaaaaaagaaagcagcagtgaggatgaagatgacagtagtgaggaaagttcggatgatgagccaacaaaagttgaagaaaagaaggctccaaaagtatcagaaaatattggatctgaggatgaatcttctgaagacaagagtgataaagacagtgaagagcctcaggcatgccatcatttaacacctcaggcatgccatcatttttgtttcacaactcaaaagtaaaggaaaacagtaaaagtatgcaggcagtatgagggacacacatagtttactgaaactcccttacacagacacatacacaccgtgttcactgaaacattcagatttcactaaactgcaacttctccaaacaaacactatctgcggctcggtcaagtaacgagcctcggctcggctcgctcctctagcgagcctaaaaagtcggctcggttcggcgagccaacgagcctgaccataagcatgaaatcagtctccaaaatataatataaagtctcaaaaataatttaagtgacacgtcttaaattagtaaaataaatatatatcatataatatagaaaataagttaattttgtacagtaatctaaaaaatataaattaatcatctatttagtacctataatatatgttaattaaaatttatataacaaaaatgttgttgtttgagccagctcgcgagctgaactggctcgctctggctcgctcttttattgagccagaaaaaactctgctcgagcttgttctaagcacagtttctggatcggaggagcatccccgcctaggtctctgcagccatggttcgcggatcgctcggcaagcttgcatcgcgcgccctctccgtcgccgggagatggcagcaccagcagctccgccgcctcaacatccacgagtaccagggcgcggagttgatgggtaaatacgggatcaacgtgcccaggggcgcggcggctgggtccgtacatgaggtcaaggacgccttgaagaacatgttccccagcgagaaagaggtgatgacgccatagcttcctcatcgtct

SEQ ID NO: 61953 - DNA, 1537 bp, Zea Mays
cgtcgactgcctttggcaaccaccccgccccaaaatctctttctccgctgcgccgcaaacccaccgcttccaccatcgccacccgtcaccccttgctcccatagtccccataccatgcccgacctccacccgccggagcaccaagtcgccggtcaccgcgcctccgccagcaagctgggcccactcatcgacgactctggcctcttctacaagccgctccaggccggcgaccgtggggagcacgaggtcgccttctatgaggcgttctccgcccacgccgccgtcccggcccgcatccgagacaccttcttcccccggttccacggcacgcgactcctccccaccgaggcgcagcccggggagccgcatccgcacctcgtcctcgacgacctcctcgcggggtttgaggcgccctgcgtcgcagacatcaagatcggtgccatcacgtgaccacgagcgttctgctcggattccgcgtctccggcgtccgagtcgtcggccccgagggcgccgtgtggcggacggagcgcccggaggtgaaggctatggacattgtcggcgtccgccgcgtgctccggcgctacgtgtcatccgcttgccgacgaggggatggactgcgcgctcgcggcggcggtgtacggaggaaaaggtggagtcttgtcacagctgcgcgagctcaaggcgtggttcgaggggcagactctgttccacttctactcggcgtcgattcttctgggctatgatgctgctgcagtcgcagcaggcggaggtgggggtggggtaacagtgaagctggtggactttgcccatgtggccgagggtgatggggtgattgaccacaacttcctgggcgggctctgctagctgatcaagtttgtttctgacattgttccagagactcctcagacgcagcctttgggtccttcttaagagaggatcctggcattttcgatttgataacaaaggaagcactttcagctgcaaaaaaagaaagcagcagtgaggatgaagatgacagtagtgaggaaagttcggatgatgagccaacaaaagttgaagaaaagaaggctccaaaagtatcagaaaatattggatctgaggatgaatcttctgaagacaagagtgataaagacagtgaagagcctcaggcatgccatcatttaacacctcagctcgcgagctgaactggctcgctctggctcgctcttttattgagccagaaaaaactctgctcgagcttgttctaagcacagtttctggatcggaggagcatccccgcctaggtctctgcagccatggttcgcggatcgctcggcaagcttgcatcgcgcgccctctccgtcgccgggagatggcagcaccagcagctccgccgcctcaacatccacgagtaccagggcgcggagttgatgggtaaatacgggatcaacgtgcccaggggcgcggcggctgggtccgtacatgaggtcaaggacgccttgaagaacatgttccccagcgagaaagaggtgatgacgccatagcttcctcatcgtct

SEQ ID NO: 61954 - DNA, 2019 bp, Zea Mays
cgtcgactgcctttggcaaccaccccgccccaaaatctctttctccgctgcgccgcaaacccaccgcttccaccatcgccacccgtcaccccttgctcccatagtccccataccatgcccgacctccacccgccggagcaccaagtcgccggtcaccgcgcctccgccagcaagctgggcccactcatcgacgactctggcctcttctacaagccgctccaggccggcgaccgtggggagcacgaggtcgccttctatgaggcgttctccgcccacgccgccgtcccggcccgcatccgagacaccttcttcccccggttccacggcacgcgactcctccccaccgaggcgcagcccggggagccgcatccgcacctcgtcctcgacgacctcctcgcggggtttgaggcgccctgcgtcgcagacatcaagatcggtgccatcacgtgaccacgagcgttctgctcggattccgcgtctccggcgtccgagtcgtcggccccgagggcgccgtgtggcggacggagcgcccggaggtgaaggctatggacattgtcggcgtccgccgcgtgctccggcgctacgtgtcatccgcttgccgacgaggggatggactgcgcgctcgcggcggcggtgtacggaggaaaaggtggagtcttgtcacagctgcgcgagctcaaggcgtggttcgaggggcagactctgttccacttctactcggcgtcgattcttctgggctatgatgctgctgcagtcgcagcaggcggaggtgggggtggggtaacagtgaagctggtggactttgcccatgtggccgagggtgatggggtgattgaccacaacttcctgggcgggctctgctagctgatcaagtttgtttctgacattgttccagagactcctcagacgcagcctttgggtccttcttaagagaggatcctggcattttcgatttgataacaaaggaagcactttcagctgcaaaaaaagaaagcagcagtgaggatgaagatgacagtagtgaggaaagttcggatgatgagccaacaaaagttgaagaaaagaaggctccaaaagtatcagaaaatattggatctgaggatgaatcttctgaagacaagagtgataaagacagtgaagagcctcaggcatgccatcatttaacacctcaggcatgccatcatttttgtttcacaactcaaaagtaaaggaaaacagtaaaagtatgcaggcagtatgagggacacacatagtttactgaaactcccttacacagacacatacacaccgtgttcactgaaacattcagatttcactaaactgcaacttctccaaacaaacactatctgcggctcggtcaagtaacgagcctcggctcggctcgctcctctagcgagcctaaaaagtcggctcggttcggcgagccaacgagcctgaccataagcatgaaatcagtctccaaaatataatataaagtctcaaaaataatttaagtgacacgtcttaaattagtaaaataaatatatatcatataatatagaaaataagttaattttgtacagtaatctaaaaaatataaattaatcatctatttagtacctataatatatgttaattaaaatttatataacaaaaatgttgttgtttgagccagctcgcgagctgaactggctcgctctggctcgctcttttattgagccagaaaaaactctgctcgagcttgttctaagcacagtttctggatcggaggagcatccccgcctaggtctctgcagccatggttcgcggatcgctcggcaagcttgcatcgcgcgccctctccgtcgccgggagatggcagcaccagcagctccgccgcctcaacatccacgagtaccagggcgcggagttgatgggtaaatacgggatcaacgtgcccaggggcgcggcggctgggtccgtacatgaggtcaaggacgccttgaagaacatgttccccagcgagaaagaggtgatgacgccatagcttcctcatcgtct

SEQ ID NO: 61955 - DNA, 1432 bp, Zea Mays
cgtcgactgcctttggcaaccaccccgccccaaaatctctttctccgctgcgccgcaaacccaccgcttccaccatcgccacccgtcaccccttgctcccatagtccccataccatgcccgacctccacccgccggagcaccaagtcgccggtcaccgcgcctccgccagcaagctgggcccactcatcgacgactctggcctcttctacaagccgctccaggccggcgaccgtggggagcacgaggtcgccttctatgaggcgttctccgcccacgccgccgtcccggcccgcatccgagacaccttcttcccccggttccacggcacgcgactcctccccaccgaggcgcagcccggggagccgcatccgcacctcgtcctcgacgacctcctcgcggggtttgaggcgccctgcgtcgcagacatcaagatcggtgccatcacgtgaccacgagcgttctgctcggattccgcgtctccggcgtccgagtcgtcggccccgagggcgccgtgtggcggacggagcgcccggaggtgaaggctatggacattgtcggcgtccgccgcgtgctccggcgctacgtgtcatccgcttgccgacgaggggatggactgcgcgctcgcggcggcggtgtacggaggaaaaggtggagtcttgtcacagctgcgcgagctcaaggcgtggttcgaggggcagactctgttccacttctactcggcgtcgattcttctgggctatgatgctgctgcagtcgcagcaggcggaggtgggggtggggtaacagtgaagctggtggactttgcccatgtggccgagggtgatggggtgattgaccacaacttcctgggcgggctctgctagctgatcaagtttgtttctgacattgttccagagactcctcagacgcagcctttgggtccttcttaagagaggatcctggcattttcgatttgataacaaaggaagcactttcagctgcaaaaaaagaaagcagcagtgaggatgaagatgacagtagtgaggaaagttcggatgatgagccaacaaaagttgaagaaaagaaggctccaaaagtatcagaaaatattggatctgaggatgaatcttctgaagacaagagtgataaagacagtgaagagcctcagtttctggatcggaggagcatccccgcctaggtctctgcagccatggttcgcggatcgctcggcaagcttgcatcgcgcgccctctccgtcgccgggagatggcagcaccagcagctccgccgcctcaacatccacgagtaccagggcgcggagttgatgggtaaatacgggatcaacgtgcccaggggcgcggcggctgggtccgtacatgaggtcaaggacgccttgaagaacatgttccccagcgagaaagaggtgatgacgccatagcttcctcatcgtct

SEQ ID NO: 61956 - DNA, 1513 bp, Zea Mays
cgtcgactgcctttggcaaccaccccgccccaaaatctctttctccgctgcgccgcaaacccaccgcttccaccatcgccacccgtcaccccttgctcccatagtccccataccatgcccgacctccacccgccggagcaccaagtcgccggtcaccgcgcctccgccagcaagctgggcccactcatcgacgactctggcctcttctacaagccgctccaggccggcgaccgtggggagcacgaggtcgccttctatgaggcgttctccgcccacgccgccgtcccggcccgcatccgagacaccttcttcccccggttccacggcacgcgactcctccccaccgaggcgcagcccggggagccgcatccgcacctcgtcctcgacgacctcctcgcggggtttgaggcgccctgcgtcgcagacatcaagatcggtgccatcacgtgaccacgagcgttctgctcggattccgcgtctccggcgtccgagtcgtcggccccgagggcgccgtgtggcggacggagcgcccggaggtgaaggctatggacattgtcggcgtccgccgcgtgctccggcgctacgtgtcatccgcttgccgacgaggggatggactgcgcgctcgcggcggcggtgtacggaggaaaaggtggagtcttgtcacagctgcgcgagctcaaggcgtggttcgaggggcagactctgttccacttctactcggcgtcgattcttctgggctatgatgctgctgcagtcgcagcaggcggaggtgggggtggggtaacagtgaagctggtggactttgcccatgtggccgagggtgatggggtgattgaccacaacttcctgggcgggctctgctagctgatcaagtttgtttctgacattgttccagagactcctcagacgcagcctttgggtccttcttaagagaggatcctggcattttcgatttgataacaaaggaagcactttcagctgcaaaaaaagaaagcagcagtgaggatgaagatgacagtagtgaggaaagttcggatgatgagccaacaaaagttgaagaaaagaaggctccaaaagtatcagaaaatattggatctgaggatgaatcttctgaagacaagagtgataaagacagtgaagagcctcagctcgcgagctgaactggctcgctctggctcgctcttttattgagccagaaaaaactctgctcgagcttgttctaagcacagtttctggatcggaggagcatccccgcctaggtctctgcagccatggttcgcggatcgctcggcaagcttgcatcgcgcgccctctccgtcgccgggagatggcagcaccagcagctccgccgcctcaacatccacgagtaccagggcgcggagttgatgggtaaatacgggatcaacgtgcccaggggcgcggcggctgggtccgtacatgaggtcaaggacgccttgaagaacatgttccccagcgagaaagaggtgatgacgccatagcttcctcatcgtct

SEQ ID NO: 61957 - DNA, 2081 bp, Zea Mays
gtactttggtactttatttatattttatgcaatttttccagttaattatgaaaccaacgtggattgattattgcttaaattgcatagaattcagaaaattttgtggtgattgaatatttcaaccaacgttgaatattgttaccacaatttaatacaagtttatgttttctatatcatccaacgatggtttagaaattttgtgatcagaaattttcatagatatggcatggttattatttgaccaacgttgaatatttaattcatgcatgttctatgattcagtattcagtatttatttcagatgtcctaaatattttctgttttaattttgcaaaggtgctcataccgccatgctgattagccagattgctcagatgaaaccgctagatggtagtaattaccattcttggcgggaggatatagacatgataaccacagtgggtgagatagattacgcactgaggtttgataaaccagttgagcccacagtgggcactcccaactatgaccacaggtggatgcaatacagcatcgacaaggtcaagtgggagagatcaaatgacaaatgtatgattattcttaagaggagcatcaaggagcctcttaagagttccataccagagtgcgagactgccaaagaataccttgagagggtagcctctcatcaccaagggtcttctaaggcttatgcttgctctctaatgacagaatttgtcaatgcaaaatacgatggaaatggtgtcagaccattcattcagaaaatgatatccatcgtagctaagataaacaaatacctcgggtctcctttacacgaggaatttgtagtatttatgataatgaagtctctgcccaaggagtttgagacttttcacatacagtacaacactagtgtcactgataagtggaatatagaccaactcttggcacagtgtgtccaggaggaagagaggttaaagcagactggagactctgtcaatctcatcaaaggcaatgtccccagacagaacaagaactcaaagaaaaagttcaagaagcaaggtaaacagaataaccaggcttcctcgagcaataataatcagccaagacaaggaggcagtttctcagttccccctgatacctgcctctattgcaagaagacaggtcattacaagagaaagtgccctgaattcctgcagtatctactagagagtggtaaggaccaagttacttttgtaaatgagtctttatacttagaatatcccagttattcttggtggattgactcaggtgcaactgttcatgttgcaaactctctacagggactccgtacaagccaaaggctcccaaagggccaaagaacaattagagtggcaaatggagttgaagcagcagtcgaggccattggagatatacatcttaaattagttaatggttttgtactgttgttgagagacgtactttatgtaccttccttgcgaaggaaccttatttcggtttctagattagatgatcagcacattcattgtcattttggtgatagacaatgtgtcattcagtttgataataaagatgttggtctcgccatccgacgagatatgctttatttactttcgcaaagtgatgttgttaatgtattagatataccagaaaatgatccagccaacagtggcaggaaaagaaaacgaagtgatggagaaacctcgtcgaaattatggcactatcgtttgggccatatttcgagggggagaatagaaagtcttgttaaggaacagattctccatcccctagatttcacagacttagagcaatgcagagattgcattaagggtaaattcgcgaagcagattaagaaagatgctaagcatagtacgagagtgttagaaattattcatacagatatctgtggtccttttccagttaggacagtagatgggtttaactcgttcataaccttcacagatgactactctcgctacggttatatttatccaattaaggaaagatcagaagctttagacaagtttaaacagttcaaggctgaagtagagaatcaacacgatttgaagataaagattgttcgatcagatcgtgggggggagtac

SEQ ID NO: 61958 - DNA, 2909 bp, Zea Mays
cgaccgttggctcaccgaacagttcggtgcaccaccggacagtccggtgaattttagtcgtacatcgctgatccttttcctgagagcagccatttcaccggagaccagcctggcgcaccggacactgtccggtgcaccaccggacagtccggtgtgccagactgagctgaagtttggctgcacacagccaagtctttttgcaattcgattctcttcttctcagcactgtttctagcacttggataaccatgttagtacataaaaacaattcaccaagtctagaaacataccttttgccttgatttgcaattatcactttatttggcataaaagaacttaattaaacatgttgggcacttaatcaccaaaatattatagaaatggctcaaaggcacatttccctttcagtcacgtctgtatgtctagtgttgtcatatgacttgatatgtgaccactctaggcccatatgcgccatatacctgaaaccatagcccacacacgcccgtgaaaccgcgtgggtcttctctaatactatttgtaacaccccgtccactacctaacctatggtacttactcctagcagtcttctaggatcataaaccatcccgacataccaacacgagccttttgtgcgcactttgttctaactcatgcacacctgagaagacttccgagccgatcacccatcctaagattgctttgggacaagcacacttaactcataggttatttcgagacaggtttccaaagaaagaagatgcatcttgtcggtatgagtactaggatagaattgaagacttggtagcctggcacaccggaccactttgctagagtggtcagaattgaagatttagcggcctagtgcactggaccttgggtccatgtgcactggacctcctggtccaatggctacttcaggcagggcaagtgcgactccaatggttagctgacgtggcaagggtccatggtgcactggtccagtctggtgccagtctagtttggaaggtatctgttaggatctttgtgatcgcgggactttagacagtccagtgatgtaccaaaccagtccggtgacctcatggacaacaggttttcctgatttgcaggaacgactattttagcccttagggctataaatagaccccattttgaccccagctagaacaacaaggcagcaagcaagtggagaataagtgcatacttatattctatccctcgcttgtgtattatgtgatagatcaagtgattggcatgtgttctagccaaagagataggcgtatgtgtcatactattgctgcatagaagagctagtgtgaccttgagcgacacattcaattctatcgaagagctaccaatttttgatagcctcggttctgttgtaactctcatcaaggtatagtgaaagtctcagtttgtcaccttagtgataaacttgagcaaacaaaggaaggagttgaaatatactccaagccagattggctaactttaacatagagtaagcaagcatttgaggcttaatcaaaccatagtgatgcacttttctacttatatttgttatgttttctgggaagtgaagatatcttttgagacaagggcatctttatgctgcataagactctgcaaatcaagtaagaaagttcgaatagagtttaagcttttattaacgcctattcactctcctctaggcgacatacatgtccttagtaccctaaaaggcactttcactcatcttgcctcgatggactagagcgagacggggttgggcatggagtggtgaaggacatgggcgcacgtcatgcacgtgaatggttcgccgaaatcgggggggggggtctaagtcttgcaggcacacaactttcttctgcagttttgtttttccacttaatctgttgcaaattttcgagtgcggaaaacttattctgttatggattttttggtgtggatttttgggaacttaatctgttacagatttttatgcagatttttggaaattatggatttgactcgttttttgggacgtcaaaaccctagcgtggtttctcctaataactacgtacgagtgatgtcgtagatgaatagcacacaccaatgcatctagggttttgcctctttttccttgccacgtccccgtgtacactacttcaccccaattatcggtgtgcatcggcgaatgagaaagtaggccaccataactgttgttctctgcgattctgtactggagagggcgggtaagggttttaggaagtgctctgcatgattgcttgatcacttgacttgtcatcttcgtcaacttcatcgccgcagcttgtcttcctccttgttgcatgggcgcttgacgtcgttggcaagaacgagacggtactgaacgttgacgtcgtcttttctacctgattgccgccaagaaagaaatgtacgaccatctccctttaattatgtatttcatattgggtaataatctgtttatacacggttctggtacagtaagttttaatcttaattagtatgatgatgtgcatgtttagatctatttattttatgtgcacatgtcttcatggtcatgctttatatggaactcagtatgaacactcatgtcacatatgcacatacctcgtaccttatccctattaacctatttggaactcagtaggcacttaactaaccaagtgctccattgacattacattgtgtcactgtctgcttatttgctgcctaattcattgttattgcttggtatatacaatcgtaatatgttttctgctatactgtatttggttggatagaacgatcaaaactcaatcccatagcacgttcttcgaacagcttttttaactactaggaggatgtgcctgacacgtctctccgggtggacatgaatggaggaatgctctgctcgtgcctgaagaagtcat

SEQ ID NO: 61959 - DNA, 1471 bp, Zea Mays
ttctgggctgctggcccaagcccagtacacccaaactacactcccacgaaccacgaccaaaaatgccccgctcggacaaaatgaaactgaagaggcattcttttgccaacgggcagaagggagaagaccaggaataaaaaagaggcgtggtagtggacagtgagagctgacagggacagtgcccaccaatggtccccttctcacggtcacgctagcagcagcagccctcccccatcaccgaggagagagaagcctgtcgccgcgcgaccgccccacatggccaccgcgctcggtggggggcccaaccccaccgccgacgccatggaggtcgaccctccgcgcgcctccgccgacgagaagcatgtcgccactattattgcggggggaagtgatgcagtgacaggccacataatatcgactacgattgggggaaagaatggtgaaccaaagaggaccatcagctatatggctgagcgagttgttggaactggatcgtttggggttgtcttccaggcaaaatgcattgagactggtgaaaccgttgcaattaagaaggttctacaggacaaaagatacaagaatagggagttacaaataatgcgatcaattgaccattgcaatgtcatttccctgaagcattgtttcttctctaccacaagtagggatgaacttttccttaacttagtcatggagtttgttccagagtcactttatcgcgttctgaaacactacaaagacatgaagcagaggatgccccttatatatgttaaattgtatatgtaccagatattccggggactagcttatattcatactgtaccaggaatttgtcaccgagatattaagcctcagaatatcttggtggatcctctttcccaccaagtcaaggtttgtgacttcgggagtgctaaaatcttgattaaaggtgaagctaatatatcatatatatgctcacgctattatcgtgctcctgagctcatatttggtgcaactgaatacacaacatctattgatatatggtcagctggatgtgttcttgctgagcttcttcttagtcaaccattatttcctggggaaagtgctgtggaccagctggttgagattatcaaggttttgggcaccccaacacgagaggaaattcgttgtatgaatcccaactatacagaattcaagtttcctcagataaaagcatgtccatggcacaagatcttccacaagagaatgcctccagaagcaatagatcttgtttcccgtcttcttcagtattcgccgaatctgcgatgtagcgcacttgaggcgtgtgctcattcattctttgacgaattacgagaatcacatgcaagactccctaatggacgcccatttcctccactattcaactttaagcaggaagttagtgtgttggtttgaggacgaggaatggagtgatttatatctgttttttatgatggaatcatggaatcaatgtttg

SEQ ID NO: 61960 - DNA, 1752 bp, Zea Mays
tagcattgctttcgggggaggggacctgctgctcgatgctctctcctcttcggccaactttgcgtgcgcgccatgctagcgttcccactctcgtgttgctttggatcgtgtccaaagccggacggaatgtgttctacaagttgtctgcatgtcgccactattattgcggggggaagtgatgcagtgacaggccacataatatcgactacgattgggggaaagaatggtgaaccaaagaggaccatcagctatatggctgagcgagttgttggaactggatcgtttggggttgtcttccaggcaaaatgcattgagactggtgaaaccgttgcaattaagaaggttctacaggacaaaagatacaagaatagggagttacaaataatgcgatcaattgaccattgcaatgtcatttccctgaagcattgtttcttctctaccacaagtagggatgaacttttccttaacttagtcatggagtttgttccagagtcactttatcgcgttctgaaacactacaaagacatgaagcagaggatgccccttatatatgttaaattgtatatgtaccaggtgggtagtggtagaattgcattctatcttgatatgcatgtgctagaagaggtgtttaatatatttacatttttcatatcttgtgcagatattccggggactagcttatattcatactgtaccaggaatttgtcaccgagatattaagcctcagaatatcttggtggatcctctttcccaccaagtcaaggtttgtgacttcgggagtgctaaaatcttgattaaaggtgaagctaatatatcatatatatgctcacgctattatcgtgctcctgagctcatatttggtgcaactgaatacacaacatctattgatatatggtcagctggatgtgttcttgctgagcttcttcttagtcaaccattatttcctggggaaagtgctgtggaccagctggttgagattatcaaggttttgggcaccccaacacgagaggaaattcgttgtatgaatcccaactatacagaattcaagtttcctcagataaaagcatgtccatggcacaagatcttccacaagagaatgcctccagaagcaatagatcttgtttcccgtcttcttcagtattcgccgaatctgcgatgtagcgcacttgaggcgtgtgctcattcattctttgacgaattacgagaatcacatgcaagactccctaatggacgcccatttcctccactattcaactttaagcaggaactagcaaacgcaccaccggagcttgtcagcaggctattaccagagcatgctcgacggcattcaggattcggttccttatttgggagtggaccgtagcccgtaggaaaatctcgttttaatgttgggctgctgtacgccgtcagagggcaatctgcatatcccaaatctaagttttagaacctgaccatcttgttgagaagttgccagccttagaaaaacccgaggtggcctcttgtgtccatgctctgccagtagcggcacataatgctggggggatggttaggtttgttaagcacagagggtaactgactgagctaatgtattttcacgttttatgtctgtatcgaacttgtacctgtgtaccctgtaccaatcgcagctgatgtaatcatgtaaatgcttctaaactacttcaagctattatgatggccaattcgcaattttacagtacaccaaacgccccaatcatttcattcttgtttttt

SEQ ID NO: 61961 - DNA, 1771 bp, Zea Mays
ttctgggctgctggcccaagcccagtacacccaaactacactcccacgaaccacgaccaaaaatgccccgctcggacaaaatgaaactgaagaggcattcttttgccaacgggcagaagggagaagaccaggaataaaaaagaggcgtggtagtggacagtgagagctgacagggacagtgcccaccaatggtccccttctcacggtcacgctagcagcagcagccctcccccatcaccgaggagagagaagcctgtcgccgcgcgaccgccccacatggccaccgcgctcggtggggggcccaaccccaccgccgacgccatggaggtcgaccctccgcgcgcctccgccgacgagaagcatgtcgccactattattgcggggggaagtgatgcagtgacaggccacataatatcgactacgattgggggaaagaatggtgaaccaaagaggaccatcagctatatggctgagcgagttgttggaactggatcgtttggggttgtcttccaggcaaaatgcattgagactggtgaaaccgttgcaattaagaaggttctacaggacaaaagatacaagaatagggagttacaaataatgcgatcaattgaccattgcaatgtcatttccctgaagcattgtttcttctctaccacaagtagggatgaacttttccttaacttagtcatggagtttgttccagagtcactttatcgcgttctgaaacactacaaagacatgaagcagaggatgccccttatatatgttaaattgtatatgtaccagatattccggggactagcttatattcatactgtaccaggaatttgtcaccgagatattaagcctcagaatatcttggtggatcctctttcccaccaagtcaaggtttgtgacttcgggagtgctaaaatcttgctggatgtgttcttgctgagcttcttcttagtcaaccattatttcctggggaaagtgctgtggaccagctggttgagattatcaaggttttgggcaccccaacacgagaggaaattcgttgtatgaatcccaactatacagaattcaagtttcctcagataaaagcatgtccatggcacaagatcttccacaagagaatgcctccagaagcaatagatcttgtttcccgtcttcttcagtattcgccgaatctgcgatgtagcgcacttgaggcgtgtgctcattcattctttgacgaattacgagaatcacatgcaagactccctaatggacgcccatttcctccactattcaactttaagcaggaactagcaaacgcaccaccggagcttgtcagcaggctattaccagagcatgctcgacggcattcaggattcggttccttatttgggagtggaccgtagcccgtaggaaaatctcgttttaatgttgggctgctgtacgccgtcagagggcaatctgcatatcccaaatctaagttttagaacctgaccatcttgttgagaagttgccagccttagaaaaacccgaggtggcctcttgtgtccatgctctgccagtagcggcacataatgctggggggatggttaggtttgttaagcacagagggtaactgactgagctaatgtattttcacgttttatgtctgtatcgaacttgtacctgtgtaccctgtaccaatcgcagctgatgtaatcatgtaaatgcttctaaactacttcaagctattatgatggccaattcgcaattttacagtacaccaaacgccccaatcatttcattcttgtttttt

SEQ ID NO: 61962 - DNA, 1414 bp, Zea Mays
ttctgggctgctggcccaagcccagtacacccaaactacactcccacgaaccacgaccaaaaatgccccgctcggacaaaatgaaactgaagaggcattcttttgccaacgggcagaagggagaagaccaggaataaaaaagaggcgtggtagtggacagtgagagctgacagggacagtgcccaccaatggtccccttctcacggtcacgctagcagcagcagccctcccccatcaccgaggagagagaagcctgtcgccgcgcgaccgccccacatggccaccgcgctcggtggggggcccaaccccaccgccgacgccatggaggtcgaccctccgcgcgcctccgccgacgagaagcatgtcgccactattattgcggggggaagtgatgcagtgacaggccacataatatcgactacgattgggggaaagaatggtgaaccaaagaggaccatcagctatatggctgagcgagttgttggaactggatcgtttggggttgtcttccaggcaaaatgcattgagactggtgaaaccgttgcaattaagaaggttctacaggacaaaagatacaagaatagggagttacaaataatgcgatcaattgaccattgcaatgtcatttccctgaagcattgtttcttctctaccacaagtagggatgaacttttccttaacttagtcatggagtttgttccagagtcactttatcgcgttctgaaacactacaaagacatgaagcagaggatgccccttatatatgttaaattgtatatgtaccagatattccggggactagcttatattcatactgtaccaggaatttgtcaccgagatattaagcctcagaatatcttggtggatcctctttcccaccaagtcaaggtttgtgacttcgggagtgctaaaatcttgattaaaggtgaagctaatatatcatatatatgctcacgctattatcgtgctcctgagctcatatttggtgcaactgaatacacaacatctattgatatatggtcagctggatgtgttcttgctgagcttcttcttagtcaaccattatttcctggggaaagtgctgtggaccagctggttgagattatcaaggttttgggcaccccaacacgagaggaaattcgttgtatgaatcccaactatacagaattcaagtttcctcagataaaagcatgtccatggcacaagatcttccacaagagaatgcctccagaagcaatagatcttgtttcccgtcttcttcagtattcgccgaatctgcgatgtagcgcacttgaggcgtgtgctcattcattctttgacgaattacgagaatcacatgcaagactccctaatggacgcccatttcctccactattcaactttaagcaggaaatagcatgcctgaaggaggaac

SEQ ID NO: 61963 - DNA, 1064 bp, Zea Mays
ccagtattctgctcaagccgagcaccgcagaaaaagaaaaagaaaagccaaaggcaaaggcaaaggaatcccaatcaggcaagcaaaaggaagaaccagctgctgcggccggagatgtcgtcgcagctgatcgaggagcaccggtcgggcgcggaggtgcacgtcgggcacgagctgtgcgagcgcaagtcgcgcgagttcatggtggagctgggcctccccgacgggctcctcccgctgcccagcctggacgaggtgggctacaaccggcctgacccacaccttcggctccatcggcaagcaggtgtggtacgacagggaggtgacggcgttcgtggagcccgggcggatgcacggcctcgccggggtgaagagcaaggagctcctcatctgggtcaccgccttccagctcgagcccgcggcggcggagggggaccacaaggaggaggccgaggacgccgccgccgccgccgccaactgatctgctctagcttccggcggcggcggccgtgcgtgggctgctcgatccggtagtggcagtggctttgtgagacagtcgagtcgattgtggtttcccctcctccgccatgtgcgtgtagtggatgatgatgcaggaataaacggtgtccctggatccagaactcacggttcgatccatccagtttatctcatgcttgtgtatctctatgtatgcattgcctgtttgttcgctggaatctactacttgcagcggcctcgtctcttcagatcttgggtcttcacaatgcatgggtttgtctgctacttagacgttcatgatccgtcaatttggtcgtgttttctgtgaaactggtcgcctgtgagtgtgaggttgagatcgacagctcggcatctcactcgtgttcatcaaatcaaatttagtagtaggttgtgagttactacgagctgatcaaggtggttagcattcatgtgcagtgcagtaccactacaaccacctagatctgggcacttacttgtcgaccggcagttggcatttataaatcctgtctctggtacacgccgttcggcccggctcgaaagcaacg

SEQ ID NO: 61964 - DNA, 1417 bp, Zea Mays
attgtaccatcaccttcctcctgtttttcttgcctgtctccatactcaccagttgcttttgaggagctgatcgagctacaagcaatcgggcaaaggatatttccgagctaggtattattgcaaggaagaattaatatgcatccaggaggtggaccactgtcggtgccaccaggcttccgcttccacccgaccgacgaggagctcctctactactacctgaggaagaaggtttcctatgagcccatagatcttgatgtcataagggagattgatctcaaccagcttgagccatgggatctcaaagaaaggtgcaggataggcaccgggcatcagaacgagtggtacttcttcagccacaaggacaagaagtacccgacgggaacaaggacgaaccgcgccacgacggcggggttctggaaggcgactgggcgagacaaggccatcttcctcggcaacgcctccaggaggatcggcttgaggaagaccctggtgttctacatcggcagggcgccacacggcaagaagactgactggatcatgcacgagtaccgcctggaccaagagaacgttgagattcaggaagatggttgggtggtgtgtagggttttcaagaagaagagctatcaccagagaggcctcaatccggctgaaatggccgccgcactggacgacgacgagctccagcctttccctgttcctatccccggcagctccctgcagccaacagagcacaagaccaaccctactcacctcatgcaatatgactatccttccttcgacccttccatgcagctcccacagctgatgagcgatgaccaggaacaggaacagcccgtgcggccaaccctcctccccggccatcccggcgttgctatggcctccatgagctcactcaacattgagtgctcgcagaacctgacgaagctcacatctaacggcagcgacgagatgctccacgtcggccacggcggtggggctggaggtggtgtagtcgtcgaccgcttcgctggcacgacgacagattggtcgatcctagacaagctcctcgcctcgcaccagaacctcgaccggctcttccacggcaaggtcgtcaccacggcatctgcctccccaatggcggtaccggtataccatcagcagctcatggaactcggtggctcgtcgtcgtccttgcagaggcttccactgcagtacctcggcggcgagacggccgatctcctcagggttgcttgttaggtacggtgcttttggtggaaaaaaatgtgaagagatggcatggtcagtcaagaacttctatttgtttcctcaaacatattactacttccactagtagaaaagagctcaaagcctgcggcacccataaattatcactggcggtttcagttatcacgcgccagtaaaaaaaacaaggtggacc

SEQ ID NO: 61965 - DNA, 1689 bp, Zea Mays
attgtaccatcaccttcctcctgtttttcttgcctgtctccatactcaccagttgcttttgaggagctgatcgagctacaagcaatcgggcaaaggatatttccgagctaggtattattgcaaggaagaattaatatgcatccaggaggtggaccactgtcggtgccaccaggcttccgcttccacccgaccgacgaggagctcctctactactacctgaggaagaaggtttcctatgagcccatagatcttgatgtcataagggagattgatctcaaccagcttgagccatgggatctcaaagaaaggtgcaggataggcaccgggcatcagaacgagtggtacttcttcagccacaaggacaagaagtacccgacgggaacaaggacgaaccgcgccacgacggcggggttctggaaggcgactgggcgagacaaggccatcttcctcggcaacgcctccaggaggatcggcttgaggaagaccctggtgttctacatcggcagggcgccacacggcaagaagactgactggatcatgcacgagtaccgcctggaccaagagaacgttgagattcagggtctacaggaagatggttgggtggtgtgtagggttttcaagaagaagagctatcaccagagaggcctcaatccggctgaaatggccgccgcactggacgacgacgagctccagcctttccctgttcctatccccggcagctccctgcagccaacagagcacaagaccaaccctactcacctcatgcaatatgactatccttccttcgacccttccatgcagctcccacagctgatgagcgatgaccaggaacaggaacagcccgtgcggccaaccctcctccccggccatcccggcgttgctatggcctccatgagctcactcaacattgagtgctcgcagaacctgacgaagctcacatctaacggcagcgacgagatgctccacgtcggccacggcggtggggctggaggtggtgtagtcgtcgaccgcttcgctggcacgacgacagattggtcgatcctagacaagctcctcgcctcgcaccagaacctcgaccggctcttccacggcaaggtcgtcaccacggcatctgcctccccaatggcggtaccggtataccatcagcagctcatggaactcggtggctcgtcgtcgtccttgcagaggcttccactgcagtacctcggcggcgagacggccgatctcctcaggtaccccaagtaattggatcgacctcaagtttagctacctctctcttgttgagcagtgaccagatcagggtttttggttgactactagatcgatcgactgcttaattaattcggtctactttgtatggagagtttagtgctcctaaatgtatatatatggtgcaactgttttgggcatgcaggcatggaatgccatctactgtggttgattgtgtttggtcaggactcaggaggatctttttgctgttttcattttggcttagggttgcttgttaggtacggtgcttttggtggaaaaaaatgtgaagagatggcatggtcagtcaagaacttctatttgtttcctcaaacatattactacttccactagtagaaaagagctcaaagcctgcggcacccataaattatcactggcggtttcagttatcacgcgccagtaaaaaaaacaaggtggacc

SEQ ID NO: 61966 - DNA, 1898 bp, Zea Mays
agtatatagtcaatgcttccatcaatcaatctaaaactatagtgacagctcaaacccatctgccacaggctatatacattttatacgcgcctagggtttgtctttgttggtacgagcatcttggacttgataccccccggcccttgctagctccctcacccccagtccccactatactccaactccatataaggcagccatgtatccctttcccttgcattgtaccatcaccttcctcctgtttttcttgcctgtctccatactcaccagttgcttttgaggagctgatcgagctacaagcaatcgggcaaaggatatttccgagctaggtattattgcaaggaagaattaatatgcatccaggaggtggaccactgtcggtgccaccaggcttccgcttccacccgaccgacgaggagctcctctactactacctgaggaagaaggtttcctatgagcccatagatcttgatgtcataagggagattgatctcaaccagcttgagccatgggatctcaaagaaaggtgcaggataggcaccgggcatcagaacgagtggtacttcttcagccacaaggacaagaagtacccgacgggaacaaggacgaaccgcgccacgacggcggggttctggaaggcgactgggcgagacaaggccatcttcctcggcaacgcctccaggaggatcggcttgaggaagaccctggtgttctacatcggcagggcgccacacggcaagaagactgactggatcatgcacgagtaccgcctggaccaagagaacgttgagattcaggaagatggttgggtggtgtgtagggttttcaagaagaagagctatcaccagagaggcctcaatccggctgaaatggccgccgcactggacgacgacgagctccagcctttccctgttcctatccccggcagctccctgcagccaacagagcacaagaccaaccctactcacctcatgcaatatgactatccttccttcgacccttccatgcagctcccacagctgatgagcgatgaccaggaacaggaacagcccgtgcggccaaccctcctccccggccatcccggcgttgctatggcctccatgagctcactcaacattgagtgctcgcagaacctgacgaagctcacatctaacggcagcgacgagatgctccacgtcggccacggcggtggggctggaggtggtgtagtcgtcgaccgcttcgctggcacgacgacagattggtcgatcctagacaagctcctcgcctcgcaccagaacctcgaccggctcttccacggcaaggtcgtcaccacggcatctgcctccccaatggcggtaccggtataccatcagcagctcatggaactcggtggctcgtcgtcgtccttgcagaggcttccactgcagtacctcggcggcgagacggccgatctcctcaggtaccccaagtaattggatcgacctcaagtttagctacctctctcttgttgagcagtgaccagatcagggtttttggttgactactagatcgatcgactgcttaattaattcggtctactttgtatggagagtttagtgctcctaaatgtatatatatggtgcaactgttttgggcatgcaggcatggaatgccatctactgtggttgattgtgtttggtcaggactcaggaggatctttttgctgttttcattttggcttagggttgcttgttaggtacggtgcttttggtggaaaaaaatgtgaagagatggcatggtcagtcaagaacttctatttgtttcctcaaacatattactacttccactagtagaaaagagctcaaagcctgcggcacccataaattatcactggcggtttcagttatcacgcgccagtaaaaaaaacaaggtggacc

SEQ ID NO: 61967 - DNA, 1295 bp, Zea Mays
tacagaatggggcttataagcaacatagattgttgaactttggacaaagcggaagtttcgttgtgattgtggcaactcaaagtttggtggtcacctttgcaaactctgccctgagaaagattatgagaattcagcaaatacttataaccataacttcaaaggttcctattgcacatgtgggcggccttatcctgacccagaagctaaggagcaagttgaaatgatacaatgctctatatgtgaggactggtttcatggggatcatattggtcttaactctattgaagagataccaagagatgaggaaggggagccactctatgaggaattgatatgccacaaatgctcatctgtctgccatttcttgaaattgtatccagatacaatttgggcttctggtaagccaaatctggcagtggaaactgatgcaagtgactcgaatgtgatgaaaaaaccttcagggcatgctgaccctgagaaacatgaaaatggtgctcttgttgataatacggttggcgagaagacctctgttgagaatgattctacaaaagctattgcagttcctgaggaggccaatttgggtagcagttctggcaacaactgcaagttaggagtggatgtgaatacaatgccagctattacagataaaagtgagccttttttcatgtctaaaggttggagggagacactatgcaggtgtgaaacatgcttcaacttctatgcacaacgaggtattgcatatcttattgacaaggaggattctattgaggaatacgagaagattgccaagcagaagagggagatgaaactggagcagcagcaaggagctgagacaaattttctgaattcacttaatcatgttcagaagatagagatgataagtggcatcaatgacatgaagaatgagtttcagtcctttctggagtccttcgatgcatcaaaaccggtaacatctgatgatatacattcattcttcgagaatcttgctaagaagaagaaacagaggttatcttagcttttgtgaccgcatcggaccctacccgaggcaaccgttctgctggacagaggtcctagtttgttgggctagtaaatgtaatgttatcttaggtggtacttactaatcgggccagtaatgttgaattctagctggaacgcggtaatgtttgatgcaccgaagtcgcttgcagtaggttccgatggcccaagccaccaaaaacctgtttgctccatgaacctcaatcctgttaggtgataatataatatacattgtgttgccaccgtgctttttttcttac

SEQ ID NO: 61968 - DNA, 1593 bp, Zea Mays
tctccgacgattccctctctaccggatcccccccctccctcctcagcttccattccctctcctccgttaattctccgctctccatttattcctttccagttccgccgctccattcccagctcccaccaccaagggcaatccctctccgacatccaatccaatacaatcacgcctgcgcacacgcaaccccagctcaagccccaagtccaaaccctaacccggcggcggaagatatggccgacacggggcgcgacgccttccctgacgaggcggagcccgcgttcaccctcgacgagtacatggaggacatcgaggccgtggagctgattgttgaactttggacaaagcggaagtttcgttgtgattgtggcaactcaaagtttggtggtcacctttgcaaactctgccctgagaaagattatgagaattcagcaaatacttataaccataacttcaaaggttcctattgcacatgtgggcggccttatcctgacccagaagctaaggagcaagttgaaatgatacaatgctctatatgtgaggactggtttcatggggatcatattggtcttaactctattgaagagataccaagagatgaggaaggggagccactctatgaggaattgatatgccacaaatgctcatctgtctgccatttcttgaaattgtatccagatacaatttgggcttctggtaagccaaatctggcagtggaaactgatgcaagtgactcgaatgtgatgaaaaaaccttcagggcatgctgaccctgagaaacatgaaaatggtgctcttgttgataatacggttggcgagaagacctctgttgagaatgattctacaaaagctattgcagttcctgaggaggccaatttgggtagcagttctggcaacaactgcaagttaggagtggatgtgaatacaatgccagctattacagataaaagtgagccttttttcatgtctaaaggttggagggagacactatgcaggtgtgaaacatgcttcaacttctatgcacaacgaggtattgcatatcttattgacaaggaggattctattgaggaatacgagaagattgccaagcagaagagggagatgaaactggagcagcagcaaggagctgagacaaattttctgaattcacttaatcatgttcagaagatagagatgataagtggcatcaatgacatgaagaatgagtttcagtcctttctggagtccttcgatgcatcaaaaccggtaacatctgatgatatacattcattcttcgagaatcttgctaagaagaagaaacagaggttatcttagcttttgtgaccgcatcggaccctacccgaggcaaccgttctgctggacagaggtcctagtttgttgggctagtaaatgtaatgttatcttaggtggtacttactaatcgggccagtaatgttgaattctagctggaacgcggtaatgtttgatgcaccgaagtcgcttgcagtaggttccgatggcccaagccaccaaaaacctgtttgctccatgaacctcaatcctgttaggtgataatataatatacattgtgttgccaccgtgctttttttcttac

SEQ ID NO: 61969 - DNA, 1710 bp, Zea Mays
tctccgacgattccctctctaccggatcccccccctccctcctcagcttccattccctctcctccgttaattctccgctctccatttattcctttccagttccgccgctccattcccagctcccaccaccaagggcaatccctctccgacatccaatccaatacaatcacgcctgcgcacacgcaaccccagctcaagccccaagtccaaaccctaacccggcggcggaagatatggccgacacggggcgcgacgccttccctgacgaggcggagcccgcgttcaccctcgacgagtacatggaggacatcgaggccgtggagctggaggcggatttggtgctgggcggggacgagggcaaggagtgcacctacgccggcggatacctcaagcgccaggccgtcttctcctgcctcacctgcgtgccggatggagtcgccgggattgttgaactttggacaaagcggaagtttcgttgtgattgtggcaactcaaagtttggtggtcacctttgcaaactctgccctgagaaagattatgagaattcagcaaatacttataaccataacttcaaaggttcctattgcacatgtgggcggccttatcctgacccagaagctaaggagcaagttgaaatgatacaatgctctatatgtgaggactggtttcatggggatcatattggtcttaactctattgaagagataccaagagatgaggaaggggagccactctatgaggaattgatatgccacaaatgctcatctgtctgccatttcttgaaattgtatccagatacaatttgggcttctggtaagccaaatctggcagtggaaactgatgcaagtgactcgaatgtgatgaaaaaaccttcagggcatgctgaccctgagaaacatgaaaatggtgctcttgttgataatacggttggcgagaagacctctgttgagaatgattctacaaaagctattgcagttcctgaggaggccaatttgggtagcagttctggcaacaactgcaagttaggagtggatgtgaatacaatgccagctattacagataaaagtgagccttttttcatgtctaaaggttggagggagacactatgcaggtgtgaaacatgcttcaacttctatgcacaacgaggtattgcatatcttattgacaaggaggattctattgaggaatacgagaagattgccaagcagaagagggagatgaaactggagcagcagcaaggagctgagacaaattttctgaattcacttaatcatgttcagaagatagagatgataagtggcatcaatgacatgaagaatgagtttcagtcctttctggagtccttcgatgcatcaaaaccggtaacatctgatgatatacattcattcttcgagaatcttgctaagaagaagaaacagaggttatcttagcttttgtgaccgcatcggaccctacccgaggcaaccgttctgctggacagaggtcctagtttgttgggctagtaaatgtaatgttatcttaggtggtacttactaatcgggccagtaatgttgaattctagctggaacgcggtaatgtttgatgcaccgaagtcgcttgcagtaggttccgatggcccaagccaccaaaaacctgtttgctccatgaacctcaatcctgttaggtgataatataatatacattgtgttgccaccgtgctttttttcttac

SEQ ID NO: 61970 - DNA, 1491 bp, Zea Mays
tctccgacgattccctctctaccggatcccccccctccctcctcagcttccattccctctcctccgttaattctccgctctccatttattcctttccagttccgccgctccattcccagctcccaccaccaagggcaatccctctccgacatccaatccaatacaatcacgcctgcgcacacgcaaccccagctcaagccccaagtccaaaccctaacccggcggcggaagatatggccgacacggggcgcgacgccttccctgacgaggcggagcccgcgttcaccctcgacgagtacatggaggacatcgaggccgtggagctggaggcggatttggtgctgggcggggacgagggcaaggagtgcacctacgccggcggatacctcaagcgccaggccgtcttctcctgcctcacctgcgtgccggatggagtcgccggggtctgtaccgcctgcagcctcgcctgccacgacgggcatgagataccaagagatgaggaaggggagccactctatgaggaattgatatgccacaaatgctcatctgtctgccatttcttgaaattgtatccagatacaatttgggcttctggtaagccaaatctggcagtggaaactgatgcaagtgactcgaatgtgatgaaaaaaccttcagggcatgctgaccctgagaaacatgaaaatggtgctcttgttgataatacggttggcgagaagacctctgttgagaatgattctacaaaagctattgcagttcctgaggaggccaatttgggtagcagttctggcaacaactgcaagttaggagtggatgtgaatacaatgccagctattacagataaaagtgagccttttttcatgtctaaaggttggagggagacactatgcaggtgtgaaacatgcttcaacttctatgcacaacgaggtattgcatatcttattgacaaggaggattctattgaggaatacgagaagattgccaagcagaagagggagatgaaactggagcagcagcaaggagctgagacaaattttctgaattcacttaatcatgttcagaagatagagatgataagtggcatcaatgacatgaagaatgagtttcagtcctttctggagtccttcgatgcatcaaaaccggtaacatctgatgatatacattcattcttcgagaatcttgctaagaagaagaaacagaggttatcttagcttttgtgaccgcatcggaccctacccgaggcaaccgttctgctggacagaggtcctagtttgttgggctagtaaatgtaatgttatcttaggtggtacttactaatcgggccagtaatgttgaattctagctggaacgcggtaatgtttgatgcaccgaagtcgcttgcagtaggttccgatggcccaagccaccaaaaacctgtttgctccatgaacctcaatcctgttaggtgataatataatatacattgtgttgccaccgtgctttttttcttac

SEQ ID NO: 61971 - DNA, 1178 bp, Zea Mays
cgtgcgtggtgcgggtggtttcaaggacgggcaagcgccacgccgctcgctgccgatcccaatccggctacagcagcggccgcccgcctgcggggcctccctccgaccgttccccccgccctccatggcaggctccatggtggaccgcgccaccagcgacatgctcatcagcccggactgggctaagaacttggaaatctgcgacatctgcaatcgcgaccccgggatcctcattcccccttggaaccgattcttggcaatgccaggcgacaacgttggaggcacagtgtggctttgcagcatgctcttggcaccagtggtgtggttcctcatgttcatttcatttcccccgaatagaagtccatttaagccatcaaggagggaatttggtctgatggttgtgtattatgccaagcgaggtgataagcatcacgctcgtgcaacatttgagaacatgagagcaaggggaatagaacccaatgcgtttgtcttcacaagttgctggagatatgcgtggggcactgtcatgcgttgaggaaatgaaatctgaaggcatcgaaatgacagttgttacttatagtacccttatttcaggatatggcaaaactaatgatgctcaatctgcagacaacttgttcaaagaggctaagaccaagattgacaacctaaatggaatcatatatagcaacattatacatgctcactggattgtggctaagttgaattctaaactccagtttgttttgtactatgctgttgcaggaacccatcagaacaaggctttgcttgagagtaatcatgctacaaaggatgccaatgtagcttatgtttttggtcaatctatcgcgatcagtgcgagaggtgagaggcctgaagattgggttccaccagaagatgtttctgctgtttattacgccaaatgtgatgacattgacgagacactccctatgggtgctgacgggaacgatgggattgtagacatcttctctgcacattcctactacgatgcagcaggtgaaatggtatattctagcatggatggcttgatgaaccctcaggcaaacaccgatgctcaggcaaatacatgctaccaatcaatacagacagagcttcaaggtgggatgaacctaaatggcttaaagctgggctttcctgctatttttggctatcacatatag

SEQ ID NO: 61972 - DNA, 1175 bp, Zea Mays
atgggaccgggactgcccttttgacgcggagcggaacccacaccacaccacggcggctgcacgcgcgcgccaccaccaggcaccagccaccagatcccggcgtcataaaattccccgcgcggccgtgcctcccaccagccacctctgctcactcagcttccttccttcctacacaccaccaaccgaaggccgcgcgcgccatccagccatgggcaactgcctgaacacggccgccaagcggggtcaccgcggcatgcttctgccggaagaggaggagagcctctcggagatgagaaggataagccagctgctgcgggaggaggaggaggagatggtggccgtagctccggcggagggcctcaaggtgaaggtcgtgctgacgcgcggcgagctcgagtggctcgtggcgcagctcaagggcggcgagcggcgcctcgaggacgcgatccaccacatgcaggccgccaaccacgccaagggagtcggcgacggcggctggcggccgtgcctcgagagcatcctcgagtgcccggagacccagagctgatgagctgctgaggccggccacgctcgttctctccttaaatactagtataattcagatcttgtccgcgcgtggtgcatgtagtaggttcttgctctctcgtcgctcgctcgctgcttcgaatggatatggatccatggatcggatcatcggaatcatattggagggagaggcttttgctccgctgtatgaatatcattagtagctctttttgtagatagtggtgagaatgagatggcatctaaaaagccatctctgtgtctgcctgctgtaatctcctctcaccaggccatgaatctggttcttcctaagcacccctgcgtgccggctgtgttcactttagcttggaaccgcgagcaacacatgaacgaagatgaactttggtgtgctcgctccagtctgccctgctgctgttaggccagtatatcagtaggacattaacgtggataatgtttagtcctgaatacaaataattgatttagtacctctgccatatttgtatagagtccactctttaattattttgatgtcccctgcatgatgatggacaggcggtgcaccgtatccaagcgacggctgcgccggagcttgtcgtccatagcggcacatgtaggcacgtaggactacttcc

SEQ ID NO: 61973 - DNA, 394 bp, Zea Mays
cacaaccagtcgaccacggcaccaccatcatgcggcgaagaccgaagaccgaagaccgttagcgccagcgggaagcttcgttgcatttctcccccaactccacccgcctaccccgccccgcctcgaaggggaaagggcactcccgcgcccccaagtcgaaacgcaaggacagtttgcttaccggttttgtgttcttacttggttgtgattataatcacccgagaccttgtcgtatgtggatatcatgcttgaagatttgatatactcgtgttagcagctaaattcgaagaaaatggtgatgggaagagaggacaaatatgtgaggttagccatcccctgttgcttgacaagttgagtacattattttgttgaaaaaaaaaaaaaaaaaaaaaaa

SEQ ID NO: 61974 - DNA, 364 bp, Zea Mays
ctttcccccgcctgcctgccacaaccagtcgaccacggcaccaccatcatgcggcgaagaccgaagaccgaagaccgttagcgccagcgggaagcttcgttgcatttctcccccaactccacccgcctaccccgccccgcctcgaaggggaaagggcactcccgcgcccccaagtcgaaacgcaagtttgcttaccggttttgtgttcttacttggttgtgattataatcacccgagaccttgtcgtatgtggatatcatgcttgaagatttgatatactcgtgttagcagctaaattcgaagaaaatggtgatgggaagagaggacaaatatgtgaggttagccatcccctgttgcttgacaa

SEQ ID NO: 61975 - DNA, 1197 bp, Zea Mays
tttcgaactacgcatgagagctacgttagagagagagagagagagagagagagagagagagagagagagagacgacatcacactaccattgcacatattggagattggagctttgatatatcacaggatataatggatgggccccacaacaagactaatgaaatttcaggactggagatcagagcagtctgttagttcagagaacatagttgctccacatagagatgatgtttcattattcagttcacttaaagaaaggactgccacggtttttacatttctaggaaatattttgcacacagaaacctcaaataaatcaatgctcgatgaaagaaagtccacaacaggaacacttcatcctcaagggccatttctgcaaaaatggaacaggatatttgtgatatcatgtatatttgcagtttcagtggatccattgttcttgtatatcccagttatcaatgatgaaaaaccttgctggtatttggatagaaagttggaaaaggcagcaagtgtcctgcgttttttcacagatattttctacatactccatatcatatttcagttccggacaggctttattgcatcatctcatacaacctttgggcgaagtgtcttaattgaagatagatatgcaataacaaagcgctacttatcaacatattttttcattgatgtctttgctattctacccatccctcaggttattattttggtcgtgctacctaatcttcatggctcgaaggttatgaaagccaaaaatgtgttaatgcttataattatatgccagtatgtgcctcggctaatccggataaggccactatacctccaaatcacaaggtctgctggtgtaattacagagacagcacgtgctggtgctgctttcaaccttttgctttacatgcttgccagccatgtccttggagctctttggtacttgctttctattcaacgccaagattcctgctggagacagtattgtagaggcaattcgacatgtgatcctgcatatttgtactgtggagattatgataaggatgggaaaaatgctttcttaactacaaattgcctactaagtaatcagtcaaaccttccagatccgtactttgggatttatgcaccagctataaaaaatgtatcgcgatcaaaaagtttctttgcaaattgttctctgtgtttgttgggtcttctaaattctta

SEQ ID NO: 61976 - DNA, 630 bp, Zea Mays
cttttgctacctggggcacctttgaaggatgcagagtcccagaaagatgttgggaagggtgataaatcaggggataaaggaactgctgagaagtttgcaatatatcagaagcatcgttcttcgttggcagacattgttcagttcaggaggccagctgctccaacttccagtgtgaatgctgatattgtgggaacatccactctgcagtctgcatctctaccgaaacaagaatcctcaacagctacatccaagagctatactttcagagaaggctgttatatttccatagctgaatcacttcgcccagacttttctgctggtgaagaagttgagaggctagctatgaccgagctaatagaggtcatttcagaagagaacaaatctggacctctgattgtgttacttaaggatgtagagaaatcattcattggagttaccgagtcactttcatctttgcggagcaaatttgaatcgcttccatctggtgttcttattataggatcccacactcagatggacagccgcaaagaaaaggatgaggctctacttacagattggaagcagcagttggatcgtgatgttgaaacccttaaagccaaatcaaacattggtagcattcgcacgcattga

SEQ ID NO: 61977 - DNA, 921 bp, Zea Mays
gaacaatctcgtgcggtgcctcttgagccgactttccttcctcgcagatccacacaaagattacaacacagtcccctccgtcctgccgccaacccaacccaacccaacctaacctgagtacctgacccagcgactgaactgtggagctgcgggagacggggagagactgacggactgacagtcgaggtcgcggtcggaaacagacagacatactgaaccgattccgtggtggcggatggagtgggacgacgactgggtggcccccgacaagctgcagcacgccgtggcctgcctcctcatcgccctgctctccgccgcgctcgccgcccgcagcgcccgccctggcctccgccgccgcgctgcggctgtcggctccgcggcctcgctcgcggccggcgccgccaaggaggccgcggacgaggcccggctcttcggctccgccggcgcctcgcccaaggacgccgcggccgacctcctgggcgtcgcggccgcggcgctggcgctcgccctgctccgccgcctgcgccgccgtcgcgagaggaaggcgcgcgaggacggggacggggacggccgcggcggcgccgccgtctccatggtgtgactgtgacggcgagggcttgaaaaaaaaacggaagctcacgaactgcttggctcaaagcggctcgcgaggctcaaacaagctgagtcgaactggattttcaagctcgttgatgtagcaagctgagtcggcttgttttggctcatgagccgactcgtaaactatgtcaaattaagatcaacttcaagagactagttatatgggtttttaaaggtaaatttagctatatctaatagattttgtaaatgactcttcaaatttagtggctctctattcctccaccttcgctctctatttttggataacctgcttcactctccatt

SEQ ID NO: 61978 - DNA, 5022 bp, Zea Mays
aggtatttctacattatattcatgtctatcctgttaaatccacatgtgcacattcctattgtcgctaattgtttaatatcaatgcaccgactacaaatcaacatcaaacgacataatgtctaccactagatatatctatcatttttgttttatatttatgtatttctacattatattcatgtctatcttgttagatccacatttgcacattcctgttgtcgctaattgtttaatatcaaatttttggattaaaatacaacttgaaaagtttagcttctaacgatccaaaaatgctaaggacttttttggcaattgggtttatgagtatgttaaaaccaaaggtttttaagggtatacactataaaaggtggtgtcaaagatgcatattacgattgacaatcatgcattgctattttgttatcgaacctaaatcacctggaccacacactaccgaagaggattgtatgttccaggatgctaatattgcatgtgttcaaagggcaataattagcatgctaggagattctatagtagactcatacgtgatgatgtcaaaacatgggatggaatagaagccaaataaggggtgtttaacgtcagtaataagttgtgtgtcatggagcaataccatgactactaaatgattgatggtcattctatagttgaacaagttcatgaaatatatgtacttgcgaaagaactcgagaattttggttgtacattgcttgagaagttcgtggcgtgctacatcattacaaagatgtcatagacttagacaaattttgctacctctttaaaatataagagacacgagtttggcatcaccgacctcattggctctttagatattcaagagaaggtgagagcaaaagatcactatggaaataaaagtgttgaggggacttctagtgcccatatgataaaaaaaatccccaaaaccccacaagaagtttaagtaagagctcaaccaaaagaataccacaccttttaagaagaaaaagaacaataaaaggcaactatttgactatggcaagatcaacattattcaagggagtgtccggatgccaagtggaagttgaataagaaatatgcaaatgtgattgaggttggcagaaaaactttgaggtatggtaatgtattacctactatttttccatttgtcattcacctaaatggtgggttgacaaggggggccaatattcatatgtgttgatatttccttgttttcttcttatcgggtcaagagaaattcctccttgtcgatggggaaaggggcgcatgcgaatgttcgtggtgttggtatggtcgatctgaatcttacttcgagaaataccatacaactaaagaacgtgcaacatgtctacttgataagaaagaatttaattagtggttcattactatgtcgagatgtccataaacttgtgtttgagtctaataaatgtataatgtccaagtacaaaacatttattgataaaggatatgagagcgaaggcttattctccttatctttatttcaatgcttgctttaaatttgtgaaccatgtgagccatgaaagtaagacaaatatctagtattcacgtttatgccatataaactttgatcgcatgacatgattaaaggtatgagtttaatcctgaaatttgatttggtcaaaggttctaagtgccatatatatgtgcaatcaaagcaacctcacaagccttacaagcctaatctagcgaagaacttggcatcgttagaaccaattaatttcgaattatgtgaaataaatagcgagttgaccaaaggtgacaaaagatacttcttgacattcatagatgattgcactagattctgttatgtgtacttatcaaaaatcaaaaaatgaagcattacatcattttaagatctataatgttgaggtagaaaattaacttgagaataaggttaaactattaaagtatgaacatgggggataatatttctcaaaagaattttccgagttctatgcggagcatgatattattcatgagaggacattgtcatactcaccacaatccaatgggattgcggaaaggaagaactacaataacgatagtgtgtcatatcctaaaaaagtaacaacaaatgacaagggaattacatcattcgatgaatgaaagaaaagattgaatatctcttatctatgaacttggggttgcttggccaaggtgaatgtgtcattcaacaagaagcaaaagcttggacgaaaaatctattgaatgtgtctttcttgggtatgcttctaacattgtggcttatatatttttaataatagactctagagtacctgagctgaatgttggtgcaattatggaatctagagatgctatgcattttatacctgagatacctaaactagtaatacatgctgactttgaaacccatgtggaaaatctagaggaggatactactatagtcactcaaaaaagtaagttacagaggaccacaaagtcttttggtgatgattatattatataccttatgatactccaaaactatagaagatgcatattcagctcttgatgctaacttgtgaaaggaagtttgtcggtattttgaacctcgctccgacaagtatatttctgtgtgcatgtctgggcttctcaagatttatactagttcgggcagaatgtccctacatccggtcatcggtagcttgcgctaccagcaccactgctgatcaatgctggtagtaggagttacaagcgggcaagagagggattagagactcacaggtctctttgtggtggaggaagtgaagctaagggctacagagtggagtcctaactaagtcttaaatcgacggcggggctccgacctcttggtcctcgtcggtgcgtcctcctccctcccgtcagtccatcatctttgcgtctgggtgtgtgtctgggcgtcttctcttgtctccttcctttgggtccttcaggacatctcgtgtgtccctttctagcgaatattgaattagggtcaccccgctcggcccccttcatatggggaccgacctcctccatttataggccaaggagggggtcggttagtggtggcttcctaaaaaaaggagtcatcgggcgatggtaaaactgagtgttctatcctaggaagccatgtccgctcgtgggccccgaggtcgcctggttgtctcgtgttctttatagtggacgtcgcaggcagagtggggcccgagcgccatcattcgagctacgccgacccctggcctccgtagcctggggctcgacgcagcttgtcttgttctgccgtgcaagcagtttgcgtactcaggcctagtcatgataagtcatgagtgcaccacaggccggggggtgcacgggtcataaatgtgccacggtctgaggggttcgtaggtcatgagtgtgttgcagcccgagggcctcataggccatgagtggaaggcagatcggcgcctctgtcgtggctcagtaccaagtgtagttaatgcgtccggtcacttatgtcgggtcagtctcgggccgagagagggatccactcgagtgatttcccttcggttcgctcgccccctgtctgggttctgccatgcccgaccctaggctcgatggcgtggggtttgtttggggtaggtgcttccagggtagacgtttcctttcctctagctgaccgacgagccctagttgctagaggcttttcttgcctagtgtgctcgctggccgatgggccctagggaccagggatcttatcctcgaaaaagttgatcatagtaaaatggactcaattatggccaatggaacttgggatcatccttatgggtgcaaacctatgggatgtaaattgtgttcaagaaaaagcttaggtctaatggaactattgagaaatacaaggtgatgcttgtagccaagggttacaccaaaaatgaaggtgaagattactttgatacttattaattagttgttcgtctaatgaccatacatatgccactttccgtggctgtctcacatggtcttatcgttcatcaaatgaacgttaaaattgctttcctaaatgaagggcttgaggaggagatctacatgaatcagcttgatagttttgtagtaaatagtcaagattgaaaggtgtgtaaattattaaaatctttgtatagcctacaacaagcatctaagcagtgacacaagaaatttaataaagttttgacgtcagttgaatttattgtgaatgagttgataaatgtgtttattattggtttggcagaggagaaggtgtgatcttgtgtatacatgtggatgatattctaatctttagcaatattactaatgtgattgaggaagtgaaatacttgttgtctagtgactttgaaatgaaatatttggaagaggttgatgttattcttaacgtaaagctattgagaaaaggagtaaatggtagggttactcttgtacaatcctattatatggaaaaggtactgagtcgctttggatatagtgatggtagaccttctctaactctttataacacaagcatgctattaaagaaaatcacaaaataacacaggatcaattgagataacctcaaattattgttcctctcgtatatttgactagtgcagtgagacctaacatctcgtttgttgtgagcaaattcagccagtttgtttccaactcgagagatgatcattggcatatgcccttgagagggtatcgcactgtctattactaactgagttatgaaatccactataccaggtatccaatagtaatgaagagttattgtgatacaaactagatatctgatgccgttgagatttatgccacaaatggatatgtgcctcacttggaggcagcattatttcatggaagtcttgcaagtagaccatcttaacaaggtcaaaaatagaagcataactcaaaacattagatactgctatagttgaagctaagcagcttcataaactccttatggatttactagtagttgaaaaactgatgttggctatctccatgaactatggtaattagacaatgatattcaaa

SEQ ID NO: 61979 - DNA, 437 bp, Zea Mays
tagttttgtgctattgttgatggtgttaagtgccggtgggctcggccttcttataagtctaaggtgtccgaatgctacgacaaggaggtttccgaacatttcaaggagtctatgatgaggttttttgaggacgaaactgagaaggtgaaagggttcacgtcagaatccaccgtcagctacagagaccggctcaagatcatggccgggctggtcaaccggacgacctccagctgggctctacggagaggaagctcgtccaggcgtacaacgagaagccagtcctctcgcggccccagcacagcttctacgagggagaggactaccttgaggtggaccttgacatccaccggttcagctacattgctaggaaggggctggattcgttcagggcacgcctcaagaacggcatcctcgatctggggttaacgatccaggtc

SEQ ID NO: 61980 - DNA, 2763 bp, Zea Mays
cttctcgtccccgaaagcccattagcccaagcaggcttctccgactcccgtcccccattccgtccgccaccgccttccccctccctcgaatcattcgattcgcctcccgtcgtctcgtccgcctgattctactcggccgtcacggtgatcggagccggctagggttagggttccgtacttccgttgatctccacgcccatggtgcagctgccgagctccggtaagcggcacgcggaaccggccgagcagacgatggctccggcgcggcgcgcggcggcggtcaagctggaggtggaggagctcggggccaacgagcgcggcccgctcagcaagcgcgccaggccagctcagccgatgcccccgacgcctccgcagccgcagcaggatatgtaccacaatgtacttgatgaacctagcccattgggtctgcggctgaaaaaaagcccatcactcttggatttgattcagatgagactttctcaagcatccaacgctggggagtcttccatggacaacagtggttctgagccttccaagaagaaagacagtaaatccggtgtgtcttcagcaggcgaacggctaaaagcttcgaattttcctgcaaatatattgaagattggttcatgggagtatgtctcacggtatgaaggtgatttggtggcgaagtgttactttgcaaagcataaacttgtgtgggaagttctggaaggtggccttaaaagtaagatagaaattcaatggtcagatattgctgctttgaaggcaatttgccccgaaaatggccaaggaaccttggacgtggtgttggccaggccacctcttttctttaaagagacagatccgcagccaaggaaacacacactgtggcaggctgcctcagatttcactggtgggcaagcaagtatgcacaggtgaattacttctaattattgagtgttcataattaaaatagatttcatacgagaagattgctcctatatatctggcagtacctcatacaatttgttactattatttctgttggagtataatgcgtagcttatctgctttatgtttagaggctctggtagcattcggaagatattgacagtgtttacctaggttctgtagtactatgtgccacatgatttttactttatcgttccatatttgtggcctctggacgcatttcaagatatttatgatgtttacttggggttctgtagtactatgtttctggctttttatttgttattagaacagaaagaactgtttgccccttttgggagcaattgggtactgagggaccagttatttagttgtggatcactttgacttgagttgtatcatatctggattctatctgcttaggagtcacttataaattcaagaagataaggagacattgtcaccctttctagtaaaaaaaaaactcgtctctatatcctttatgttctgtcacccattcttctattgttacatactacgtacagttattccctcagtgcacgtatgtgcatcacaggacctcatctggtctctttttgggccctaaaaattatgaatacaatctgttacacactgcataagaggaaggaaaaaaagaagctggcatgcattcaaatatagctttctggagccaggcggcattttctgcagtgcccttcaaccttgttaagcaagaattttgagaagcttattcagtgtgatcagcggttatatcaattgagtcaacagccagagatcacattagaccctacattgtttgaacctaggtgcacaatatttgaggatccggttgaatcaaaatgcgctggttttactaatttgaaagatgaacatcgggctttgcctggctattcagattcggtgtcaccatgtgccggttcctccatatctgctaagaaagaaaacaatgattccataagaatgccagcagaatatcctcctcagacagtaggaataggtgcacaagctgtcagcagaaatgtgaatggtgcagcaccagaattcaatatccccaactggtggagtcaattgaaggtgcctgggcttagaccatccatgtcagtggatgatctggtcaaccacctaggcaactgcatctcagagcagatcacttcaggcgatccggcattggccaacaacgaggtgccaaccaaagaaacactcgaggggattgctcagtaccttcttggtgacacacaaggcccgccggttactgctgcagtcgagagatcactgatggccagggtggactccctctgctgtttgattcagaaagacacagcaccagttgccaaaccaaagcccgagccaaatgacggggacagcatcggcgtggaagcctcagatggttccgacgaagaattcacctccgcgccaacagggaaacctacagatgccaccaacccgccagccatgtcaagaaaggattcgtttggagagctgctgacaaacctcccccgcatcgcctcgctaccacagttcctcttcaagataccagagggtactgagaactgaacgtggaagttaagatccctggaataggtagtttgctgtaagcctgtaaagattgtatccaagcaataagaaagccccttatcacctcctcggaggcgtgttccccgctctgtaaatttgacaccggtaggttgctccagttgtatgttttgcgaatcatgggtagtggaaaattgaaatgttcattggttctttaactcaatcgtgccccattccaaactgcttaagggggcgttcggttctctcggaacggtgaactgg

SEQ ID NO: 61981 - DNA, 2103 bp, Zea Mays
cgaccccacaagtcatccaccagcgccgccggcggcggctatttctggacccttctcgtccccgaaagcccattagcccaagcaggcttctccgactcccgtcccccattccgtccgccaccgccttccccctccctcgaatcattcgattcgcctcccgtcgtctcgtccgcctgattctactcggccgtcacggtgatcggagccggctagggttagggttccgtacttccgttgatctccacgcccatggtgcagctgccgagctccggtaagcggcacgcggaaccggccgagcagacgatggctccggcgcggcgcgcggcggcggtcaagctggaggtggaggagctcggggccaacgagcgcggcccgctcagcaagcgcgccaggccagctcagccgatgcccccgacgcctccgcagccgcagcaggatatgtaccacaatgtacttgatgaacctagcccattgggtctgcggctgaaaaaaagcccatcactcttggatttgattcagatgagactttctcaagcatccaacgctggggagtcttccatggacaacagtggttctgagccttccaagaagaaagacagtaaatccggtgtgtcttcagcaggcgaacggctaaaagcttcgaattttcctgcaaatatattgaagattggttcatgggagtatgtctcacggtatgaaggtgatttggtggcgaagtgttactttgcaaagcataaacttgtgtgggaagttctggaaggtggccttaaaagtaagatagaaattcaatggtcagatattgctgctttgaaggcaatttgccccgaaaatggccaaggaaccttggacgtggtgttggccaggccacctcttttctttaaagagacagatccgcagccaaggaaacacacactgtggcaggctgcctcagatttcactggtgggcaagcaagtatgcacaggcggcattttctgcagtgcccttcaaccttgttaagcaagaattttgagaagcttattcagtgtgatcagcggttatatcaattgagtcaacagccagagatcacattagaccctacattgtttgaacctaggtgcacaatatttgaggatccggttgaatcaaaatgcgctggttttactaatttgaaagatgaacatcgggctttgcctggctattcagattcggtgtcaccatgtgccggttcctccatatctgctaagaaagaaaacaatgattccataagaatgccagcagaatatcctcctcagacagtaggaataggtgcacaagctgtcagcagaaatgtgaatggtgcagcaccagaattcaatatccccaactggtggagtcaattgaaggtgcctgggcttagaccatccatgtcagtggatgatctggtcaaccacctaggcaactgcatctcagagcagatcacttcaggcgatccggcattggccaacaacgaggtgccaaccaaagaaacactcgaggggattgctcagtaccttcttggtgacacacaaggcccgccggttactgctgcagtcgagagatcactgatggccagggtggactccctctgctgtttgattcagaaagacacagcaccagttgccaaaccaaagcccgagccaaatgacggggacagcatcggcgtggaagcctcagatggttccgacgaagaattcacctccgcgccaacagggaaacctacagatgccaccaacccgccagccatgtcaagaaaggattcgtttggagagctgctgacaaacctcccccgcatcgcctcgctaccacagttcctcttcaagataccagagggtactgagaactgaacgtggaagttaagatccctggaataggtagtttgctgtaagcctgtaaagattgtatccaagcaataagaaagccccttatcacctcctcggaggcgtgttccccgctctgtaaatttgacaccggtaggttgctccagttgtatgttttgcgaatcatgggtagtggaaaattgaaatgttcattggttctttaactcaatcgtgccccattccaaactgcttaagggggcgttcggttctctcggaacggtgaactgg

SEQ ID NO: 61982 - DNA, 955 bp, Zea Mays
atcagtgcaacagaatatccctggacctgtatttttgcctcatactatgtacttgaaggaagtaaaggcacaccctttgaaggtggatattactatgggaaactcaaatttccaccggattatccttttaagcctccaagtatcagcatgacaaccccgagcggcagatttgcgccacacaaaagaatatgcttgtcaatgagtgactttcatcctgaatcttggaatccgatgtggtctgttgcaagcattctcactgggcttctgtccttcatgatggacgatgcactgacaactggaagcatcaagacatcagatgcagaaaagaggcgtttagcaaaagcttcccttgtctacaattgtgagagcaaaaactgtccgcacttcaggaaacttttcccagagtatgttgagaagtacaatcaacagctacaattggagaacactgctgcagagccggtgcctcaggagaatcctgcacctgctccatcccctgctgtccagcaagccccgaccgtggccaatagggcacaaccactggcggaggcgcgccgtgacaagaaccagaagaaggcggtgcccttctggatggtgctggtcatgttttcagttttcggggccgtgatggcgttgcccctaatgcaactttgacaataataaagacaataagaacgtgtgatgccagggccgtaattttgtatagttttccattggtttgtctgagtgactcagttggtcccctagactacctaccacctcggagtcgtattgatgaacctgtgatggtatatctgaagaacttttgttctcagttctcactcttgagtagcagcgccagaaggtccttcgtttttgctttctgtttccgaaatcgtttttttgggttgcctcccagtccgtctttgcgatgtgtgctgacttcaaggttgagttcacattttcacatcctctttcc

SEQ ID NO: 61983 - DNA, 2121 bp, Zea Mays
tctatcgtgatttcttttattcgttccgagttctgacgatttcgtagacggatacggaatacgcatattgtcaactgtgcgtattttcagtctgtagaagccatcttttaaagaacattttgggcagaaattgccagtagcatttcttgtggttaacatggacttctcagctggttcctacttctcatcatggcctatcaattctgcttctgagagctacagtttggctgatggttcagcggaatcatatggagaaggaagcatgccaccgtcaacctatttcatgacagctagatcagatcacaatttaaatttcagtgtgcatgaacaggattccactatgcttccaaacgaacagttgacctatgctggtgctggccagattgatctattacctgctgagactctatctagggataagcttcctgaaaatcttctggagcttcaaggacttcagaatatcagcaacctacagagtaatttagtggccccaggggtgtttcagcacaatttaacacctggggtctttcatccacagttgaacactcctggactttcagaactgcctcatgccttatctagttcaattgacagtaatggaagtgaagtttctgcttttctcgctgatctaaacgctgtttcttcagcgccaactttatgttccacattccaaaacgcttcttcgttcatggaaccagtgaatctagaagctttcagtattcaaggcgcacaaagtgattgtgttttgaacagaacaagtcatccgaatgggaatatctcagatagcaaggagtttatcagtggtagtctcccttcttttgctagtgtccaggaaacaaacctagctgctagtggcttcaagactcagaagcaggagcaaaatgcagtgtgcaatatccctactttcactgcacggaatcaaatgtcagttgctgcaatgcaaggagcacttgtccctcaaaagattccttcacggatcaatgataataaaagtgagggtcctgttagccatccttctgatgtacaaactcaaccaaattcagctgttaatggtgttggtgtgaaaccacgagtaagggctcgtcgtggacaagcaactgatcctcatagtattgctgaacggcttcgcagagagaaaatttcagataggatgaaaaatctgcaggatcttgtcccaaattccaataaggtactttttttggagggtgggggtgggttgacttgtctggtgcatactgcaggcagacaaggcatccatgctggatgaaattattgattatgtgaagtttcttcagcttcaggtcaaggtcttgagcatgagtagggtaggagctccaggagcagttcttccccttctcacagaatctaagactgagggttaccacggccaacctctgccacaaggattactggacgcactagactcggaagacagcttcgtcttcgaggaagaggtcgtgaagctaatggagaccagcatcaccagcgcgatgcagtaccttcagagcaaggggctctgcctgatgccagtcgcccttgcttccgcaatatccacccagaaaggtgtgtccgctgctgcagtccctcctgaacggtgagataaagacacgctcctcccccatgagcacgaggaaacagccgcagatgacagaactcagacggctgaagaatgcagcaatgcaaagcccgtagagtgcagcataggaagttagtctgtgaccagagcgcatggcctcgtctactaatttcgctctcagaatcagctttttttttcgtacctattgcgcatcagttgattttgcctttttgccttctctcttttctttttggccgtatttcatcaggttgcatataaaaaaaagtaaaatctactggttctggcgttctgctatatgggatcttgtgatcaggcatctccaaagtgatcctcttgcccggctgtcagtttgttagctgtagccatctactacctcagtttgaaaaactgagtttatgagctgccccaagaaacctacttagctttgctttgttgtcatggccatgcaatgaatttggctgcctcaaactttgaacaaactagaagtgtaagcaattagaatgaacaacaacaaaaaaacattc

SEQ ID NO: 61984 - DNA, 2109 bp, Zea Mays
cccgttctctcgagtctcgacctctcctctcctctcctcttctcaggtctcacctgagtcacacctccacagacactgagacacacacatacgctatctctcatcgtcctccactcccggcaacggaagtttcactgctgccctcatctaactccccgtctcactgtttggctgatggttcagcggaatcatatggagaaggaagcatgccaccgtcaacctatttcatgacagctagatcagatcacaatttaaatttcagtgtgcatgaacaggattccactatgcttccaaacgaacagttgacctatgctggtgctggccagattgatctattacctgctgagactctatctagggataagcttcctgaaaatcttctggagcttcaaggacttcagaatatcagcaacctacagagtaatttagtggccccaggggtgtttcagcacaatttaacacctggggtctttcatccacagttgaacactcctggactttcagaactgcctcatgccttatctagttcaattgacagtaatggaagtgaagtttctgcttttctcgctgatctaaacgctgtttcttcagcgccaactttatgttccacattccaaaacgcttcttcgttcatggaaccagtgaatctagaagctttcagtattcaaggcgcacaaagtgattgtgttttgaacagaacaagtcatccgaatgggaatatctcagatagcaaggagtttatcagtggtagtctcccttcttttgctagtgtccaggaaacaaacctagctgctagtggcttcaagactcagaagcaggttatttatataaacagtgccattaaagagaatatctgaactgcatcttactgttaatttgaactgtgccagtaaaactcaactttcatactgcaggagcaaaatgcagtgtgcaatatccctactttcactgcacggaatcaaatgtcagttgctgcaatgcaaggagcacttgtccctcaaaagattccttcacggatcaatgataataaaagtgagggtcctgttagccatccttctgatgtacaaactcaaccaaattcagctgttaatggtgttggtgtgaaaccacgagtaagggctcgtcgtggacaagcaactgatcctcatagtattgctgaacggcttcgcagagagaaaatttcagataggatgaaaaatctgcaggatcttgtcccaaattccaataaggcagacaaggcatccatgctggatgaaattattgattatgtgaagtttcttcagcttcaggtcaaggtcttgagcatgagtagggtaggagctccaggagcagttcttccccttctcacagaatctaagactgagggttaccacggccaacctctgccacaaggattactggacgcactagactcggaagacagcttcgtcttcgaggaagaggtcgtgaagctaatggagaccagcatcaccagcgcgatgcagtaccttcagagcaaggggctctgcctgatgccagtcgcccttgcttccgcaatatccacccagaaaggtgtgtccgctgctgcagtccctcctgaacggtgagataaagacacgctcctcccccatgagcacgaggaaacagccgcagatgacagaactcagacggctgaagaatgcagcaatgcaaagcccgtagagtgcagcataggaagttagtctgtgaccagagcgcatggcctcgtctactaatttcgctctcagaatcagctttttttttcgtacctattgcgcatcagttgattttgcctttttgccttctctcttttctttttggccgtatttcatcaggttgcatataaaaaaaagtaaaatctactggttctggcgttctgctatatgggatcttgtgatcaggcatctccaaagtgatcctcttgcccggctgtcagtttgttagctgtagccatctactacctcagtttgaaaaactgagtttatgagctgccccaagaaacctacttagctttgctttgttgtcatggccatgcaatgaatttggctgcctcaaactttgaacaaactagaagtgtaagcaattagaatgaacaacaacaaaaaaacattc

SEQ ID NO: 61985 - DNA, 3032 bp, Zea Mays
gccgcctcccgttctctcgagtctcgacctctcctctcctctcctcttctcaggtctcacctgagtcacacctccacagacactgagacacacacatacgctatctctcatcgtcctccactcccggcaacggaagtttcactgctgccctcatctaactccccgtctcactgcatattgtcaactgtgcgtattttcagtctgtagaagccatcttttaaagaacattttgggcagaaattgccagtagcatttcttgtggttaacatggacttctcagctggttcctacttctcatcatggcctatcaattctgcttctgagagctacagtttggctgatggttcagcggaatcatatggagaaggaagcatgccaccgtcaacctatttcatgacagctagatcagatcacaatttaaatttcagtgtgcatgaacaggattccactatgcttccaaacgaacagttgacctatgctggtgctggccagattgatctattacctgctgagactctatctagggataagcttcctgaaaatcttctggagcttcaaggacttcagaatatcagcaacctacagagtaatttagtggccccaggggtgtttcagcacaatttaacacctggggtctttcatccacagttgaacactcctggactttcagaactgcctcatgccttatctagttcaattgacagtaatggaagtgaagtttctgcttttctcgctgatctaaacgctgtttcttcagcgccaactttatgttccacattccaaaacgcttcttcgttcatggaaccagtgaatctagaagctttcagtattcaaggcgcacaaagtgattgtgttttgaacagaacaagtcatccgaatgggaatatctcagtatgtgacagtgctgccttggcatcactacatgatagcaaggagtttatcagtggtagtctcccttcttttgctagtgtccaggaaacaaacctagctgctagtggcttcaagactcagaagcaggagcaaaatgcagtgtgcaatatccctactttcactgcacggaatcaaatgtcagttgctgcaatgcaaggagcacttgtccctcaaaagattccttcacggatcaatgataataaaagtgagggtcctgttagccatccttctgatgtacaaactcaaccaaattcagctgttaatggtgttggtgtgaaaccacgagtaagggctcgtcgtggacaagcaactgatcctcatagtattgctgaacggcttcgcagagagaaaatttcagataggatgaaaaatctgcaggatcttgtcccaaattccaataaggtactttttttggagggtgggggtgggttgacttgtctggtgcatactgcaggtattaaatttggacatggaactaattatcaaagctttgctacttatatacgtaacaagaacatgtattttctagttgtggcttgaaaactgaagtgacaaatagaagggagcagcaattaaatttaaggttctttgggatttgcgtgaaagagcctctagttgagttgattaggtggtctgagtatctcggccggggagggaaagaccgtcctcctggtattatattaagaagagaccgaaacatggtcccggccaataaacccccgaacatcatcactaacgggttgatcaactgcccactctgcaacggcccagatggagggtggcacgcaggatatcgatcccccgagagcgggcgggatacaacgaggagatttttttaaccaagtccaaaatttgcccactcggaagccttaaccattacgctagaggccctttcgcaggtggtatgagtaacactccttaggttctgagtttgggccaacaatagtcattacgtattttgccattggctcagttccaccccgatgaagcttcaaagacaggttttgtgcttgtttgtttggattggatgtattaaatgctacattccaacgaaacatcatttatccaattccaaattccttgttcctgttgatgcggagcttgtttaatgcatggctaaaataccatagcaaggaagacaacagtcttacctttcattaaagaggttcatttgtttagttctcttaataatatggagtggcaaatcttttggtgcaagcaggcagacaaggcatccatgctggatgaaattattgattatgtgaagtttcttcagcttcaggtcaaggtcttgagcatgagtagggtaggagctccaggagcagttcttccccttctcacagaatctaagactgagggttaccacggccaacctctgccacaaggattactggacgcactagactcggaagacagcttcgtcttcgaggaagaggtcgtgaagctaatggagaccagcatcaccagcgcgatgcagtaccttcagagcaaggggctctgcctgatgccagtcgcccttgcttccgcaatatccacccagaaaggtgtgtccgctgctgcagtccctcctgaacggtgagataaagacacgctcctcccccatgagcacgaggaaacagccgcagatgacagaactcagacggctgaagaatgcagcaatgcaaagcccgtagagtgcagcataggaagttagtctgtgaccagagcgcatggcctcgtctactaatttcgctctcagaatcagctttttttttcgtacctattgcgcatcagttgattttgcctttttgccttctctcttttctttttggccgtatttcatcaggttgcatataaaaaaaagtaaaatctactggttctggcgttctgctatatgggatcttgtgatcaggcatctccaaagtgatcctcttgcccggctgtcagtttgttagctgtagccatctactacctcagtttgaaaaactgagtttatgagctgccccaagaaacctacttagctttgctttgttgtcatggccatgcaatgaatttggctgcctcaaactttgaacaaactagaagtgtaagcaattagaatgaacaacaacaaaaaaacattc

SEQ ID NO: 61986 - DNA, 2337 bp, Zea Mays
ctccaatcttcgcccccggcaagcaataccgaaaaagccactccttttccttctccgcgcaaagccccaaaccgccgcctcccgttctctcgagtctcgacctctcctctcctctcctcttctcaggtctcacctgagtcacacctccacagacactgagacacacacatacgctatctctcatcgtcctccactcccggcaacggaagtttcactgctgccctcatctaactccccgtctcactgcatattgtcaactgtgcgtattttcagtctgtagaagccatcttttaaagaacattttgggcagaaattgccagtagcatttcttgtggttaacatggacttctcagctggttcctacttctcatcatggcctatcaattctgcttctgagagctacagtttggctgatggttcagcggaatcatatggagaaggaagcatgccaccgtcaacctatttcatgacagctagatcagatcacaatttaaatttcagtgtgcatgaacaggattccactatgcttccaaacgaacagttgacctatgctggtgctggccagattgatctattacctgctgagactctatctagggataagcttcctgaaaatcttctggagcttcaaggacttcagaatatcagcaacctacagagtaatttagtggccccaggggtgtttcagcacaatttaacacctggggtctttcatccacagttgaacactcctggactttcagaactgcctcatgccttatctagttcaattgacagtaatggaagtgaagtttctgcttttctcgctgatctaaacgctgtttcttcagcgccaactttatgttccacattccaaaacgcttcttcgttcatggaaccagtgaatctagaagctttcagtattcaaggcgcacaaagtgattgtgttttgaacagaacaagtcatccgaatgggaatatctcagtatgtgacagtgctgccttggcatcactacatgatagcaaggagtttatcagtggtagtctcccttcttttgctagtgtccaggaaacaaacctagctgctagtggcttcaagactcagaagcaggagcaaaatgcagtgtgcaatatccctactttcactgcacggaatcaaatgtcagttgctgcaatgcaaggagcacttgtccctcaaaagattccttcacggatcaatgataataaaagtgagggtcctgttagccatccttctgatgtacaaactcaaccaaattcagctgttaatggtgttggtgtgaaaccacgagtaagggctcgtcgtggacaagcaactgatcctcatagtattgctgaacggcttcgcagagagaaaatttcagataggatgaaaaatctgcaggatcttgtcccaaattccaataaggtactttttttggagggtgggggtgggttgacttgtctggtgcatactgcaggcagacaaggcatccatgctggatgaaattattgattatgtgaagtttcttcagcttcaggtcaaggtcttgagcatgagtagggtaggagctccaggagcagttcttccccttctcacagaatctaagactgagggttaccacggccaacctctgccacaaggattactggacgcactagactcggaagacagcttcgtcttcgaggaagaggtcgtgaagctaatggagaccagcatcaccagcgcgatgcagtaccttcagagcaaggggctctgcctgatgccagtcgcccttgcttccgcaatatccacccagaaaggtgtgtccgctgctgcagtccctcctgaacggtgagataaagacacgctcctcccccatgagcacgaggaaacagccgcagatgacagaactcagacggctgaagaatgcagcaatgcaaagcccgtagagtgcagcataggaagttagtctgtgaccagagcgcatggcctcgtctactaatttcgctctcagaatcagctttttttttcgtacctattgcgcatcagttgattttgcctttttgccttctctcttttctttttggccgtatttcatcaggttgcatataaaaaaaagtaaaatctactggttctggcgttctgctatatgggatcttgtgatcaggcatctccaaagtgatcctcttgcccggctgtcagtttgttagctgtagccatctactacctcagtttgaaaaactgagtttatgagctgccccaagaaacctacttagctttgctttgttgtcatggccatgcaatgaatttggctgcctcaaactttgaacaaactagaagtgtaagcaattagaatgaacaacaacaaaaaaacattc

SEQ ID NO: 61987 - DNA, 2354 bp, Zea Mays
cgagtccttaaaaaaaaaggcagcaggaccgattaaccaaccgcagtctttccttactgctagcgctgagcgagcatcagaaattcagcagtccaacgcgtcctccaatcttcgcccccggcaagcaataccgaaaaagccactccttttccttctccgcgcaaagccccaaaccgccgcctcccgttctctcgagtctcgacctctcctctcctctcctcttctcaggtctcacctgagtcacacctccacagacactgagacacacacatacgctatctctcatcgtcctccactcccggcaacggaagtttcactgctgccctcatctaactccccgtctcactgcatattgtcaactgtgcgtattttcagtctgtagaagccatcttttaaagaacattttgggcagaaattgccagtagcatttcttgtggttaacatggacttctcagctggttcctacttctcatcatggcctatcaattctgcttctgagagctacagtttggctgatggttcagcggaatcatatggagaaggaagcatgccaccgtcaacctatttcatgacagctagatcagatcacaatttaaatttcagtgtgcatgaacaggattccactatgcttccaaacgaacagttgacctatgctggtgctggccagattgatctattacctgctgagactctatctagggataagcttcctgaaaatcttctggagcttcaaggacttcagaatatcagcaacctacagagtaatttagtggccccaggggtgtttcagcacaatttaacacctggggtctttcatccacagttgaacactcctggactttcagaactgcctcatgccttatctagttcaattgacagtaatggaagtgaagtttctgcttttctcgctgatctaaacgctgtttcttcagcgccaactttatgttccacattccaaaacgcttcttcgttcatggaaccagtgaatctagaagctttcagtattcaaggcgcacaaagtgattgtgttttgaacagaacaagtcatccgaatgggaatatctcagatagcaaggagtttatcagtggtagtctcccttcttttgctagtgtccaggaaacaaacctagctgctagtggcttcaagactcagaagcaggagcaaaatgcagtgtgcaatatccctactttcactgcacggaatcaaatgtcagttgctgcaatgcaaggagcacttgtccctcaaaagattccttcacggatcaatgataataaaagtgagggtcctgttagccatccttctgatgtacaaactcaaccaaattcagctgttaatggtgttggtgtgaaaccacgagtaagggctcgtcgtggacaagcaactgatcctcatagtattgctgaacggcttcgcagagagaaaatttcagataggatgaaaaatctgcaggatcttgtcccaaattccaataaggcagacaaggcatccatgctggatgaaattattgattatgtgaagtttcttcagcttcaggtcaaggtcttgagcatgagtagggtaggagctccaggagcagttcttccccttctcacagaatctaagactgagggttaccacggccaacctctgccacaaggattactggacgcactagactcggaagacagcttcgtcttcgaggaagaggtcgtgaagctaatggagaccagcatcaccagcgcgatgcagtaccttcagagcaaggggctctgcctgatgccagtcgcccttgcttccgcaatatccacccagaaaggtgtgtccgctgctgcagtccctcctgaacggtgagataaagacacgctcctcccccatgagcacgaggaaacagccgcagatgacagaactcagacggctgaagaatgcagcaatgcaaagcccgtagagtgcagcataggaagttagtctgtgaccagagcgcatggcctcgtctactaatttcgctctcagaatcagctttttttttcgtacctattgcgcatcagttgattttgcctttttgccttctctcttttctttttggccgtatttcatcaggttgcatataaaaaaaagtaaaatctactggttctggcgttctgctatatgggatcttgtgatcaggcatctccaaagtgatcctcttgcccggctgtcagtttgttagctgtagccatctactacctcagtttgaaaaactgagtttatgagctgccccaagaaacctacttagctttgctttgttgtcatggccatgcaatgaatttggctgcctcaaactttgaacaaactagaagtgtaagcaattagaatgaacaacaacaaaaaaacattc

SEQ ID NO: 61988 - DNA, 2478 bp, Zea Mays
ctcaacactaattattattattttattttataaattaaatatgtttttatttaaaaacattaataacttatagtttagagtggaactggaacgagtccttaaaaaaaaaggcagcaggaccgattaaccaaccgcagtctttccttactgctagcgctgagcgagcatcagaaattcagcagtccaacgcgtcctccaatcttcgcccccggcaagcaataccgaaaaagccactccttttccttctccgcgcaaagccccaaaccgccgcctcccgttctctcgagtctcgacctctcctctcctctcctcttctcaggtctcacctgagtcacacctccacagacactgagacacacacatacgctatctctcatcgtcctccactcccggcaacggaagtttcactgctgccctcatctaactccccgtctcactgcatattgtcaactgtgcgtattttcagtctgtagaagccatcttttaaagaacattttgggcagaaattgccagtagcatttcttgtggttaacatggacttctcagctggttcctacttctcatcatggcctatcaattctgcttctgagagctacagtttggctgatggttcagcggaatcatatggagaaggaagcatgccaccgtcaacctatttcatgacagctagatcagatcacaatttaaatttcagtgtgcatgaacaggattccactatgcttccaaacgaacagttgacctatgctggtgctggccagattgatctattacctgctgagactctatctagggataagcttcctgaaaatcttctggagcttcaaggacttcagaatatcagcaacctacagagtaatttagtggccccaggggtgtttcagcacaatttaacacctggggtctttcatccacagttgaacactcctggactttcagaactgcctcatgccttatctagttcaattgacagtaatggaagtgaagtttctgcttttctcgctgatctaaacgctgtttcttcagcgccaactttatgttccacattccaaaacgcttcttcgttcatggaaccagtgaatctagaagctttcagtattcaaggcgcacaaagtgattgtgttttgaacagaacaagtcatccgaatgggaatatctcagtatgtgacagtgctgccttggcatcactacatgatagcaaggagtttatcagtggtagtctcccttcttttgctagtgtccaggaaacaaacctagctgctagtggcttcaagactcagaagcaggagcaaaatgcagtgtgcaatatccctactttcactgcacggaatcaaatgtcagttgctgcaatgcaaggagcacttgtccctcaaaagattccttcacggatcaatgataataaaagtgagggtcctgttagccatccttctgatgtacaaactcaaccaaattcagctgttaatggtgttggtgtgaaaccacgagtaagggctcgtcgtggacaagcaactgatcctcatagtattgctgaacggcttcgcagagagaaaatttcagataggatgaaaaatctgcaggatcttgtcccaaattccaataaggcagacaaggcatccatgctggatgaaattattgattatgtgaagtttcttcagcttcaggtcaaggtcttgagcatgagtagggtaggagctccaggagcagttcttccccttctcacagaatctaagactgagggttaccacggccaacctctgccacaaggattactggacgcactagactcggaagacagcttcgtcttcgaggaagaggtcgtgaagctaatggagaccagcatcaccagcgcgatgcagtaccttcagagcaaggggctctgcctgatgccagtcgcccttgcttccgcaatatccacccagaaaggtgtgtccgctgctgcagtccctcctgaacggtgagataaagacacgctcctcccccatgagcacgaggaaacagccgcagatgacagaactcagacggctgaagaatgcagcaatgcaaagcccgtagagtgcagcataggaagttagtctgtgaccagagcgcatggcctcgtctactaatttcgctctcagaatcagctttttttttcgtacctattgcgcatcagttgattttgcctttttgccttctctcttttctttttggccgtatttcatcaggttgcatataaaaaaaagtaaaatctactggttctggcgttctgctatatgggatcttgtgatcaggcatctccaaagtgatcctcttgcccggctgtcagtttgttagctgtagccatctactacctcagtttgaaaaactgagtttatgagctgccccaagaaacctacttagctttgctttgttgtcatggccatgcaatgaatttggctgcctcaaactttgaacaaactagaagtgtaagcaattagaatgaacaacaacaaaaaaacattc

SEQ ID NO: 61989 - DNA, 903 bp, Zea Mays
atcaggcgtcctgttttttgtgcatggtcaaaagccataagcactcctgatgtgaatatttcaactgatgatggtgttcatgatgtaatctatgggataacggatgatcaagctgctgagatccaggctcagggattatctaaggattttgtgcagtgggttaatcaaggagagacattttggtactgatattccaagatgggcgtaccatgtaaattcaagccacataatggttgcacttgcaaaaaggggggaaaataagggagaagtctacatgatggcagtccagacctcatttcaaagcatattaactcttaaagaccattgcaaggagggaccatcaatgtgcatgagattgtttgtcaaccatcagcaattcagcattctcttttcggtatacgaatatgatgatgggcttagagtcacacgcactgttagaagacttgtctagggaagtgtaccattctgttcatttattgaagcttgctcaccaggctggtagatagtgcattgttattattttttcttaaaaggaatgaaagaatgtaggtagtttattctttttaagatgtaccattgtccaggcatgatccccatctctccatcgtgtaaatatatatgtcccaagtgttccacttttcccttttccttccatgagagttgaggtgggcatgaaagcaccatttttccctcagtctctttgtatgggttttctgaaatcatgtacatttatattttgtggcaagcggagagattgttgtgtaatttccattgtaccaaacgtccaaacccctcttaccaatagaagtctcttggactgtttgtcacattgcagattgctttaatacttgctttaaactatctgattatgtgtaaaattttcgtgtgattccttagggtccc

SEQ ID NO: 61990 - DNA, 3514 bp, Zea Mays
ctccccgcctggacaccgtcacaccggtcagcctccacgcctcacggatttcgcacccgaaaaaaaaatagaaagcgaaatcaaccaatctcctatcattcacggcctcgccagcgcctcctcctccccctcctccccagaaatttccccacttgcgccgctcgcgatcggcgcccgagctcccggaatcccggcccggtttcgcgaccgttcgccgcgagccttgggccggtccgggctctgattcgcgggcgccgcggccgtggttcgcgcggggaatgctctacctcaagcagccgggcggcgcggacttagggttccggcgggcggcggtggcggctgctgctgctgctgctgcggggctgtgatctgccgctgtggtggatgcgaggttgagccagcacgcgccggggattctgctggcaatggcggaggcggacagctgcctcgagagcttcgagctctacgagtccgagtcgaaattctatattcttggaactaactgtaacaagacaatatggagattactcaagattgatagaatggagccatcagaggtcaatgtacatgaggattctactgtgctctcacagagtgattaccttgatatgctaaaaaatctagacgaacaacacaggtcaactggtggagtcaaatttgtcaccaactgttttggaatcatcggtttcattaagttccttgggccctattacatgttaattattactgagcagagaaagattggggatatatttggtcatatggtgtaccaagtttctaagactgcgatgattgagttatcaaattccactacgagaccaaaattaattaattccaaggacgagaacaggtacaagaagctcttgcagacaattgatcttagaaaagatttcttttttagccactcatatcatataatgagaagtcttcaaaagaactttaatgatccacaagaagggtgggaactatatgacacaatgttcgtctggaatgagttcctaactcgagggattcgtgacattctgaaaactacactctggactgttgcattagtctatggtttttttaagcaggacaaacttgcgatatgtgggaaggatattatgctgactctcattgctagacgctcgaggcattatgctggcaccaggtatctaaagaggggtgtgaatgaggagggcagagtagcaaatgatgttgagactgagcaaattgtttatgaagacatgcttggaccatggcaaataagctctgttgtgcagaacaggggttcgattccactattctggtcccaggagacatcaaagctgaatcttaagcctgatatcatattgcatggaaaggacaaaaattatgaggctaccaggcttcattttgaaaatcttaggaaaagatatggaaatcctatcatcatcttaaacttgattaagacacgtgagaagagaccacgtgaaatcatactccgtcgggaatttgacagagcaataaagattattaatagtggtctaccaggcgaagatcatttgagatatttacattgggatcttcataagaactctcaaagcaaaagtacaaatgcgcttcaagtgcttttgaaggtggcatttgaagctttgaacttgacagaattcttttatcgtcaagtttccccagctcaaagggcagagaattcccctaatttaagccctacactgaaaaatggttttggtcctcatgtgtgtgatgatgacaacaattgtggcaatgcagactatgttgatgatcttgatgacatttcccaagaagatacctgtggcaattatgatcctggcaatggaattgcagaagatagatctgaggtcaatggatctactcaaataaagcctccaaaatttcaaaagggtgtattacgtacaaactgtatagattgtttggatcgcacaaatgttgctcaatatgcctatggcctagctgctctaggataccagttacatgcacttggttctgtagaatctccagaagttcatttagactcccctttgtctcggcatttgatgcatttttatgaacggatgggtgacacacttgctttacagtatggtggttctgctgctcacaataagatattctctgcaaaaagagggcacttgaagttcgccattcaatctcaagagttctttaggactctgcaacggtactacagtaatgcctatatggatgcttacaaacaagcagcgataaacttatttctaggatacttccaaccgcaggtgggaaaacctgcactttgggagccagaatctggtgacgagcatgtacttgatgacgagacaagatatttgtcagtaaattgatgaagagggcaagatcagatggcagcattcttaataaaagcaaactatcaatgtccagtaatggcccaaatggagttttaaactcagcacttactggttcaaaaaatgaagggcaacatccaaactggagttctgattcagtgcatgggatgtcttcagcctctgacaattccatgtcaaagtcaaggtatactccgacagtgtctcacattaagcatataagctgtgaactagactattacaatggttctggtgattcaaatttcctggatcttgactggctttcagcttcagacaatgaaaggtcaaaagccataagcactcctgatgtgaatatttcaactgatgatggtgttcatgatgtaatctatgggataacggatgatcaagctgctgagatccaggctcagggattatctaaggattttgtgcagtgggttaatcaaggagagacattttggtactgatattccaagatgggcgtaccatgtaaattcaagccacataatggttgcacttgcaaaaaggggggaaaataagggagaagtctacatgatggcagtccagacctcatttcaaagcatattaactcttaaagaccattgcaaggagggaccatcaatgtgcatgagattgtttgtcaaccatcagcaattcagcattctcttttcggtatacgaatatgatgatgggcttagagtcacacgcactgttagaagacttgtctagggaagtgtaccattctgttcatttattgaagcttgctcaccaggctggtagatagtgcattgttattattttttcttaaaaggaatgaaagaatgtaggtagtttattctttttaagatgtaccattgtccaggcatgatccccatctctccatcgtgtaaatatatatgtcccaagtgttccacttttcccttttccttccatgagagttgaggtgggcatgaaagcaccatttttccctcagtctctttgtatgggttttctgaaatcatgtacatttatattttgtggcaagcggagagattgttgtgtaatttccattgtaccaaacgtccaaacccctcttaccaatagaagtctcttggactgtttgtcacattgcagattgctttaatacttgctttaaactatctgattatgtgtaaaattttcgtgtgattccttagggtccc

SEQ ID NO: 61991 - DNA, 3384 bp, Zea Mays
ctccccgcctggacaccgtcacaccggtcagcctccacgcctcacggatttcgcacccgaaaaaaaaatagaaagcgaaatcaaccaatctcctatcattcacggcctcgccagcgcctcctcctccccctcctccccagaaatttccccacttgcgccgctcgcgatcggcgcccgagctcccggaatcccggcccggtttcgcgaccgttcgccgcgagccttgggccggtccgggctctgattcgcgggcgccgcggccgtggttcgcgcggggaatgctctacctcaagcagccgggcggcgcggacttagggttccggcgggcggcggtggcggctgctgctgctgctgctgcggggctgtgatctgccgctgtggtggatgcgaggttgagccagcacgcgccggggattctgctggcaatggcggaggcggacagctgcctcgagagcttcgagctctacgagtccgagtcgaaattctatattcttggaactaactgtaacaagacaatatggagattactcaagattgatagaatggagccatcagaggtcaatgtacatgaggattctactgtgctctcacagagtgattaccttgatatgctaaaaaatctagacgaacaacacaggtcaactggtggagtcaaatttgtcaccaactgttttggaatcatcggtttcattaagttccttgggccctattacatgttaattattactgagcagagaaagattggggatatatttggtcatatggtgtaccaagtttctaagactgcgatgattgagttatcaaattccactacgagaccaaaattaattaattccaaggacgagaacaggtacaagaagctcttgcagacaattgatcttagaaaagatttcttttttagccactcatatcatataatgagaagtcttcaaaagaactttaatgatccacaagaagggtgggaactatatgacacaatgttcgtctggaatgagttcctaactcgagggattcgtgacattctgaaaactacactctggactgttgcattagtctatggtttttttaagcaggacaaacttgcgatatgtgggaaggatattatgctgactctcattgctagacgctcgaggcattatgctggcaccaggtatctaaagaggggtgtgaatgaggagggcagagtagcaaatgatgttgagactgagcaaattgtttatgaagacatgcttggaccatggcaaataagctctgttgtgcagaacaggggttcgattccactattctggtcccaggagacatcaaagctgaatcttaagcctgatatcatattgcatggaaaggacaaaaattatgaggctaccaggcttcattttgaaaatcttaggaaaagatatggaaatcctatcatcatcttaaacttgattaagacacgtgagaagagaccacgtgaaatcatactccgtcgggaatttgacagagcaataaagattattaatagtggtctaccaggcgaagatcatttgagatatttacattgggatcttcataagaactctcaaagcaaaagtacaaatgcgcttcaagtgcttttgaaggtggcatttgaagctttgaacttgacagaattcttttatcgtcaagtttccccagctcaaagggcagagaattcccctaatttaagccctacactgaaaaatggttttggtcctcatgtgtgtgatgatgacaacaattgtggcaatgcagactatgttgatgatcttgatgacatttcccaagaagatacctgtggcaattatgatcctggcaatggaattgcagaagatagatctgaggtcaatggatctactcaaataaagcctccaaaatttcaaaagggtgtattacgtacaaactgtatagattgtttggatcgcacaaatgttgctcaatatgcctatggcctagctgctctaggataccagttacatgcacttggttctgtagaatctccagaagttcatttagactcccctttgtctcggcatttgatgcatttttatgaacggatgggtgacacacttgctttacagtatggtggttctgctgctcacaataagatattctctgcaaaaagagggcacttgaagttcgccattcaatctcaagagttctttaggactctgcaacggtactacagtaatgcctatatggatgcttacaaacaagcagcgataaacttatttctaggatacttccaaccgcaggtgggaaaacctgcactttgggagccagaatctggtgacgagcatgtacttgatgacgagacaagggcaacatccaaactggagttctgattcagtgcatgggatgtcttcagcctctgacaattccatgtcaaagtcaaggtatactccgacagtgtctcacattaagcatataagctgtgaactagactattacaatggttctggtgattcaaatttcctggatcttgactggctttcagcttcagacaatgaaaggtcaaaagccataagcactcctgatgtgaatatttcaactgatgatggtgttcatgatgtaatctatgggataacggatgatcaagctgctgagatccaggctcagggattatctaaggattttgtgcagtgggttaatcaaggagagacattttggtactgatattccaagatgggcgtaccatgtaaattcaagccacataatggttgcacttgcaaaaaggggggaaaataagggagaagtctacatgatggcagtccagacctcatttcaaagcatattaactcttaaagaccattgcaaggagggaccatcaatgtgcatgagattgtttgtcaaccatcagcaattcagcattctcttttcggtatacgaatatgatgatgggcttagagtcacacgcactgttagaagacttgtctagggaagtgtaccattctgttcatttattgaagcttgctcaccaggctggtagatagtgcattgttattattttttcttaaaaggaatgaaagaatgtaggtagtttattctttttaagatgtaccattgtccaggcatgatccccatctctccatcgtgtaaatatatatgtcccaagtgttccacttttcccttttccttccatgagagttgaggtgggcatgaaagcaccatttttccctcagtctctttgtatgggttttctgaaatcatgtacatttatattttgtggcaagcggagagattgttgtgtaatttccattgtaccaaacgtccaaacccctcttaccaatagaagtctcttggactgtttgtcacattgcagattgctttaatacttgctttaaactatctgattatgtgtaaaattttcgtgtgattccttagggtccc

SEQ ID NO: 61992 - DNA, 3548 bp, Zea Mays
ctccccgcctggacaccgtcacaccggtcagcctccacgcctcacggatttcgcacccgaaaaaaaaatagaaagcgaaatcaaccaatctcctatcattcacggcctcgccagcgcctcctcctccccctcctccccagaaatttccccacttgcgccgctcgcgatcggcgcccgagctcccggaatcccggcccggtttcgcgaccgttcgccgcgagccttgggccggtccgggctctgattcgcgggcgccgcggccgtggttcgcgcggggaatgctctacctcaagcagccgggcggcgcggacttagggttccggcgggcggcggtggcggctgctgctgctgctgctgcggggctgtgatctgccgctgtggtggatgcgaggttgagccagcacgcgccggggattctgctggcaatggcggaggcggacagctgcctcgagagcttcgagctctacgagtccgagtcgaaattctatattcttggaactaactgtaacaagacaatatggagattactcaagattgatagaatggagccatcagaggtcaatgtacatgaggattctactgtgctctcacagagtgattaccttgatatgctaaaaaatctagacgaacaacacaggtcaactggtggagtcaaatttgtcaccaactgttttggaatcatcggtttcattaagttccttgggccctattacatgttaattattactgagcagagaaagattggggatatatttggtcatatggtgtaccaagtttctaagactgcgatgattgagttatcaaattccactacgagaccaaaattaattaattccaaggacgagaacaggtacaagaagctcttgcagacaattgatcttagaaaagatttcttttttagccactcatatcatataatgagaagtcttcaaaagaactttaatgatccacaagaagggtgggaactatatgacacaatgttcgtctggaatgagttcctaactcgagggattcgtgacattctgaaaactacactctggactgttgcattagtctatggtttttttaagcaggacaaacttgcgatatgtgggaaggatattatgctgactctcattgctagacgctcgaggcattatgctggcaccaggtatctaaagaggggtgtgaatgaggagggcagagtagcaaatgatgttgagactgagcaaattgtttatgaagacatgcttggaccatggcaaataagctctgttgtgcagaacaggggttcgattccactattctggtcccaggagacatcaaagctgaatcttaagcctgatatcatattgcatggaaaggacaaaaattatgaggctaccaggcttcattttgaaaatcttaggaaaagatatggaaatcctatcatcatcttaaacttgattaagacacgtgagaagagaccacgtgaaatcatactccgtcgggaatttgacagagcaataaagattattaatagtggtctaccaggcgaagatcatttgagatatttacattgggatcttcataagaactctcaaagcaaaagtacaaatgcgcttcaagtgcttttgaaggtggcatttgaagctttgaacttgacagaattcttttatcgtcaagtttccccagctcaaagggcagagaattcccctaatttaagccctacactgaaaaatggttttggtcctcatgtgtgtgatgatgacaacaattgtggcaatgcagactatgttgatgatcttgatgacatttcccaagaagatacctgtggcaattatgatcctggcaatggaattgcagaagatagatctgaggtcaatggatctactcaaataaagcctccaaaatttcaaaagggtgtattacgtacaaactgtatagattgtttggatcgcacaaatgttgctcaatatgcctatggcctagctgctctaggataccagttacatgcacttggttctgtagaatctccagaagttcatttagactcccctttgtctcggcatttgatgcatttttatgaacggatgggtgacacacttgctttacagtatggtggttctgctgctcacaataaggtactcattgaatgttgctatattcttctatctgacagaaaaactatattctctgcaaaaagagggcacttgaagttcgccattcaatctcaagagttctttaggactctgcaacggtactacagtaatgcctatatggatgcttacaaacaagcagcgataaacttatttctaggatacttccaaccgcaggtgggaaaacctgcactttgggagccagaatctggtgacgagcatgtacttgatgacgagacaagtaaattgatgaagagggcaagatcagatggcagcattcttaataaaagcaaactatcaatgtccagtaatggcccaaatggagttttaaactcagcacttactggttcaaaaaatgaagggcaacatccaaactggagttctgattcagtgcatgggatgtcttcagcctctgacaattccatgtcaaagtcaaggtatactccgacagtgtctcacattaagcatataagctgtgaactagactattacaatggttctggtgattcaaatttcctggatcttgactggctttcagcttcagacaatgaaaggtcaaaagccataagcactcctgatgtgaatatttcaactgatgatggtgttcatgatgtaatctatgggataacggatgatcaagctgctgagatccaggctcagggattatctaaggattttgtgcagtgggttaatcaaggagagacattttggtactgatattccaagatgggcgtaccatgtaaattcaagccacataatggttgcacttgcaaaaaggggggaaaataagggagaagtctacatgatggcagtccagacctcatttcaaagcatattaactcttaaagaccattgcaaggagggaccatcaatgtgcatgagattgtttgtcaaccatcagcaattcagcattctcttttcggtatacgaatatgatgatgggcttagagtcacacgcactgttagaagacttgtctagggaagtgtaccattctgttcatttattgaagcttgctcaccaggctggtagatagtgcattgttattattttttcttaaaaggaatgaaagaatgtaggtagtttattctttttaagatgtaccattgtccaggcatgatccccatctctccatcgtgtaaatatatatgtcccaagtgttccacttttcccttttccttccatgagagttgaggtgggcatgaaagcaccatttttccctcagtctctttgtatgggttttctgaaatcatgtacatttatattttgtggcaagcggagagattgttgtgtaatttccattgtaccaaacgtccaaacccctcttaccaatagaagtctcttggactgtttgtcacattgcagattgctttaatacttgctttaaactatctgattatgtgtaaaattttcgtgtgattccttagggtccc

SEQ ID NO: 61993 - DNA, 3721 bp, Zea Mays
ctccccgcctggacaccgtcacaccggtcagcctccacgcctcacggatttcgcacccgaaaaaaaaatagaaagcgaaatcaaccaatctcctatcattcacggcctcgccagcgcctcctcctccccctcctccccagaaatttccccacttgcgccgctcgcgatcggcgcccgagctcccggaatcccggcccggtttcgcgaccgttcgccgcgagccttgggccggtccgggctctgattcgcgggcgccgcggccgtggttcgcgcggggaatgctctacctcaagcagccgggcggcgcggacttagggttccggcgggcggcggtggcggctgctgctgctgctgctgcggggctgtgatctgccgctgtggtggatgcgaggttgagccagcacgcgccggggattctgctggcaatggcggaggcggacagctgcctcgagagcttcgagctctacgagtccgagtcgaaattctatattcttggaactaactgtaacaagacaatatggagattactcaagattgatagaatggagccatcagaggtcaatgtacatgaggattctactgtgctctcacagagtgattaccttgatatgctaaaaaatctagacgaacaacacaggtcaactggtggagtcaaatttgtcaccaactgttttggaatcatcggtttcattaagttccttgggccctattacatgttaattattactgagcagagaaagattggggatatatttggtcatatggtgtaccaagtttctaagactgcgatgattgagttatcaaattccactacgagaccaaaattaattaattccaaggacgagaacaggtacaagaagctcttgcagacaattgatcttagaaaagatttcttttttagccactcatatcatataatgagaagtcttcaaaagaactttaatgatccacaagaagggtgggaactatatgacacaatgttcgtctggaatgagttcctaactcgagggattcgtgacattctgaaaactacactctggactgttgcattagtctatggtttttttaagcaggacaaacttgcgatatgtgggaaggatattatgctgactctcattgctagacgctcgaggcattatgctggcaccaggtatctaaagaggggtgtgaatgaggagggcagagtagcaaatgatgttgagactgagcaaattgtttatgaagacatgcttggaccatggcaaataagctctgttgtgcagaacaggggttcgattccactattctggtcccaggagacatcaaagctgaatcttaagcctgatatcatattgcatggaaaggacaaaaattatgaggctaccaggcttcattttgaaaatcttaggaaaagatatggaaatcctatcatcatcttaaacttgattaagacacgtgagaagagaccacgtgaaatcatactccgtcgggaatttgacagagcaataaagattattaatagtggtctaccaggcgaagatcatttgagatatttacattgggatcttcataagaactctcaaagcaaaagtacaaatgcgcttcaagtgcttttgaaggtggcatttgaagctttgaacttgacagaattcttttatcgtcaagtttccccagctcaaagggcagagaattcccctaatttaagccctacactgaaaaatggttttggtcctcatgtgtgtgatgatgacaacaattgtggcaatgcagactatgttgatgatcttgatgacatttcccaagaagatacctgtggcaattatgatcctggcaatggaattgcagaagatagatctgaggtcaatggatctactcaaataaagcctccaaaatttcaaaagggtgtattacgtacaaactgtatagattgtttggatcgcacaaatgttgctcaatatgcctatggcctagctgctctaggataccagttacatgcacttggttctgtagaatctccagaagttcatttagactcccctttgtctcggcatttgatgcatttttatgaacggatgggtgacacacttgctttacagtatggtggttctgctgctcacaataagatattctctgcaaaaagagggcacttgaagttcgccattcaatctcaagagttctttaggactctgcaacggtactacagtaatgcctatatggatgcttacaaacaagcagcgataaacttgtgggaaaacctgcactttgggagccagaatctggtgacgagcatgtacttgatgacgagacaagccactgtttgccgaaggttaggcgtggcaaactacggcaccaaccaaacaggaaagtattaacttctttactttcatatgggtagcaaggaatcatttatattatatcttttcacatttttgttggggtgtttcctgactacttgttttaagaattaaataatccagattttattcacacatgcattgtgcaaatcaaaacaatatatcttgttagttatctgagattatagatatttgtcagtaaattgatgaagagggcaagatcagatggcagcattcttaataaaagcaaactatcaatgtccagtaatggcccaaatggagttttaaactcagcacttactggttcaaaaaatgaagggcaacatccaaactggagttctgattcagtgcatgggatgtcttcagcctctgacaattccatgtcaaagtcaaggtatactccgacagtgtctcacattaagcatataagctgtgaactagactattacaatggttctggtgattcaaatttcctggatcttgactggctttcagcttcagacaatgaaaggtcaaaagccataagcactcctgatgtgaatatttcaactgatgatggtgttcatgatgtaatctatgggataacggatgatcaagctgctgagatccaggctcagggattatctaaggattttgtgcagtgggttaatcaaggagagacattttggtactgatattccaagatgggcgtaccatgtaaattcaagccacataatggttgcacttgcaaaaaggggggaaaataagggagaagtctacatgatggcagtccagacctcatttcaaagcatattaactcttaaagaccattgcaaggagggaccatcaatgtgcatgagattgtttgtcaaccatcagcaattcagcattctcttttcggtatacgaatatgatgatgggcttagagtcacacgcactgttagaagacttgtctagggaagtgtaccattctgttcatttattgaagcttgctcaccaggctggtagatagtgcattgttattattttttcttaaaaggaatgaaagaatgtaggtagtttattctttttaagatgtaccattgtccaggcatgatccccatctctccatcgtgtaaatatatatgtcccaagtgttccacttttcccttttccttccatgagagttgaggtgggcatgaaagcaccatttttccctcagtctctttgtatgggttttctgaaatcatgtacatttatattttgtggcaagcggagagattgttgtgtaatttccattgtaccaaacgtccaaacccctcttaccaatagaagtctcttggactgtttgtcacattgcagattgctttaatacttgctttaaactatctgattatgtgtaaaattttcgtgtgattccttagggtccc

SEQ ID NO: 61994 - DNA, 3478 bp, Zea Mays
ctccccgcctggacaccgtcacaccggtcagcctccacgcctcacggatttcgcacccgaaaaaaaaatagaaagcgaaatcaaccaatctcctatcattcacggcctcgccagcgcctcctcctccccctcctccccagaaatttccccacttgcgccgctcgcgatcggcgcccgagctcccggaatcccggcccggtttcgcgaccgttcgccgcgagccttgggccggtccgggctctgattcgcgggcgccgcggccgtggttcgcgcggggaatgctctacctcaagcagccgggcggcgcggacttagggttccggcgggcggcggtggcggctgctgctgctgctgctgcggggctgtgatctgccgctgtggtggatgcgaggttgagccagcacgcgccggggattctgctggcaatggcggaggcggacagctgcctcgagagcttcgagctctacgagtccgagtcgaaattctatattcttggaactaactgtaacaagacaatatggagattactcaagattgatagaatggagccatcagaggtcaatgtacatgaggattctactgtgctctcacagagtgattaccttgatatgctaaaaaatctagacgaacaacacaggtcaactggtggagtcaaatttgtcaccaactgttttggaatcatcggtttcattaagttccttgggccctattacatgttaattattactgagcagagaaagattggggatatatttggtcatatggtgtaccaagtttctaagactgcgatgattgagttatcaaattccactacgagaccaaaattaattaattccaaggacgagaacaggtacaagaagctcttgcagacaattgatcttagaaaagatttcttttttagccactcatatcatataatgagaagtcttcaaaagaactttaatgatccacaagaagggtgggaactatatgacacaatgttcgtctggaatgagttcctaactcgagggattcgtgacattctgaaaactacactctggactgttgcattagtctatggtttttttaagcaggacaaacttgcgatatgtgggaaggatattatgctgactctcattgctagacgctcgaggcattatgctggcaccaggtatctaaagaggggtgtgaatgaggagggcagagtagcaaatgatgttgagactgagcaaattgtttatgaagacatgcttggaccatggcaaataagctctgttgtgcagaacaggggttcgattccactattctggtcccaggagacatcaaagctgaatcttaagcctgatatcatattgcatggaaaggacaaaaattatgaggctaccaggcttcattttgaaaatcttaggaaaagatatggaaatcctatcatcatcttaaacttgattaagacacgtgagaagagaccacgtgaaatcatactccgtcgggaatttgacagagcaataaagattattaatagtggtctaccaggcgaagatcatttgagatatttacattgggatcttcataagaactctcaaagcaaaagtacaaatgcgcttcaagtgcttttgaaggtggcatttgaagctttgaacttgacagaattcttttatcgtcaagtttccccagctcaaagggcagagaattcccctaatttaagccctacactgaaaaatggttttggtcctcatgtgtgtgatgatgacaacaattgtggcaatgcagactatgttgatgatcttgatgacatttcccaagaagatacctgtggcaattatgatcctggcaatggaattgcagaagatagatctgaggtcaatggatctactcaaataaagcctccaaaatttcaaaagggtgtattacgtacaaactgtatagattgtttggatcgcacaaatgttgctcaatatgcctatggcctagctgctctaggataccagttacatgcacttggttctgtagaatctccagaagttcatttagactcccctttgtctcggcatttgatgcatttttatgaacggatgggtgacacacttgctttacagtatggtggttctgctgctcacaataagatattctctgcaaaaagagggcacttgaagttcgccattcaatctcaagagttctttaggactctgcaacggtactacagtaatgcctatatggatgcttacaaacaagcagcgataaacttgtgggaaaacctgcactttgggagccagaatctggtgacgagcatgtacttgatgacgagacaagtaaattgatgaagagggcaagatcagatggcagcattcttaataaaagcaaactatcaatgtccagtaatggcccaaatggagttttaaactcagcacttactggttcaaaaaatgaagggcaacatccaaactggagttctgattcagtgcatgggatgtcttcagcctctgacaattccatgtcaaagtcaaggtatactccgacagtgtctcacattaagcatataagctgtgaactagactattacaatggttctggtgattcaaatttcctggatcttgactggctttcagcttcagacaatgaaaggtcaaaagccataagcactcctgatgtgaatatttcaactgatgatggtgttcatgatgtaatctatgggataacggatgatcaagctgctgagatccaggctcagggattatctaaggattttgtgcagtgggttaatcaaggagagacattttggtactgatattccaagatgggcgtaccatgtaaattcaagccacataatggttgcacttgcaaaaaggggggaaaataagggagaagtctacatgatggcagtccagacctcatttcaaagcatattaactcttaaagaccattgcaaggagggaccatcaatgtgcatgagattgtttgtcaaccatcagcaattcagcattctcttttcggtatacgaatatgatgatgggcttagagtcacacgcactgttagaagacttgtctagggaagtgtaccattctgttcatttattgaagcttgctcaccaggctggtagatagtgcattgttattattttttcttaaaaggaatgaaagaatgtaggtagtttattctttttaagatgtaccattgtccaggcatgatccccatctctccatcgtgtaaatatatatgtcccaagtgttccacttttcccttttccttccatgagagttgaggtgggcatgaaagcaccatttttccctcagtctctttgtatgggttttctgaaatcatgtacatttatattttgtggcaagcggagagattgttgtgtaatttccattgtaccaaacgtccaaacccctcttaccaatagaagtctcttggactgtttgtcacattgcagattgctttaatacttgctttaaactatctgattatgtgtaaaattttcgtgtgattccttagggtccc

SEQ ID NO: 61995 - DNA, 4696 bp, Zea Mays
ctccccgcctggacaccgtcacaccggtcagcctccacgcctcacggatttcgcacccgaaaaaaaaatagaaagcgaaatcaaccaatctcctatcattcacggcctcgccagcgcctcctcctccccctcctccccagaaatttccccacttgcgccgctcgcgatcggcgcccgagctcccggaatcccggcccggtttcgcgaccgttcgccgcgagccttgggccggtccgggctctgattcgcgggcgccgcggccgtggttcgcgcggggaatgctctacctcaagcagccgggcggcgcggacttagggttccggcgggcggcggtggcggctgctgctgctgctgctgcggggctgtgatctgccgctgtggtggatgcgaggttgagccagcacgcgccggggattctgctggcaatggcggaggcggacagctgcctcgagagcttcgagctctacgagtccgagtcgaaattctatattcttggaactaactgtaacaagacaatatggagattactcaagattgatagaatggagccatcagaggtcaatgtacatgaggattctactgtgctctcacagagtgattaccttgatatgctaaaaaatctagacgaacaacacaggtcaactggtggagtcaaatttgtcaccaactgttttggaatcatcggtttcattaagttccttgggccctattacatgttaattattactgagcagagaaagattggggatatatttggtcatatggtgtaccaagtttctaagactgcgatgattgagttatcaaattccactacgagaccaaaattaattaattccaaggacgagaacaggtacaagaagctcttgcagacaattgatcttagaaaagatttcttttttagccactcatatcatataatgagaagtcttcaaaagaactttaatgatccacaagaagggtgggaactatatgacacaatgttcgtctggaatgagttcctaactcgagggattcgtgacattctgaaaactacactctggactgttgcattagtctatggtttttttaagcaggacaaacttgcgatatgtgggaaggatattatgctgactctcattgctagacgctcgaggcattatgctggcaccaggtatctaaagaggggtgtgaatgaggagggcagagtagcaaatgatgttgagactgagcaaattgtttatgaagacatgcttggaccatggcaaataagctctgttgtgcagaacaggggttcgattccactattctggtcccaggagacatcaaagctgaatcttaagcctgatatcatattgcatggaaaggacaaaaattatgaggctaccaggcttcattttgaaaatcttaggaaaagatatggaaatcctatcatcatcttaaacttgattaagacacgtgagaagagaccacgtgaaatcatactccgtcgggaatttgacagagcaataaagattattaatagtggtctaccaggcgaagatcatttgagatatttacattgggatcttcataagaactctcaaagcaaaagtacaaatgcgcttcaagtgcttttgaaggtggcatttgaagctttgaacttgacagaattcttttatcgtcaagtttccccagctcaaagggcagagaattcccctaatttaagccctacactgaaaaatggttttggtcctcatgtgtgtgatgatgacaacaattgtggcaatgcagactatgttgatgatcttgatgacatttcccaagaagatacctgtggcaattatgatcctggcaatggaattgcagaagatagatctgaggtcaatggatctactcaaataaagcctccaaaatttcaaaagggtgtattacgtacaaactgtatagattgtttggatcgcacaaatgttgctcaatatgcctatggcctagctgctctaggataccagttacatgcacttggttctgtagaatctccagaagttcatttagactcccctttgtctcggcatttgatgcatttttatgaacggatgggtgacacacttgctttacagtatggtggttctgctgctcacaataagatattctctgcaaaaagagggcacttgaagttcgccattcaatctcaagagttctttaggactctgcaacggtactacagtaatgcctatatggatgcttacaaacaagcagcgataaacttatttctaggatacttccaaccgcaggtgggaaaacctgcactttgggagccagaatctggtgacgagcatgtacttgatgacgagacaaggtaagctagcaatatatacctatgcttgaacttacagggttaagtatgctcctaataaaagaacaatatacgcttctctatgaattgaggcaataacagaattgtcactaaaggtggtgtgactacgatcctatatttattgcctctcctattaatatcacattaaactgacacaatataagtgatagtggaaccaaaaattgactagtagtctttgcacgagagcacaaagaattgtgaaacaatatctggtccacatgttctggtttaaccagttctaacttgccatgacacgagttagttatgccacggtttcttcgacagctatttggttcactgacacaaacacaactatggtgtgccacagttccttagcatcctgtcccacacttgatagattcatttttgtgccaaactttgccataagtgtggcgttgattttgctcgccacacttttcgtggcagccactgtttgccgaaggttaggcgtggcaaactacggcaccaaccaaacaggaaagtattaacttctttactttcatatgggtagcaaggaatcatttatattatatcttttcacatttttgttggggtgtttcctgactacttgttttaagaattaaataatccagattttattcacacatgcattgtgcaaatcaaaacaatatatcttgttagttatctgagattatagatatttgtcagtaaattgatgaagagggcaagatcagatggcagcattcttaataaaagcaaactatcaatgtccagtaatggcccaaatggagttttaaactcagcacttactggttcaaaaaatgaagggcaacatccaaactggagttctgattcagtgcatgggatgtcttcagcctctgacaattccatgtcaaagtcaaggtatactccgacagtgtctcacattaagcatataagctgtgaactagactattacaatggttctggtgattcaaatttcctggatcttgactggctttcagcttcagacaatgaaaggttgttcatgctgttcttttccttttgtggtctatcaggcgtcctgttttttgtgcatggtatggtatacacagaaatgacagtgagaagtaaatagtttgtcatttgttattaactccctggacatcttttctcagaaaagaagaaaaactctgcataaattgtctaagtggattatcaggagacctgagcatcattgcattaactaggaaatagttcaagaagaacgttaactccaaaacacactaacataaacacccatgaagattggaacctctcaactgtttactgaaacctgacatctctgtaaaacttgcacaactatccaataaaaagagaaagttattgccaatgccatgtatttttctaatactccattcttgtgtacatggaagtgctgatggaatcacacttataatgtagatgaatgtttctaacctcattattatgtttcgtgctgtgtattatctattatgcttaaacaggtcaaaagccataagcactcctgatgtgaatatttcaactgatgatggtgttcatgatgtaatctatgggataacggatgatcaagctgctgagatccaggctcagggattatctaaggattttgtgcagtgggttaatcaaggagagacattttggtactgatattccaagatgggcgtaccatgtaaattcaagccacataatggttgcacttgcaaaaaggggggaaaataagggagaagtctacatgatggcagtccagacctcatttcaaagcatattaactcttaaagaccattgcaaggagggaccatcaatgtgcatgagattgtttgtcaaccatcagcaattcagcattctcttttcggtatacgaatatgatgatgggcttagagtcacacgcactgttagaagacttgtctagggaagtgtaccattctgttcatttattgaagcttgctcaccaggctggtagatagtgcattgttattattttttcttaaaaggaatgaaagaatgtaggtagtttattctttttaagatgtaccattgtccaggcatgatccccatctctccatcgtgtaaatatatatgtcccaagtgttccacttttcccttttccttccatgagagttgaggtgggcatgaaagcaccatttttccctcagtctctttgtatgggttttctgaaatcatgtacatttatattttgtggcaagcggagagattgttgtgtaatttccattgtaccaaacgtccaaacccctcttaccaatagaagtctcttggactgtttgtcacattgcagattgctttaatacttgctttaaactatctgattatgtgtaaaattttcgtgtgattccttagggtccc

SEQ ID NO: 61996 - DNA, 4073 bp, Zea Mays
ctcctcctccccctccccgcctggacaccgtcacaccggtcagcctccacgcctcacggatttcgcacccgaaaaaaaaatagaaagcgaaatcaaccaatctcctatcattcacggcctcgccagcgcctcctcctccccctcctccccagaaatttccccacttgcgccgctcgcgatcggcgcccgagctcccggaatcccggcccggtttcgcgaccgttcgccgcgagccttgggccggtccgggctctgattcgcgggcgccgcggccgtggttcgcgcggggaatgctctacctcaagcagccgggcggcgcggacttagggttccggcgggcggcggtggcggctgctgctgctgctgctgcggggctgtgatctgccgctgtggtggatgcgaggttgagccagcacgcgccggggattctgctggcaatggcggaggcggacagctgcctcgagagcttcgagctctacgagtccgagtcgaaattctatattcttggaactaactgtaacaagacaatatggagattactcaagattgatagaatggagccatcagaggtcaatgtacatgaggattctactgtgctctcacagagtgattaccttgatatgctaaaaaatctagacgaacaacacaggtcaactggtggagtcaaatttgtcaccaactgttttggaatcatcggtttcattaagttccttgggccctattacatgttaattattactgagcagagaaagattggggatatatttggtcatatggtgtaccaagtttctaagactgcgatgattgagttatcaaattccactacgagaccaaaattaattaattccaaggacgagaacaggtacaagaagctcttgcagacaattgatcttagaaaagatttcttttttagccactcatatcatataatgagaagtcttcaaaagaactttaatgatccacaagaagggtgggaactatatgacacaatgttcgtctggaatgagttcctaactcgagggattcgtgacattctgaaaactacactctggactgttgcattagtctatggtttttttaagcaggacaaacttgcgatatgtgggaaggatattatgctgactctcattgctagacgctcgaggcattatgctggcaccaggtatctaaagaggggtgtgaatgaggagggcagagtagcaaatgatgttgagactgagcaaattgtttatgaagacatgcttggaccatggcaaataagctctgttgtgcagaacaggggttcgattccactattctggtcccaggagacatcaaagctgaatcttaagcctgatatcatatgtaagcattgaaatccttgttcaatgtgttaaatattattcaaacatttttttttcgtgcagtgcatggaaaggacaaaaattatgaggctaccaggcttcattttgaaaatcttaggaaaagatatggaaatcctatcatcatcttaaacttgattaagacacgtgagaagagaccacgtgaaatcatactccgtcgggaatttgacagagcaataaagattattaatagtggtctaccaggcgaagatcatttgagatatttacattgggatcttcataagaactctcaaagcaaaagtacaaatgcgcttcaagtgcttttgaaggtggcatttgaagctttgaacttgacagaattcttttatcgtcaagtttccccagctcaaagggcagagaattcccctaatttaagccctacactgaaaaatggttttggtcctcatgtgtgtgatgatgacaacaattgtggcaatgcagactatgttgatgatcttgatgacatttcccaagaagatacctgtggcaattatgatcctggcaatggaattgcagaagatagatctgaggtcaatggatctactcaaataaagcctccaaaatttcaaaagggtgtattacgtacaaactgtatagattgtttggatcgcacaaatgttgctcaatatgcctatggcctagctgctctaggataccagttacatgcacttggttctgtagaatctccagaagttcatttagactcccctttgtctcggcatttgatgcatttttatgaacggatgggtgacacacttgctttacagtatggtggttctgctgctcacaataagatattctctgcaaaaagagggcacttgaagttcgccattcaatctcaagagttctttaggactctgcaacggtactacagtaatgcctatatggatgcttacaaacaagcagcgataaacttatttctaggatacttccaaccgcaggtgggaaaacctgcactttgggagccagaatctggtgacgagcatgtacttgatgacgagacaagatatttgtcagtaaattgatgaagagggcaagatcagatggcagcattcttaataaaagcaaactatcaatgtccagtaatggcccaaatggagttttaaactcagcacttactggttcaaaaaatgaagggcaacatccaaactggagttctgattcagtgcatgggatgtcttcagcctctgacaattccatgtcaaagtcaaggtatactccgacagtgtctcacattaagcatataagctgtgaactagactattacaatggttctggtgattcaaatttcctggatcttgactggctttcagcttcagacaatgaaaggttgttcatgctgttcttttccttttgtggtctatcaggcgtcctgttttttgtgcatggtatggtatacacagaaatgacagtgagaagtaaatagtttgtcatttgttattaactccctggacatcttttctcagaaaagaagaaaaactctgcataaattgtctaagtggattatcaggagacctgagcatcattgcattaactaggaaatagttcaagaagaacgttaactccaaaacacactaacataaacacccatgaagattggaacctctcaactgtttactgaaacctgacatctctgtaaaacttgcacaactatccaataaaaagagaaagttattgccaatgccatgtatttttctaatactccattcttgtgtacatggaagtgctgatggaatcacacttataatgtagatgaatgtttctaacctcattattatgtttcgtgctgtgtattatctattatgcttaaacaggtcaaaagccataagcactcctgatgtgaatatttcaactgatgatggtgttcatgatgtaatctatgggataacggatgatcaagctgctgagatccaggctcagggattatctaaggattttgtgcagtgggttaatcaaggagagacattttggtactgatattccaagatgggcgtaccatgtaaattcaagccacataatggttgcacttgcaaaaaggggggaaaataagggagaagtctacatgatggcagtccagacctcatttcaaagcatattaactcttaaagaccattgcaaggagggaccatcaatgtgcatgagattgtttgtcaaccatcagcaattcagcattctcttttcggtatacgaatatgatgatgggcttagagtcacacgcactgttagaagacttgtctagggaagtgtaccattctgttcatttattgaagcttgctcaccaggctggtagatagtgcattgttattattttttcttaaaaggaatgaaagaatgtaggtagtttattctttttaagatgtaccattgtccaggcatgatccccatctctccatcgtgtaaatatatatgtcccaagtgttccacttttcccttttccttccatgagagttgaggtgggcatgaaagcaccatttttccctcagtctctttgtatgggttttctgaaatcatgtacatttatattttgtggcaagcggagagattgttgtgtaatttccattgtaccaaacgtccaaacccctcttaccaatagaagtctcttggactgtttgtcacattgcagattgctttaatacttgctttaaactatctgattatgtgtaaaattttcgtgtgattccttagggtccc

SEQ ID NO: 61997 - DNA, 4002 bp, Zea Mays
ccctcctcctccccctccccgcctggacaccgtcacaccggtcagcctccacgcctcacggatttcgcacccgaaaaaaaaatagaaagcgaaatcaaccaatctcctatcattcacggcctcgccagcgcctcctcctccccctcctccccagaaatttccccacttgcgccgctcgcgatcggcgcccgagctcccggaatcccggcccggtttcgcgaccgttcgccgcgagccttgggccggtccgggctctgattcgcgggcgccgcggccgtggttcgcgcggggaatgctctacctcaagcagccgggcggcgcggacttagggttccggcgggcggcggtggcggctgctgctgctgctgctgcggggctgtgatctgccgctgtggtggatgcgaggttgagccagcacgcgccggggattctgctggcaatggcggaggcggacagctgcctcgagagcttcgagctctacgagtccgagtcgaaattctatattcttggaactaactgtaacaagacaatatggagattactcaagattgatagaatggagccatcagaggtcaatgtacatgaggattctactgtgctctcacagagtgattaccttgatatgctaaaaaatctagacgaacaacacaggtcaactggtggagtcaaatttgtcaccaactgttttggaatcatcggtttcattaagttccttgggccctattacatgttaattattactgagcagagaaagattggggatatatttggtcatatggtgtaccaagtttctaagactgcgatgattgagttatcaaattccactacgagaccaaaattaattaattccaaggacgagaacaggtacaagaagctcttgcagacaattgatcttagaaaagatttcttttttagccactcatatcatataatgagaagtcttcaaaagaactttaatgatccacaagaagggtgggaactatatgacacaatgttcgtctggaatgagttcctaactcgagggattcgtgacattctgaaaactacactctggactgttgcattagtctatggtttttttaagcaggacaaacttgcgatatgtgggaaggatattatgctgactctcattgctagacgctcgaggcattatgctggcaccaggtatctaaagaggggtgtgaatgaggagggcagagtagcaaatgatgttgagactgagcaaattgtttatgaagacatgcttggaccatggcaaataagctctgttgtgcagaacaggggttcgattccactattctggtcccaggagacatcaaagctgaatcttaagcctgatatcatattgcatggaaaggacaaaaattatgaggctaccaggcttcattttgaaaatcttaggaaaagatatggaaatcctatcatcatcttaaacttgattaagacacgtgagaagagaccacgtgaaatcatactccgtcgggaatttgacagagcaataaagattattaatagtggtctaccaggcgaagatcatttgagatatttacattgggatcttcataagaactctcaaagcaaaagtacaaatgcgcttcaagtgcttttgaaggtggcatttgaagctttgaacttgacagaattcttttatcgtcaagtttccccagctcaaagggcagagaattcccctaatttaagccctacactgaaaaatggttttggtcctcatgtgtgtgatgatgacaacaattgtggcaatgcagactatgttgatgatcttgatgacatttcccaagaagatacctgtggcaattatgatcctggcaatggaattgcagaagatagatctgaggtcaatggatctactcaaataaagcctccaaaatttcaaaagggtgtattacgtacaaactgtatagattgtttggatcgcacaaatgttgctcaatatgcctatggcctagctgctctaggataccagttacatgcacttggttctgtagaatctccagaagttcatttagactcccctttgtctcggcatttgatgcatttttatgaacggatgggtgacacacttgctttacagtatggtggttctgctgctcacaataagatattctctgcaaaaagagggcacttgaagttcgccattcaatctcaagagttctttaggactctgcaacggtactacagtaatgcctatatggatgcttacaaacaagcagcgataaacttatttctaggatacttccaaccgcaggtgggaaaacctgcactttgggagccagaatctggtgacgagcatgtacttgatgacgagacaagtaaattgatgaagagggcaagatcagatggcagcattcttaataaaagcaaactatcaatgtccagtaatggcccaaatggagttttaaactcagcacttactggttcaaaaaatgaagggcaacatccaaactggagttctgattcagtgcatgggatgtcttcagcctctgacaattccatgtcaaagtcaaggtatactccgacagtgtctcacattaagcatataagctgtgaactagactattacaatggttctggtgattcaaatttcctggatcttgactggctttcagcttcagacaatgaaaggttgttcatgctgttcttttccttttgtggtctatcaggcgtcctgttttttgtgcatggtatggtatacacagaaatgacagtgagaagtaaatagtttgtcatttgttattaactccctggacatcttttctcagaaaagaagaaaaactctgcataaattgtctaagtggattatcaggagacctgagcatcattgcattaactaggaaatagttcaagaagaacgttaactccaaaacacactaacataaacacccatgaagattggaacctctcaactgtttactgaaacctgacatctctgtaaaacttgcacaactatccaataaaaagagaaagttattgccaatgccatgtatttttctaatactccattcttgtgtacatggaagtgctgatggaatcacacttataatgtagatgaatgtttctaacctcattattatgtttcgtgctgtgtattatctattatgcttaaacaggtcaaaagccataagcactcctgatgtgaatatttcaactgatgatggtgttcatgatgtaatctatgggataacggatgatcaagctgctgagatccaggctcagggattatctaaggattttgtgcagtgggttaatcaaggagagacattttggtactgatattccaagatgggcgtaccatgtaaattcaagccacataatggttgcacttgcaaaaaggggggaaaataagggagaagtctacatgatggcagtccagacctcatttcaaagcatattaactcttaaagaccattgcaaggagggaccatcaatgtgcatgagattgtttgtcaaccatcagcaattcagcattctcttttcggtatacgaatatgatgatgggcttagagtcacacgcactgttagaagacttgtctagggaagtgtaccattctgttcatttattgaagcttgctcaccaggctggtagatagtgcattgttattattttttcttaaaaggaatgaaagaatgtaggtagtttattctttttaagatgtaccattgtccaggcatgatccccatctctccatcgtgtaaatatatatgtcccaagtgttccacttttcccttttccttccatgagagttgaggtgggcatgaaagcaccatttttccctcagtctctttgtatgggttttctgaaatcatgtacatttatattttgtggcaagcggagagattgttgtgtaatttccattgtaccaaacgtccaaacccctcttaccaatagaagtctcttggactgtttgtcacattgcagattgctttaatacttgctttaaactatctgattatgtgtaaaattttcgtgtgattccttagggtccc

SEQ ID NO: 61998 - DNA, 4230 bp, Zea Mays
cctccccctcctcctccccctccccgcctggacaccgtcacaccggtcagcctccacgcctcacggatttcgcacccgaaaaaaaaatagaaagcgaaatcaaccaatctcctatcattcacggcctcgccagcgcctcctcctccccctcctccccagaaatttccccacttgcgccgctcgcgatcggcgcccgagctcccggaatcccggcccggtttcgcgaccgttcgccgcgagccttgggccggtccgggctctgattcgcgggcgccgcggccgtggttcgcgcggggaatgctctacctcaagcagccgggcggcgcggacttagggttccggcgggcggcggtggcggctgctgctgctgctgctgcggggctgtgatctgccgctgtggtggatgcgaggttgagccagcacgcgccggggattctgctggcaatggcggaggcggacagctgcctcgagagcttcgagctctacgagtccgagtcgaaattctatattcttggaactaactgtaacaagacaatatggagattactcaagattgatagaatggagccatcagaggtcaatgtacatgaggattctactgtgctctcacagagtgattaccttgatatgctaaaaaatctagacgaacaacacaggtcaactggtggagtcaaatttgtcaccaactgttttggaatcatcggtttcattaagttccttgggccctattacatgttaattattactgagcagagaaagattggggatatatttggtcatatggtgtaccaagtttctaagactgcgatgattgagttatcaaattccactacgagaccaaaattaattaattccaaggacgagaacaggtacaagaagctcttgcagacaattgatcttagaaaagatttcttttttagccactcatatcatataatgagaagtcttcaaaagaactttaatgatccacaagaagggtgggaactatatgacacaatgttcgtctggaatgagttcctaactcgagggattcgtgacattctgaaaactacactctggactgttgcattagtctatggtttttttaagcaggacaaacttgcgatatgtgggaaggatattatgctgactctcattgctagacgctcgaggcattatgctggcaccaggtatctaaagaggggtgtgaatgaggagggcagagtagcaaatgatgttgagactgagcaaattgtttatgaagacatgcttggaccatggcaaataagctctgttgtgcagaacaggggttcgattccactattctggtcccaggagacatcaaagctgaatcttaagcctgatatcatattgcatggaaaggacaaaaattatgaggctaccaggcttcattttgaaaatcttaggaaaagatatggaaatcctatcatcatcttaaacttgattaagacacgtgagaagagaccacgtgaaatcatactccgtcgggaatttgacagagcaataaagattattaatagtggtctaccaggcgaagatcatttgagatatttacattgggatcttcataagaactctcaaagcaaaagtacaaatgcgcttcaagtgcttttgaaggtggcatttgaagctttgaacttgacagaattcttttatcgtcaagtttccccagctcaaagggcagagaattcccctaatttaagccctacactgaaaaatggttttggtcctcatgtgtgtgatgatgacaacaattgtggcaatgcagactatgttgatgatcttgatgacatttcccaagaagatacctgtggcaattatgatcctggcaatggaattgcagaagatagatctgaggtcaatggatctactcaaataaagcctccaaaatttcaaaagggtgtattacgtacaaactgtatagattgtttggatcgcacaaatgttgctcaatatgcctatggcctagctgctctaggataccagttacatgcacttggttctgtagaatctccagaagttcatttagactcccctttgtctcggcatttgatgcatttttatgaacggatgggtgacacacttgctttacagtatggtggttctgctgctcacaataagatattctctgcaaaaagagggcacttgaagttcgccattcaatctcaagagttctttaggactctgcaacggtactacagtaatgcctatatggatgcttacaaacaagcagcgataaacttatttctaggatacttccaaccgcaggtgggaaaacctgcactttgggagccagaatctggtgacgagcatgtacttgatgacgagacaaggtaagctagcaatatatacctatgcttgaacttacagggttaagtatgctcctaataaaagaacaatatacgcttctctatgaattgaggcaataacagaattgtcactaaaggtggtgtgactacgatcctatatttattgcctctcctattaatatcacattaaactgacacaatataagtgatagtggaaccaaaaattgactagtagtctttgcacgagagcacaaagaattgtgaaacaatatctggtccacatgttctggtttaaccagttctaacttgccatgacacgagttagttatgccacggtttcttcgacagctatttggttcactgacacaaacacaactatggtgtgccacagttccttagcatcctgtcccacacttgatagattcatttttgtgccaaactttgccataagtgtggcgttgattttgctcgccacacttttcgtggcagccactgtttgccgaaggttaggcgtggcaaactacggcaccaaccaaacaggaaagtattaacttctttactttcatatgggtagcaaggaatcatttatattatatcttttcacatttttgttggggtgtttcctgactacttgttttaagaattaaataatccagattttattcacacatgcattgtgcaaatcaaaacaatatatcttgttagttatctgagattatagatatttgtcagtaaattgatgaagagggcaagatcagatggcagcattcttaataaaagcaaactatcaatgtccagtaatggcccaaatggagttttaaactcagcacttactggttcaaaaaatgaagggcaacatccaaactggagttctgattcagtgcatgggatgtcttcagcctctgacaattccatgtcaaagtcaaggtatactccgacagtgtctcacattaagcatataagctgtgaactagactattacaatggttctggtgattcaaatttcctggatcttgactggctttcagcttcagacaatgaaaggtcaaaagccataagcactcctgatgtgaatatttcaactgatgatggtgttcatgatgtaatctatgggataacggatgatcaagctgctgagatccaggctcagggattatctaaggattttgtgcagtgggttaatcaaggagagacattttggtactgatattccaagatgggcgtaccatgtaaattcaagccacataatggttgcacttgcaaaaaggggggaaaataagggagaagtctacatgatggcagtccagacctcatttcaaagcatattaactcttaaagaccattgcaaggagggaccatcaatgtgcatgagattgtttgtcaaccatcagcaattcagcattctcttttcggtatacgaatatgatgatgggcttagagtcacacgcactgttagaagacttgtctagggaagtgtaccattctgttcatttattgaagcttgctcaccaggctggtagatagtgcattgttattattttttcttaaaaggaatgaaagaatgtaggtagtttattctttttaagatgtaccattgtccaggcatgatccccatctctccatcgtgtaaatatatatgtcccaagtgttccacttttcccttttccttccatgagagttgaggtgggcatgaaagcaccatttttccctcagtctctttgtatgggttttctgaaatcatgtacatttatattttgtggcaagcggagagattgttgtgtaatttccattgtaccaaacgtccaaacccctcttaccaatagaagtctcttggactgtttgtcacattgcagattgctttaatacttgctttaaactatctgattatgtgtaaaattttcgtgtgattccttagggtccc

SEQ ID NO: 61999 - DNA, 159 bp, Zea Mays
acaagacctaaaaaatcagtcgcttccttgacagtctctctgaatctgtcatcatcaaaccatccaaattttgtaattcgacagaccagctgaattaaggacacaatgacaaagttctgcaatttaggcccccttgtgccaagatagtttatgacataa

SEQ ID NO: 62000 - DNA, 755 bp, Zea Mays
atgactgatgtggttatttttctctgtattatgcacagaatctcggtaacatttgttaacaaggatggctcagaaaagacaatacgtgttccagttggaatgtccatgttagaagctgctcatgaaaatgacatagagcttgaaggagcatgtgagggttcacttgcgtgttctacttgtcatgtaatagtaatggatgtaaactactataacaaattagaagatccagcagatgaagaaaatgatatgcttgaccttgcatttgggctcacagagacgtaagtcaagacccttcgaacagaatctcgcctcggctgccaagtgatcgcgaagcctgaactcgatggtattcggctggcattacctgtagccacaagaaacttcgcggtagatggctatgtaccgaaaccacactgaagacagttatgtacaccacactgaagacagttatgtacaccacactgaggcagtcatcttggggggcacggattcgtacaagtcaattttgtagtttataacctgtataacctaactacacctttgctacttgtagtcggggtagcttaggactaccttgttgagggagggttcgttcattgatgaacccctccattactcccagataacagtgcttccttcatctgggcgaataaacatctttcgttttgtgcgagagtatgtagtgtactcagaaatatttgcattgtagtgctcccaatatttgatcttttgctacctaggttgctattctgttc

SEQ ID NO: 62001 - DNA, 2377 bp, Zea Mays
cgaaccctcatttccccgtccgccgccagagcgggagaacacccgcgccgcctccagcagcacttggcggagagggcgcgacctctcttgccgacaaatcggtcctcttcctccgagcgcctaacgaggaataggtattcaagttttgtatcaccaagatggtgcaatacaatttcaagaagatcactgttgtccctcccgggaaggacttcattgacataatcctgtcccgcactcaaaggcagacaccgactgttgtccacaagggatatgctatctcccgcattcgccagttttacatgcgcaaggatcactacaagcttgcgctgggtcaaatcaacacagctaggaatatcattgcaaagatatccaaggactacttgaggctgctcaagtatggagactccctttaccggtgcaagtgtttgaaggtggctgcactaggtcgcatgtgcactgttgtgaagaggatcagtcctagtttggcttacttggagcagatcaggcagcacatggccaggcttccatccatagacccgaacacccgtactgtgctgatttgtggatatccaaatgtggggaagagttcgttcatgaacaaggttacaagggcagatgtggatgtccagccatatgcctttacaacaaaatccctgtttgttggccacacagattacaagtacctgcgctaccaagtgattgacacaccaggtatacttgaccggccttttgaagataggaacatcatagaaatgtgtagcatcactgcgctggcacacttgagggctgcggtgttgttctttctagacatttctggatcttgtgggtacagtatcgctcagcaagctgcactcttccacagtataaagtctctgtttatgaataagcctttggtcattgtgtgcaacaagactgacttgcagccacttgaagggctttctgaggatgacatgaagttagtcatggagatgaaggcagaggctatgaagactataactcaagctgttggtcctaatgaagagggtgttttattgactatgagcactttaacagatgatggtgtaatggctgtgaaaaatgctgcatgcgagaggcttcttgaacagagggtggatgtgaagatgaaatcaaagaagatgatggattgcttgaataggtttcatgttgctgttccaaagcctcgtgacaacaaggagcggcctgtttgcatccctccggctgttctggaagctagggcaaatgctgctgctaaggaaaagaagaagcttgagaaggacattgagaatgagaatggaggtgctggggtatattctgcaagtctcaagaaacattatatattggctaatgatgaatggaaggaagatattcttccagagatactggatggtcacaacgttgcagattttctggatccggatatcctagtaaggtgtgaagagttggaaagggaggaagggcttcgcctggaagaacaagctgcagaagatgctttccagattgatggccatgaactaactcaggaacagaaggagattctggctcagattaggaagaagaaggcattacttatccaagaacatagaatgaagaagagaactgcagaaagccgtcctattgtccctagaaagtttgacaaagataggaaattcacaactaataggatgggacggcagctttcctctatgggtgtggatcctattgctgccatcaatagagctcgtagccagtctaggggccgcaagcgtgagaggtcagtgagcagagctgcagctgatggtgacggtatggagatagatggccagcaatccaacaagaaactgcgtcgtacatcaaggtcgaggtcgaggtcacgggctcctgaggaggtcattcctggagaaggattcaaggactctgagcagaagaagaaggctatcaagaaagcaaaggcctctacaaggaacaggaacaaggatgctcgccgtggagaggctgaccgtgttattcctactttgaaaccaaagcatctgttctctgggaaacgcactcttggaaagacaagcaggcgataagctcagcacctcactgcatctggtaataaaggactggtgcactgttggtttgatcaatttgatgaaacgggtgttttttttgtgttcagccagcacttatttatgctactatttacgaaatttgtcttgatgtctctggtcctcttgatatatagttttagtgtttaattctgttgaatggtacaaagttatccatgtcccctactcaacatgtttgtagtttgcccatgagattttactatcgatccttgctcctctgtgctgctgtgtcgctgcaatttctcttaattatgatttcaaacttaatcaattagtggcatacttag

SEQ ID NO: 62002 - DNA, 1699 bp, Zea Mays
atgtcgtcgcgagcgccagcagcgccgacgacgaccgtggttcgcgcggcgggcacggaccacctgtgggcgaaggcggccgagctggagcgggacttcgcggggtacaagcggcgtctcgccgagaggagggcgcatgacgccgtcgccgaagtcgcgcgcgcggaggaggcacgcggcggggacgacgcggccgggaggggcagaaggtacgaggagtacgtgaggaggagggacgagcggctgcgccaggagtggcgcgcgcgcatggagcgcaaggaggccgaggtgcaggcgctctgggcgcgcctcgaccgcgccggctcgcgcggccggcgtggcggggacggcgagctcgcggcagccaccgccaccggtcacgccagagaggatcaagttaagccgccgcagaagcccggcggtaacttggtggtgaaagtgaagccatccacccctatccctgtgacgccacggggcaacctgggccagccgccggccgcgaagcccgcacggccccggaccagtgtgccgtcgtcgctggcggcaggcagcccgaggctgtccacccccgaccccaggctgcgtccgtcgtcgcacctgcaacgggagctgcggcaagcgcaaccacagccacccgccacgccacggaaggagaacaggctgccgccgccgccgtccaccgcggcatcaccggccacgcccaggccgaggacgacgatgctgtcacggagcaggagcatgttcaaggaccgcggctgctcctctgtcgccgtcgccgtcggcgagagccccaggccgtcgcggttccagccccctcggtcgagctacgaaggtgccagcaacctcaagaaaccggctccttcctgttccagggaccaggcggttgtcgccgatcgcaggaaggcatcgtctgccgtcgcccccgagccgtttctcgttaaagcatcacgcgacgacatgccagcgcctctggtgttggtggcttcgaaggagagggacctaccttaccgcagcggcgcgatctcgccggccggctgtgcaaacgaggacagtaagagcaacgtccaagagcacgtcgatcgatcaccggacaagttcgggagcgaagagatcaccggagactctgacaccgagccgagctacgtgtacgtcaagaaggacagcgacgagcaaatcccggggcctcctcctcccgaaaccccagcagcagcagcagcagcagctgacgacgcggaagaagagttccgaagggagagctctgagtctctgtactcgaacgtccagtcctcattctccccgagatccgagctcgctagcgctgcatcgtcggccaccaccggctcctccccgcgccccagcgccaccgcgcagtcgccggaggccagcgtctcaccacggccaaggaagagcgcggaagcggaggagggtgccgagaagcgagtgccagctccgaccacgaccccgaggagcagtgcgcagtcaccgatggacgccgtcaacgggctcaagcggctgctaacgttcgggaagagaagcggcaacggcaaggccagcgaggcagcggcggctccacgtgctcccccggctcgtgatggtgattcctccacccttctggacaacagctacgtcatctccccgaacgttgggtccttgcaaagcattgctgcgagttctgaactgaaggaaccagtcctgcacg

SEQ ID NO: 62003 - DNA, 901 bp, Zea Mays
aaattccttacacatttcacagctatatgtttttccttgataagctggaagggcaggtctagtgcacttgtgagagttgtctcattgagttatcaggtcatggctttgaaggcttgtctcggtttacctctaccctagaccctactcatgtcaactatattaatgctcatgcaacatcaacccttgctggtgatctggcagaggtgaatgccatcaagcaagtcttcaaggacccatctgggattaaaataaatgcaaccaagtccatgataggacattgccttggcgcagcaggcggtttggaagccattgctactattaaagcgataactactggatgggtgcatccaagcataaaccaatttaacccagaggaagcagttgaatttgacactgtacctaatgtaaaaaagcagcatgaagtgaatgttggtatctcaaattcctttggatttggaggtcacaattctgtcgtagtatttgcaccatttaagccataaggtgttccttgcctcacaaatcttggtcagaacagtgagatctgatttctgcgttcaattttcatgtgttctcttcgggggggaagtaatgtcagatttgaaccagcaacgttaaaaatgaactaaagatgagatacattgcgttttagatgactccatgttcacttagattgagcgcggctgtacaacattcctttgaaccatttgtaattgattgtactgtttttcatgtaatggaagaggagtcttgtagatgcacatctggaccttctagttaaatagcatacaaatgaatttggaaggcaggaattctgtccctattgctggatctggactcttttatgcatttttttttaaaatggctatatatacaaacgcgcgcttcaattaaacttgcacta

SEQ ID NO: 62004 - DNA, 2065 bp, Zea Mays
cgccgctgtaggctgtagcgtcggttggacgtcgtgagcgtgcagagcaattaagcaaagcagggcttgggtaaatcattattgaaagcatctcccttttacatgtaaccttgcatacaatatctgttaagatgagttcactaaataaagttgtttcaaatagtggagatgcatgttcagtcttagctagtaaagtcacatcattaaatcccaatgcagcggagtttgtaccgtcatttgttaaaccatcttttggaaatggtacagttctagataagtcagatttcaggggttcttctggaaaaacaattctagataggcctgagccatcaaagtctaataactcagatgatgaggcacaccagttttggcataagcagcttccggatgacattattccagacttcacttcttttgagaaagttgaacaagggcctgaactgtcccttgctggattatccttgaatgcaccccccttttatgggacaacttccagtcgcttctcaagagaatatcacgaattatcttctccagttaccaagggcctggaactggaactagaacatactaatatgctatatgaagataaaagcaactgggagcaaaattatattggtgatcttcatattgctaatggaaaccaggaccttcattatgattctgaatctggtgtaagcttttctgatagctttgctagtgagtatgttgccccatcagatggcctttttgctcccctggagtacttggcatctcagttccctggattttcagcagagagccttgcagagctttactacgcaaatgggtgtgatttcaaccatactattgaaatcctcacccagctagagatgcaagttgatgctacacccaatcacacactgaatctgccccacagcacaccgaacttcagcactggggatttccctgcacttccaacagctgaggaccaaaatggtttcaatcagggtaatgtggatgtacttggcatgttcaatgggcgcagttcatctgcgatgcctactggagctggtgattttgtttcagccgttcgcaaacttgcatcgcagaactctggccagtggaagtttaaaaaaggtcctgagtatggtaatggcatttcagctctttctgtacccaagcagtacagttctagcactaaacaatcgtctgggaacaagtttcaaagcatcagcagtggaagagttgccccatggcttgagactggtgatgcagtgggtaatactcatctgatactctgaagtctttctggtccatattgcacagttccctctacgtttcatgtttggatgacaagtatgtactcagaatcaaggggagaggctcgtgattttgctagggtccggaatacctgctttgagcaggctagacaggcttacttggttggcaacaaggctcttgcgaaggagctcagcatgaaggggcaggcctacaatgtgcaaatgaaagcggctcatgagaaagctagagaagctatttaccgacaaaggaatcctgtttcttcccaacgtgggggtggtgaccacctgattgatttacatggcctgcatgtgaacgaagcaatccacatcctgaagggtgagctcaccgccttgaagagcgcggcgagggcagcaggggagaggatgcaagtcatggtttgcgttggaacaggccaccacaccaagggctctcgcactgcgaggttgcccatcgctgtggagcagttcctgctggatgaaggcctccagtacacgcagcctcaggcgggtctgctccgagtgatggtgtactaacatctcttaggtgagacatcacggtgaggaaaaaaactccaaaaaaagagaaaagagatgtacgaaaacgcaggaaaaaaaagcgtcgttggagcacgcactgttattccgtgtagctgtatattaaaagaggcagcaggagaatagcctgacaacaggatacagtgtaaaattatacgtagcttccttcattcaattcacattccttttccatccatccgctgctgtgcgaggtaagtggctgctgaacactgcgacgcacttggggccat

SEQ ID NO: 62005 - DNA, 1264 bp, Zea Mays
cgccgctgtaggctgtagcgtcggttggacgtcgtgagcgtgcagagcaattaagcaaagcagctttgctagtgagtatgttgccccatcagatggcctttttgctcccctggagtacttggcatctcagttccctggattttcagcagagagccttgcagagctttactacgcaaatgggtgtgatttcaaccatactattgaaatcctcacccagctagagatgcaagttgatgctacacccaatcacacactgaatctgccccacagcacaccgaacttcagcactggggatttccctgcacttccaacagctgaggaccaaaatggtttcaatcaggaactctggccagtggaagtttaaaaaaggtcctgagtatggtaatggcatttcagctctttctgtacccaagcagtacagttctagcactaaacaatcgtctgggaacaagtttcaaagcatcagcagtggaagagttgccccatggcttgagactggtgatgcagtggcaagtatgtactcagaatcaaggggagaggctcgtgattttgctagggtccggaatacctgctttgagcaggctagacaggcttacttggttggcaacaaggctcttgcgaaggagctcagcatgaaggggcaggcctacaatgtgcaaatgaaagcggctcatgagaaagctagagaagctatttaccgacaaaggaatcctgtttcttcccaacgtgggggtggtgaccacctgattgatttacatggcctgcatgtgaacgaagcaatccacatcctgaagggtgagctcaccgccttgaagagcgcggcgagggcagcaggggagaggatgcaagtcatggtttgcgttggaacaggccaccacaccaagggctctcgcactgcgaggttgcccatcgctgtggagcagttcctgctggatgaaggcctccagtacacgcagcctcaggcgggtctgctccgagtgatggtgtactaacatctcttaggtgagacatcacggtgaggaaaaaaactccaaaaaaagagaaaagagatgtacgaaaacgcaggaaaaaaaagcgtcgttggagcacgcactgttattccgtgtagctgtatattaaaagaggcagcaggagaatagcctgacaacaggatacagtgtaaaattatacgtagcttccttcattcaattcacattccttttccatccatccgctgctgtgcgaggtaagtggctgctgaacactgcgacgcacttggggccat

SEQ ID NO: 62006 - DNA, 1104 bp, Zea Mays
cgccgctgtaggctgtagcgtcggttggacgtcgtgagcgtgcagagcaattaagcaaagcagatgcaagttgatgctacacccaatcacacactgaatctgccccacagcacaccgaacttcagcactggggatttccctgcacttccaacagctgaggaccaaaatggtttcaatcaggaactctggccagtggaagtttaaaaaaggtcctgagtatggtaatggcatttcagctctttctgtacccaagcagtacagttctagcactaaacaatcgtctgggaacaagtttcaaagcatcagcagtggaagagttgccccatggcttgagactggtgatgcagtggcaagtatgtactcagaatcaaggggagaggctcgtgattttgctagggtccggaatacctgctttgagcaggctagacaggcttacttggttggcaacaaggctcttgcgaaggagctcagcatgaaggggcaggcctacaatgtgcaaatgaaagcggctcatgagaaagctagagaagctatttaccgacaaaggaatcctgtttcttcccaacgtgggggtggtgaccacctgattgatttacatggcctgcatgtgaacgaagcaatccacatcctgaagggtgagctcaccgccttgaagagcgcggcgagggcagcaggggagaggatgcaagtcatggtttgcgttggaacaggccaccacaccaagggctctcgcactgcgaggttgcccatcgctgtggagcagttcctgctggatgaaggcctccagtacacgcagcctcaggcgggtctgctccgagtgatggtgtactaacatctcttaggtgagacatcacggtgaggaaaaaaactccaaaaaaagagaaaagagatgtacgaaaacgcaggaaaaaaaagcgtcgttggagcacgcactgttattccgtgtagctgtatattaaaagaggcagcaggagaatagcctgacaacaggatacagtgtaaaattatacgtagcttccttcattcaattcacattccttttccatccatccgctgctgtgcgaggtaagtggctgctgaacactgcgacgcacttggggccat

SEQ ID NO: 62007 - DNA, 1834 bp, Zea Mays
cgccgctgtaggctgtagcgtcggttggacgtcgtgagcgtgcagagcaattaagcaaagcagggcttgggtaaatcattattgaaagcatctcccttttacatgtaaccttgcatacaatatctgttaagatgagttcactaaataaagttgtttcaaatagtggagatgcatgttcagtcttagctagtaaagtcacatcattaaatcccaatgcagcggagtttgtaccgtcatttgttaaaccatcttttggaaatggtacagttctagataagtcagatttcaggggttcttctggaaaaacaattctagataggcctgagccatcaaagtctaataactcagatgatgaggcacaccagttttggcataagcagcttccggatgacattattccagacttcacttcttttgagaaagttgaacaagggcctgaactgtcccttgctggattatccttgaatgcaccccccttttatgggacaacttccagtcgcttctcaagagaatatcacgaattatcttctccagttaccaagggcctggaactggaactagaacatactaatatgctatatgaagataaaagcaactgggagcaaaattatattggtgatcttcatattgctaatggaaaccaggaccttcattatgattctgaatctggtgtaagcttttctgatagctttgctagtgagtatgttgccccatcagatggcctttttgctcccctggagtacttggcatctcagttccctggattttcagcagagagccttgcagagctttactacgcaaatgggtgtgatttcaaccatactattgaaatcctcacccagctagagatgcaagttgatgctacacccaatcacacactgaatctgccccacagcacaccgaacttcagcactggggatttccctgcacttccaacagctgaggaccaaaatggtttcaatcaggctctttctgtacccaagcagtacagttctagcactaaacaatcgtctgggaacaagtttcaaagcatcagcagtggaagagttgccccatggcttgagactggtgatgcagtggcaagtatgtactcagaatcaaggggagaggctcgtgattttgctagggtccggaatacctgctttgagcaggctagacaggcttacttggttggcaacaaggctcttgcgaaggagctcagcatgaaggggcaggcctacaatgtgcaaatgaaagcggctcatgagaaagctagagaagctatttaccgacaaaggaatcctgtttcttcccaacgtgggggtggtgaccacctgattgatttacatggcctgcatgtgaacgaagcaatccacatcctgaagggtgagctcaccgccttgaagagcgcggcgagggcagcaggggagaggatgcaagtcatggtttgcgttggaacaggccaccacaccaagggctctcgcactgcgaggttgcccatcgctgtggagcagttcctgctggatgaaggcctccagtacacgcagcctcaggcgggtctgctccgagtgatggtgtactaacatctcttaggtgagacatcacggtgaggaaaaaaactccaaaaaaagagaaaagagatgtacgaaaacgcaggaaaaaaaagcgtcgttggagcacgcactgttattccgtgtagctgtatattaaaagaggcagcaggagaatagcctgacaacaggatacagtgtaaaattatacgtagcttccttcattcaattcacattccttttccatccatccgctgctgtgcgaggtaagtggctgctgaacactgcgacgcacttggggccat

SEQ ID NO: 62008 - DNA, 1720 bp, Zea Mays
cgccgctgtaggctgtagcgtcggttggacgtcgtgagcgtgcagagcaattaagcaaagcagggcttgggtaaatcattattgaaagcatctcccttttacatgtaaccttgcatacaatatctgttaagatgagttcactaaataaagttgtttcaaatagtggagatgcatgttcagtcttagctagtaaagtcacatcattaaatcccaatgcagcggagtttgtaccgtcatttgttaaaccatcttttggaaatggtacagttctagataagtcagatttcaggggttcttctggaaaaacaattctagataggcctgagccatcaaagtctaataactcagatgatgaggcacaccagttttggcataagcagcttccggatgacattattccagacttcacttcttttgagaaagttgaacaagggcctgaactgtcccttgctggattatccttgaatgcaccccccttttatgggacaacttccagtcgcttctcaagagaatatcacgaattatcttctccagttaccaagggcctggaactggaactagaacatactaatatgctatatgaagataaaagcaactgggagcaaaattatattggtgatcttcatattgctaatggaaaccaggaccttcattatgattctgaatctggtgtaagcttttctgatagctttgctagtgagtatgttgccccatcagatggcctttttgctcccctggagtacttggcatctcagttccctggattttcagcagagagccttgcagagctttactacgcaaatgggtgtgatttcaaccatactattgaaatcctcacccagctagagatgcaagttgatgctacacccaatcacacactgaatctgccccacagcacaccgaacttcagcactggggatttccctgcacttccaacagctgaggaccaaaatggtttcaatcaggcaagtatgtactcagaatcaaggggagaggctcgtgattttgctagggtccggaatacctgctttgagcaggctagacaggcttacttggttggcaacaaggctcttgcgaaggagctcagcatgaaggggcaggcctacaatgtgcaaatgaaagcggctcatgagaaagctagagaagctatttaccgacaaaggaatcctgtttcttcccaacgtgggggtggtgaccacctgattgatttacatggcctgcatgtgaacgaagcaatccacatcctgaagggtgagctcaccgccttgaagagcgcggcgagggcagcaggggagaggatgcaagtcatggtttgcgttggaacaggccaccacaccaagggctctcgcactgcgaggttgcccatcgctgtggagcagttcctgctggatgaaggcctccagtacacgcagcctcaggcgggtctgctccgagtgatggtgtactaacatctcttaggtgagacatcacggtgaggaaaaaaactccaaaaaaagagaaaagagatgtacgaaaacgcaggaaaaaaaagcgtcgttggagcacgcactgttattccgtgtagctgtatattaaaagaggcagcaggagaatagcctgacaacaggatacagtgtaaaattatacgtagcttccttcattcaattcacattccttttccatccatccgctgctgtgcgaggtaagtggctgctgaacactgcgacgcacttggggccat

SEQ ID NO: 62009 - DNA, 1889 bp, Zea Mays
cgccgctgtaggctgtagcgtcggttggacgtcgtgagcgtgcagagcaattaagcaaagcagggcttgggtaaatcattattgaaagcatctcccttttacatgtaaccttgcatacaatatctgttaagatgagttcactaaataaagttgtttcaaatagtggagatgcatgttcagtcttagctagtaaagtcacatcattaaatcccaatgcagcggagtttgtaccgtcatttgttaaaccatcttttggaaatggtacagttctagataagtcagatttcaggggttcttctggaaaaacaattctagataggcctgagccatcaaagtctaataactcagatgatgaggcacaccagttttggcataagcagcttccggatgacattattccagacttcacttcttttgagaaagttgaacaagggcctgaactgtcccttgctggattatccttgaatgcaccccccttttatgggacaacttccagtcgcttctcaagagaatatcacgaattatcttctccagttaccaagggcctggaactggaactagaacatactaatatgctatatgaagataaaagcaactgggagcaaaattatattggtgatcttcatattgctaatggaaaccaggaccttcattatgattctgaatctggtgtaagcttttctgatagctttgctagtgagtatgttgccccatcagatggcctttttgctcccctggagtacttggcatctcagttccctggattttcagcagagagccttgcagagctttactacgcaaatgggtgtgatttcaaccatactattgaaatcctcacccagctagagatgcaagttgatgctacacccaatcacacactgaatctgccccacagcacaccgaacttcagcactggggatttccctgcacttccaacagctgaggaccaaaatggtttcaatcaggaactctggccagtggaagtttaaaaaaggtcctgagtatggtaatggcatttcagctctttctgtacccaagcagtacagttctagcactaaacaatcgtctgggaacaagtttcaaagcatcagcagtggaagagttgccccatggcttgagactggtgatgcagtggcaagtatgtactcagaatcaaggggagaggctcgtgattttgctagggtccggaatacctgctttgagcaggctagacaggcttacttggttggcaacaaggctcttgcgaaggagctcagcatgaaggggcaggcctacaatgtgcaaatgaaagcggctcatgagaaagctagagaagctatttaccgacaaaggaatcctgtttcttcccaacgtgggggtggtgaccacctgattgatttacatggcctgcatgtgaacgaagcaatccacatcctgaagggtgagctcaccgccttgaagagcgcggcgagggcagcaggggagaggatgcaagtcatggtttgcgttggaacaggccaccacaccaagggctctcgcactgcgaggttgcccatcgctgtggagcagttcctgctggatgaaggcctccagtacacgcagcctcaggcgggtctgctccgagtgatggtgtactaacatctcttaggtgagacatcacggtgaggaaaaaaactccaaaaaaagagaaaagagatgtacgaaaacgcaggaaaaaaaagcgtcgttggagcacgcactgttattccgtgtagctgtatattaaaagaggcagcaggagaatagcctgacaacaggatacagtgtaaaattatacgtagcttccttcattcaattcacattccttttccatccatccgctgctgtgcgaggtaagtggctgctgaacactgcgacgcacttggggccat

SEQ ID NO: 62010 - DNA, 3273 bp, Zea Mays
cgccgctgtaggctgtagcgtcggttggacgtcgtgagcgtgcagagcaattaagcaaagcaggtgcactctttgctcaacttttttattgctattttggctgcgctcaagtgtaattattagtatgattgtggctggagttgcaagcaattgatgggtttgaagccttgagggcttcagtttgagaacggctactagggcagcatctcaagtttatccgttgctggctcatttgataacagcattaattcgttattttgttgcctattgtctgcttcgattgctgtttatgtatgtatacacaacaatgtttagttgaccagaaaaaaaaacatacacggcgttcgctttagctaaagcacagctgcaaccgctgcagctatggctggaaactactcagtgaagcactgttgaatggctgcagcagtcgtctgtttaagctcagctgaacagcttatagttgtgaaattggagggtgcaaacgaacaccatgttgcaaagaaaacacttcctttatgatgcagtaccctgctgcatcttcttttagtaaaggacgcatgcatatgagtgacaggaaacatctgctttttgtttctgtttgaacatgctatcggttttgggaaagaaagctacaattcttgggtctttgggaattaccaatttgattgatgttggtggtggcataaccgcctcactgtgactgggataataaggaaaatgctttctgaagcaatagcgataaggaggctcttctaagaaaaccttggccgcactgtctaatttatttaattgtggttttcattataggaaccaggaagtcatttattactattcaagtattatcctattgtaaagatctactaacaaagagctacctgatgctttctgattattatatctacttcatctggccgtaaatatagatacatctaggtttgtcgtaagtcaaacttagtcaactttgaccatcaataaaaaatttatgtacattgacaataggagattgttgttattagattcacttttaaaaacagtttcatttaagataagacttctatgtatatggatagtcaaagtttaaaaaatagcttgagttgggacaagcatggatggacatatatttatggtagggggaagtaattgtgtgtgaataataaatggctgtagccaacctgtaagtagggactttattcttgtagaccactgcatttttaagagtatttcactgacaagttttctatttaggctacattgatgaaccttgaaaagtctactttttagtgttcgtccaaggattgggtgctccaccatgcctttacataactcttttttccatttcttcgcagggcttgggtaaatcattattgaaagcatctcccttttacatgtaaccttgcatacaatatctgttaagatgagttcactaaataaagttgtttcaaatagtggagatgcatgttcagtcttagctagtaaagtcacatcattaaatcccaatgcagcggagtttgtaccgtcatttgttaaaccatcttttggaaatggtacagttctagataagtcagatttcaggggttcttctggaaaaacaattctagataggcctgagccatcaaagtctaataactcagatgatgaggcacaccagttttggcataagcagcttccggatgacattattccagacttcacttcttttgagaaagttgaacaagggcctgaactgtcccttgctggattatccttgaatgcaccccccttttatgggacaacttccagtcgcttctcaagagaatatcacgaattatcttctccagttaccaagggcctggaactggaactagaacatactaatatgctatatgaagataaaagcaactgggagcaaaattatattggtgatcttcatattgctaatggaaaccaggaccttcattatgattctgaatctggtgtaagcttttctgatagctttgctagtgagtatgttgccccatcagatggcctttttgctcccctggagtacttggcatctcagttccctggattttcagcagagagccttgcagagctttactacgcaaatgggtgtgatttcaaccatactattgaaatcctcacccagctagagatgcaagttgatgctacacccaatcacacactgaatctgccccacagcacaccgaacttcagcactggggatttccctgcacttccaacagctgaggaccaaaatggtttcaatcagggtaatgtggatgtacttggcatgttcaatgggcgcagttcatctgcgatgcctactggagctggtgattttgtttcagccgttcgcaaacttgcatcgcagaactctggccagtggaagtttaaaaaaggtcctgagtatggtaatggcatttcagctctttctgtacccaagcagtacagttctagcactaaacaatcgtctgggaacaagtttcaaagcatcagcagtggaagagttgccccatggcttgagactggtgatgcagtggcaagtatgtactcagaatcaaggggagaggctcgtgattttgctagggtccggaatacctgctttgagcaggctagacaggcttacttggttggcaacaaggctcttgcgaaggagctcagcatgaaggggcaggcctacaatgtgcaaatgaaagcggctcatgagaaagctagagaagctatttaccgacaaaggaatcctgtttcttcccaacgtgggggtggtgaccacctgattgatttacatggcctgcatgtgaacgaagcaatccacatcctgaagggtgagctcaccgccttgaagagcgcggcgagggcagcaggggagaggatgcaagtcatggtttgcgttggaacaggccaccacaccaagggctctcgcactgcgaggttgcccatcgctgtggagcagttcctgctggatgaaggcctccagtacacgcagcctcaggcgggtctgctccgagtgatggtgtactaacatctcttaggtgagacatcacggtgaggaaaaaaactccaaaaaaagagaaaagagatgtacgaaaacgcaggaaaaaaaagcgtcgttggagcacgcactgttattccgtgtagctgtatattaaaagaggcagcaggagaatagcctgacaacaggatacagtgtaaaattatacgtagcttccttcattcaattcacattccttttccatccatccgctgctgtgcgaggtaagtggctgctgaacactgcgacgcacttggggccat

SEQ ID NO: 62011 - DNA, 3269 bp, Zea Mays
cgccgctgtaggctgtagcgtcggttggacgtcgtgagcgtgcagagcaattaagcaaagcaggtgcactctttgctcaacttttttattgctattttggctgcgctcaagtgtaattattagtatgattgtggctggagttgcaagcaattgatgggtttgaagccttgagggcttcagtttgagaacggctactagggcagcatctcaagtttatccgttgctggctcatttgataacagcattaattcgttattttgttgcctattgtctgcttcgattgctgtttatgtatgtatacacaacaatgtttagttgaccagaaaaaaaaacatacacggcgttcgctttagctaaagcacagctgcaaccgctgcagctatggctggaaactactcagtgaagcactgttgaatggctgcagcagtcgtctgtttaagctcagctgaacagcttatagttgtgaaattggagggtgcaaacgaacaccatgttgcaaagaaaacacttcctttatgatgcagtaccctgctgcatcttcttttagtaaaggacgcatgcatatgagtgacaggaaacatctgctttttgtttctgtttgaacatgctatcggttttgggaaagaaagctacaattcttgggtctttgggaattaccaatttgattgatgttggtggtggcataaccgcctcactgtgactgggataataaggaaaatgctttctgaagcaatagcgataaggaggctcttctaagaaaaccttggccgcactgtctaatttatttaattgtggttttcattataggaaccaggaagtcatttattactattcaagtattatcctattgtaaagatctactaacaaagagctacctgatgctttctgattattatatctacttcatctggccgtaaatatagatacatctaggtttgtcgtaagtcaaacttagtcaactttgaccatcaataaaaaatttatgtacattgacaataggagattgttgttattagattcacttttaaaaacagtttcatttaagataagacttctatgtatatggatagtcaaagtttaaaaaatagcttgagttgggacaagcatggatggacatatatttatggtagggggaagtaattgtgtgtgaataataaatggctgtagccaacctgtaagtagggactttattcttgtagaccactgcatttttaagagtatttcactgacaagttttctatttaggctacattgatgaaccttgaaaagtctactttttagtgttcgtccaaggattgggtgctccaccatgcctttacataactcttttttccatttcttcgcagggcttgggtaaatcattattgaaagcatctcccttttacatgtaaccttgcatacaatatctgttaagatgagttcactaaataaagttgtttcaaatagtggagatgcatgttcagtcttagctagtaaagtcacatcattaaatcccaatgcagcggagtttgtaccgtcatttgttaaaccatcttttggaaatggtacagttctagataagtcagatttcaggggttcttctggaaaaacaattctagataggcctgagccatcaaagtctaataactcagatgatgaggcacaccagttttggcataagcagcttccggatgacattattccagacttcacttcttttgagaaagttgaacaagggcctgaactgtcccttgctggattatccttgaatgcaccccccttttatgggacaacttccagtcgcttctcaagagaatatcacgaattatcttctccagttaccaagggcctggaactggaactagaacatactaatatgctatatgaagataaaagcaactgggagcaaaattatattggtgatcttcatattgctaatggaaaccaggaccttcattatgattctgaatctggtgtaagcttttctgatagctttgctagtgagtatgttgccccatcagatggcctttttgctcccctggagtacttggcatctcagttccctggattttcagcagagagccttgcagagctttactacgcaaatgggtgtgatttcaaccatactattgaaatcctcacccagctagagatgcaagttgatgctacacccaatcacacactgaatctgccccacagcacaccgaacttcagcactggggatttccctgcacttccaacagctgaggaccaaaatggtttcaatcagggtaatgtggatgtacttggcatgttcaatgggcgcagttcatctgcgatgcctactggagctggtgattttgtttcagccgttcgcaaacttgcatcgcagaactctggccagtggaagtttaaaaaaggtcctgagtatggtaatggcatttcagctctttctgtacccaagcagtacagttctagcactaaacaatcgtctgggaacaagtttcaaagcatcagcagtggaagagttgccccatggcttgagactggtgatgcacaagtatgtactcagaatcaaggggagaggctcgtgattttgctagggtccggaatacctgctttgagcaggctagacaggcttacttggttggcaacaaggctcttgcgaaggagctcagcatgaaggggcaggcctacaatgtgcaaatgaaagcggctcatgagaaagctagagaagctatttaccgacaaaggaatcctgtttcttcccaacgtgggggtggtgaccacctgattgatttacatggcctgcatgtgaacgaagcaatccacatcctgaagggtgagctcaccgccttgaagagcgcggcgagggcagcaggggagaggatgcaagtcatggtttgcgttggaacaggccaccacaccaagggctctcgcactgcgaggttgcccatcgctgtggagcagttcctgctggatgaaggcctccagtacacgcagcctcaggcgggtctgctccgagtgatggtgtactaacatctcttaggtgagacatcacggtgaggaaaaaaactccaaaaaaagagaaaagagatgtacgaaaacgcaggaaaaaaaagcgtcgttggagcacgcactgttattccgtgtagctgtatattaaaagaggcagcaggagaatagcctgacaacaggatacagtgtaaaattatacgtagcttccttcattcaattcacattccttttccatccatccgctgctgtgcgaggtaagtggctgctgaacactgcgacgcacttggggccat

SEQ ID NO: 62012 - DNA, 1779 bp, Zea Mays
gtccctactgacaacaacttcacacggttttcacatgacaggtaatcctggactctgtggatattggcttggttcttcatgtcgttccactggccaccgagacaaaccgccaatctcaaaggctgccataattggtgttgctgtgggtggacttgttatcctcctgatgatcttagtagctgtatgcaggccacaccatccacctgcttttaaagatgccactgtaagcaagccagtgagcaatggtccacccaagctggtgatccttcatatgaacatggctcttcatgtctttgatgatataatgaggatgactgagaacttgagtgagaaatacatcattggatacggggcatcaagtacagtttataaatgtgttctaaagaattgcaaaccagtggcaataaaaaagctgtatgcccactaccctcagagccttaaggaatttgaaactgagctcgagactgttggtagcatcaaacaccggaatctagtcagccttcaagggtactcgttgtcacctgttgggaacctcctcttttatgattatatggagagtggcagcttatgggatgttttacatgaaggctcatccaagaagaacaaacttgactgggtgactcgcctacggatcgctcttggtgcagctcaaggcctcgcttaccttcaccatgactgcagcccacgaataattcaccgggacgtaaaatcaaagaatatactcctcgacaaagattatgaggcccatcttacagacttcggcatcgctaagagcttatgtgtctcgaagactcacacgtcaacctacgtcatgggcactattggttacattgatcccgagtacgcccgcacctcccgcctcaacgagaagtctgatgtctacagctacggcatcgttctgctggagctgctgaccggcaagaagccagtggacaacgagtgcaatctccatcacttgatcctatcgaagacggcgagcaacgaggtcatggagacggtggaccccgacgtgggagacacctgcaaggacctgggcgaggtgaagaagctgttccagctggcgctcctctgcaccaagcggcagccctcggaccggccgacgatgcacgaggtggtgcgcgtccttgactgcctggtgaacccggagccgccgccgcagccgcagcagcagcagcagaaggcgcacgcgcaccaccagctgccgccgcagccgtcgccgccggcctacgtcgacgagtacgtcagcctgcggggcaccggcgccctctcctgcgccaactcgtccagcacctcggacgccgagctgttcctcaagttcggcgaggccatctcgcagaacatggtgtaggggaagacgtagacgttcggtgaggcgccttgagtgaggccgattgcagggggagtagtttgactgacattttgtgggacgcagcgcaggagattaacatgggactcagtagctagggtgttgttagctgtaaaaaaagtcatgtgacgcaagagcagcggagcttcttcctcttctttatcccccctccccatttttctttggtggtctaacttactaggaggctgtattgatccatcatcatctctcccgttcctctgcttgatgatcttttgtgactttcgcggtcctctgtattgatccatgatcttttgtgacctctgctttattttctgggatctttacctcagaaccagccgccccccgttcgtattccggctgccggggctctgccatcccgtggcccccgggcacctggagagaggcatgtg

SEQ ID NO: 62013 - DNA, 3370 bp, Zea Mays
cccattaaggcaggctcgctgcagcacgtctcgcgctccatcgccgcctgtcctcttcctgggcggcgctggtggagatcaagaagtccttccgcaacgtcggcaacgtactgtacgattgggccggcgacgactactgctcctggcgcggcgtcctgtgcgacaacgtcacgttcgccgtcgccgcgctcaacctctctggcctcaaccttgagggtgagatctctccagccgtcggcagcctcaagagcctcgtctccatcgacctcaagtcaaatggcctatccgggcagatccctgatgagattggcgattgttcatcacttaggacgctggacttttcattcaacaacttggacggcgacataccattttcaatatcaaagctgaagcacctggagaacttgatattgaagaacaaccagctgattggtgcgatcccctcaacattgtcacagctcccaaatttgaagattctggacttggcacaaaacaaactgactggggagataccgaggcttatctattggaacgaggttcttcaatacttgggtttgcggggaaatcatttagaaggaagcctctctcctgatatgtgccagcttactggcctttggtactttgatgtgaagaacaatagtttgactggggcgataccagacaccattgggaactgtacaagttttcaggtcttggatttgtcttacaaccgctttactggaccaatcccattcaacattggtttcctacaagtggctacactatccttgcaagggaacaagttcactggcccaattccttcagtaattggccttatgcaggctctcgctgtcctagatctgagttacaaccaattatctggtcctataccatctatactaggcaacttgacatacactgagaagctgtacatgcaaggcaacaggttaactggatcgataccaccagagctaggaaatatgtcaacacttcattacctagaactgaatgataatcaacttactgggtcaattccaccagagcttggaaggctaacaggcttgtttgacctgaaccttgcgaataaccaccttgaaggaccaattcctgacaacctaagttcatgtgtgaatctcaatagcttcaatgcttatggcaacaagttaaatggaaccattcctcgttcgctgcggaaacttgaaagcatgacctatttaaatctttcatcaaatttcataagtggctctattcctattgagctatcaaggatcaacaatttggacacgttggacttatcctgtaacatgatgacgggtccaattccatcatccattggcaacctagagcatctattgaggcttaacttgagcaagaatgatctagttggattcatccctgcggagtttggtaatttgagaagtgtcatggagattgatttatcctataatcatcttggtggtctgattcctcaagaacttggaatgctgcaaaacctgatgttgctaaaactggaaaacaacaatataactggcgatgtctcttctctgatgaactgcttcagcctcaatatcttaaatgtgtcatacaataatttggctggtgctgtccctactgacaacaacttcacacggttttcacatgacagctttttaggtaatcctggactctgtggatattggcttggttcttcatgtcgttccactggccaccgagacaaaccgccaatctcaaaggctgccataattggtgttgctgtgggtggacttgttatcctcctgatgatcttagtagctgtatgcaggccacaccatccacctgcttttaaagatgccactgtaagcaagccagtgagcaatggtccacccaagctggtgatccttcatatgaacatggctcttcatgtctttgatgatataatgaggatgactgagaacttgagtgagaaatacatcattggatacggggcatcaagtacagtttataaatgtgttctaaagaattgcaaaccagtggcaataaaaaagctgtatgcccactaccctcagagccttaaggaatttgaaactgagctcgagactgttggtagcatcaaacaccggaatctagtcagccttcaagggtactcgttgtcacctgttgggaacctcctcttttatgattatatggagagtggcagcttatgggatgttttacatgaaggctcatccaagaagaacaaacttgactgggtgactcgcctacggatcgctcttggtgcagctcaaggcctcgcttaccttcaccatgactgcagcccacgaataattcaccgggacgtaaaatcaaagaatatactcctcgacaaagattatgaggcccatcttacagacttcggcatcgctaagagcttatgtgtctcgaagactcacacgtcaacctacgtcatgggcactattggttacattgatcccgagtacgcccgcacctcccgcctcaacgagaagtctgatgtctacagctacggcatcgttctgctggagctgctgaccggcaagaagccagtggacaacgagtgcaatctccatcacttgatcctatcgaagacggcgagcaacgaggtcatggagacggtggaccccgacgtgggagacacctgcaaggacctgggcgaggtgaagaagctgttccagctggcgctcctctgcaccaagcggcagccctcggaccggccgacgatgcacgaggtggtgcgcgtccttgactgcctggtgaacccggagccgccgccgcagccgcagcagcagcagcagaaggcgcacgcgcaccaccagctgccgccgcagccgtcgccgccggcctacgtcgacgagtacgtcagcctgcggggcaccggcgccctctcctgcgccaactcgtccagcacctcggacgccgagctgttcctcaagttcggcgaggccatctcgcagaacatggtgtaggggaagacgtagacgttcggtgaggcgccttgagtgaggccgattgcagggggagtagtttgactgacattttgtgggacgcagcgcaggagattaacatgggactcagtagctagggtgttgttagctgtaaaaaaagtcatgtgacgcaagagcagcggagcttcttcctcttctttatcccccctccccatttttctttggtggtctaacttactaggaggctgtattgatccatcatcatctctcccgttcctctgcttgatgatcttttgtgactttcgcggtcctctgtattgatccatgatcttttgtgacctctgctttattttctgggatctttacctcagaaccagccgccccccgttcgtattccggctgccggggctctgccatcccgtggcccccgggcacctggagagaggcatgtg

SEQ ID NO: 62014 - DNA, 4451 bp, Zea Mays
caaaactccaaactagagctagaggcctacgaagtagtaggaagctgctgctctcctccatagcccctaccccctcccctacgctgccactctatcgcccagccatacagcagctaccccgctgcctgtcactgagccagcgcggcgcaagtgcgcaaagccgagcgcgagaacccacgaaaccaacccagagcccccattaaggcaggctcgctgcagcacgtctcgcgctccatcgccgcctgtcctcttcctgtaatgtcactcccccgatgcctgtgcgcagctcagtggccatgacgacgacggccgcccgtgctctcgccgccctcgtgctcgtcaccgccgccgccgccgccgccgccgtcgccgacgatggttgccgatctgttccgttctctcttcacccgtttcgctttctttcttctctgggagtcctcttgttgcgtactggggagcaaagattcagggggggcggctgggttcgttaggattagtattttattagcgctgcaagtacgcgctttttggaggcatggtgattcgctagtgttctattccaccccctttttttattgctgtaagcccgtaacccgagtcttaacttaatccttgtgagctgtgcctcttctcatctcatcttcttgcctagtacgagcttttaactatcctgtccatgtttcaaaatgtgcttactatctctcttcatgttcggttctgtttatatgtgccttcttgtgctgcttgttggagcaaatgctcagagcatccttaaatcgtttgagcatccatcattgtttcttcatttggccctttcagtgctggaagcttggtttctgctgctaagccttgttctattcctgtgtggttttagctgtgttttggttttgccatcctgatccagtttcctatatctgaatgaatccaagcaacttcatatttcaccaccgtgtcgtatctgtgctttccaaatcttgacgtccctcgctttcctgcctgcaagcactaatccagaatccaactaccacgttacccaactccctttctgcggagattccgtttgccgagaactgtctgctcggatttctaccactctgtaacccgttctttgtgctaacgcggctggctctgcaccttccaggggcggcgctggtggagatcaagaagtccttccgcaacgtcggcaacgtactgtacgattgggccggcgacgactactgctcctggcgcggcgtcctgtgcgacaacgtcacgttcgccgtcgccgcgctcaacctctctggcctcaaccttgagggtgagatctctccagccgtcggcagcctcaagagcctcgtctccatcgacctcaagtcaaatggcctatccgggcagatccctgatgagattggcgattgttcatcacttaggacgctggacttttcattcaacaacttggacggcgacataccattttcaatatcaaagctgaagcacctggagaacttgatattgaagaacaaccagctgattggtgcgatcccctcaacattgtcacagctcccaaatttgaagattctggacttggcacaaaacaaactgactggggagataccgaggcttatctattggaacgaggttcttcaatacttgggtttgcggggaaatcatttagaaggaagcctctctcctgatatgtgccagcttactggcctttggtactttgatgtgaagaacaatagtttgactggggcgataccagacaccattgggaactgtacaagttttcaggtcttggatttgtcttacaaccgctttactggaccaatcccattcaacattggtttcctacaagtggctacactatccttgcaagggaacaagttcactggcccaattccttcagtaattggccttatgcaggctctcgctgtcctagatctgagttacaaccaattatctggtcctataccatctatactaggcaacttgacatacactgagaagctgtacatgcaaggcaacaggttaactggatcgataccaccagagctaggaaatatgtcaacacttcattacctagaactgaatgataatcaacttactgggtcaattccaccagagcttggaaggctaacaggcttgtttgacctgaaccttgcgaataaccaccttgaaggaccaattcctgacaacctaagttcatgtgtgaatctcaatagcttcaatgcttatggcaacaagttaaatggaaccattcctcgttcgctgcggaaacttgaaagcatgacctatttaaatctttcatcaaatttcataagtggctctattcctattgagctatcaaggatcaacaatttggacacgttggacttatcctgtaacatgatgacgggtccaattccatcatccattggcaacctagagcatctattgaggcttaacttgagcaagaatgatctagttggattcatccctgcggagtttggtaatttgagaagtgtcatggagattgatttatcctataatcatcttggtggtctgattcctcaagaacttggaatgctgcaaaacctgatgttgctaaaactggaaaacaacaatataactggcgatgtctcttctctgatgaactgcttcagcctcaatatcttaaatgtgtcatacaataatttggctggtgctgtccctactgacaacaacttcacacggttttcacatgacagctttttaggtaatcctggactctgtggatattggcttggttcttcatgtcgttccactggccaccgagacaaaccgccaatctcaaaggctgccataattggtgttgctgtgggtggacttgttatcctcctgatgatcttagtagctgtatgcaggccacaccatccacctgcttttaaagatgccactgtaagcaagccagtgagcaatggtccacccaagctggtgatccttcatatgaacatggctcttcatgtctttgatgatataatgaggatgactgagaacttgagtgagaaatacatcattggatacggggcatcaagtacagtttataaatgtgttctaaagaattgcaaaccagtggcaataaaaaagctgtatgcccactaccctcagagccttaaggaatttgaaactgagctcgagactgttggtagcatcaaacaccggaatctagtcagccttcaagggtactcgttgtcacctgttgggaacctcctcttttatgattatatggagagtggcagcttatgggatgttttacatgaaggctcatccaagaagaacaaacttgactgggtgactcgcctacggatcgctcttggtgcagctcaaggcctcgcttaccttcaccatgactgcagcccacgaataattcaccgggacgtaaaatcaaagaatatactcctcgacaaagattatgaggcccatcttacagacttcggcatcgctaagagcttatgtgtctcgaagactcacacgtcaacctacgtcatgggcactattggttacattgatcccgagtacgcccgcacctcccgcctcaacgagaagtctgatgtctacagctacggcatcgttctgctggagctgctgaccggcaagaagccagtggacaacgagtgcaatctccatcacttgatcctatcgaagacggcgagcaacgaggtcatggagacggtggaccccgacgtgggagacacctgcaaggacctgggcgaggtgaagaagctgttccagctggcgctcctctgcaccaagcggcagccctcggaccggccgacgatgcacgaggtggtgcgcgtccttgactgcctggtgaacccggagccgccgccgcagccgcagcagcagcagcagaaggcgcacgcgcaccaccagctgccgccgcagccgtcgccgccggcctacgtcgacgagtacgtcagcctgcggggcaccggcgccctctcctgcgccaactcgtccagcacctcggacgccgagctgttcctcaagttcggcgaggccatctcgcagaacatggtgtaggggaagacgtagacgttcggtgaggcgccttgagtgaggccgattgcagggggagtagtttgactgacattttgtgggacgcagcgcaggagattaacatgggactcagtagctagggtgttgttagctgtaaaaaaagtcatgtgacgcaagagcagcggagcttcttcctcttctttatcccccctccccatttttctttggtggtctaacttactaggaggctgtattgatccatcatcatctctcccgttcctctgcttgatgatcttttgtgactttcgcggtcctctgtattgatccatgatcttttgtgacctctgctttattttctgggatctttacctcagaaccagccgccccccgttcgtattccggctgccggggctctgccatcccgtggcccccgggcacctggagagaggcatgtg

SEQ ID NO: 62015 - DNA, 2813 bp, Zea Mays
cattaaggcaggctcgctgcagcacgtctcgcgctccatcgccgcctgtcctcttcctgtaatgtcactcccccgatgcctgtgcgcagctcagtggccatgacgacgacggccgcccgtgctctcgccgccctcgtgctcgtcaccgccgccgccgccgccgccgccgtcgccgacgatggggcggcgctggtggagatcaagaagtccttccgcaacgtcggcaacgtactgtacgattgggccggcgacgactactgctcctggcgcggcgtcctgtgcgacaacgtcacgttcgccgtcgccgcgctcgacctcaagtcaaatggcctatccgggcagatccctgatgagattggcgattgttcatcacttaggacgctggacttttcattcaacaacttggacggcgacataccattttcaatatcaaagctgaagcacctggagaacttgatattgaagaacaaccagctgattggtgcgatcccctcaacattgtcacagctcccaaatttgaagattctggacttggcacaaaacaaactgactggggagataccgaggcttatctattggaacgaggttcttcaatacttgggtttgcggggaaatcatttagaaggaagcctctctcctgatatgtgccagcttactggcctttggtactttgatgtgaagaacaatagtttgactggggcgataccagacaccattgggaactgtacaagttttcaggtcttggatttgtcttacaaccgctttactggaccaatcccattcaacattggtttcctacaagtggctacactatccttgcaagggaacaagttcactggcccaattccttcagtaattggccttatgcaggctctcgctgtcctagatctgagttacaaccaattatctggtcctataccatctatactaggcaacttgacatacactgagaagctgtacatgcaaggcaacaggttaactggatcgataccaccagagctaggaaatatgtcaacacttcattacctagaactgaatgataatcaacttactgggtcaattccaccagagcttggaaggctaacaggcttgtttgacctgaaccttgcgaataaccaccttgaaggaccaattcctgacaacctaagttcatgtgtgaatctcaatagcttcaatgcttatggcaacaagttaaatggaaccattcctcgttcgctgcggaaacttgaaagcatgacctatttaaatctttcatcaaatttcataagtggctctattcctattgagctatcaaggatcaacaatttggacacgttggacttatcctgtaacatgatgacgggtccaattccatcatccattggcaacctagagcatctattgaggcttaacttgagcaagaatgatctagttggattcatccctgcggagtttggtaatttgagaagtgtcatggagattgatttatcctataatcatcttggtggtctgattcctcaagaacttggaatgctgcaaaacctgatgttgctaaaactggaaaacaacaatataactggcgatgtctcttctctgatgaactgcttcagcctcaatatcttaaatgtgtcatacaataatttggctggtgctgtccctactgacaacaacttcacacggttttcacatgacagctttttaggtaatcctggactctgtggatattggcttggttcttcatgtcgttccactggccaccgagacaaaccgccaatctcaaaggctgccataattggtgttgctgtgggtggacttgttatcctcctgatgatcttagtagctgtatgcaggccacaccatccacctgcttttaaagatgccactgtaagcaagccagtgagcaatggtccacccaagctggtgatccttcatatgaacatggctcttcatgtctttgatgatataatgaggatgactgagaacttgagtgagaaatacatcattggatacggggcatcaagtacagtttataaatgtgttctaaagaattgcaaaccagtggcaataaaaaagctgtatgcccactaccctcagagccttaaggaatttgaaactgagctcgagactgttggtagcatcaaacaccggaatctagtcagccttcaagggtactcgttgtcacctgttgggaacctcctcttttatgattatatggagagtggcagcttatgggatgttttacatgaaggctcatccaagaagaacaaacttgactgggtgactcgcctacggatcgctcttggtgcagctcaaggcctcgcttaccttcaccatgactgcagcccacgaataattcaccgggacgtaaaatcaaagaatatactcctcgacaaagattatgaggcccatcttacagacttcggcatcgctaagagcttatgtgtctcgaagactcacacgtcaacctacgtcatgggcactattggttacattgatcccgagtacgcccgcacctcccgcctcaacgagaagtctgatgtctacagctacggcatcgttctgctggagctgctgaccggcaagaagccagtggacaacgagtgcaatctccatcacttggtaactattcttcagtctcctgcatttgtcgagttagaagccggaagtcgcttccttctctttacatcgctttggattccagcagtgctcaataattgctgaacaacgaccattaggcttgtgttcctacaaggggaccagcgacactaaacctagcatgtgagtagatctatctgcactgcagaccagctgtggactgatgcgctgatccattg

SEQ ID NO: 62016 - DNA, 2499 bp, Zea Mays
cgcggaaccaccgccgccacctcaccactccagctccagcccccgcccgccataatcgcgtccccttctcgtccttccagagcttcttaaaccacccggcccgctcccagcgtcccttctccgcccacagccagcggcgaactcgatcgagcaggatggggtttatcggcgcgcacggcgtggagacgctgaagcggtataggtacagtggagaggaccgctcggtggtggccaagtacgtgctgcagcccttctggagccgatgcgtcactctcttcccgctctggatgcctacatggttatgctttccgacatttcagatcacacttacaggattttcgtttctagtactatcagcgctgcttggctatatatgttcgcctcaccttgacactgctccccctagacttttgatgctgttgatggtaaacaagcaaggcgtactagctcatcgagtcctcttggagaactttttgatcatggatgtgatgcacttgcgtgtgctgtaaggattttctaagccctttcacctttttcttctccttcggcctttgagatgtttttctgatttgttgttagtttgaagcattggcccttggaagcaccttgatgtgtggaggatggacactttgtttctgggtagttgccgctgtcccgttctatcttgcaacctgggaacacttctttacaaatacgctcattctgcctacaataaatggaccaacggagggcctgatgctgatctatgtatcacatttgtttacattttttactggcgctgaatggtgggcacaggattttcggaaatcactaccctttttcggttggattccacttccatttctttctgaaattgaaattcctttatatgttcttgtgctgattcttatgatcgtatgtgctgttatacctactgttagatccaatgtcagcaatgtccaagaggtagttgaggcacgaaaaggaagcatggcattagcattagccatgtttggctttgctactctgcttttggaaacaatccttccttttattgtactgttagctggagttgctatctggtgctatctttctccttcaagtataatgaggaaccagccacatttgctcgtgattggaactggctttaattttggatatttggtgggaagaatgatacttgctcatttgtgtgatgaacccaaaggtctaaaatctgggatgttcatgtctctggtgtttctttgttttccaattgcaaatgctctcattgcaaagatcaacgatgggagtcctttagttgatgagcttgttctgctgctgctttattgtgcatatacagtgggtctctacctgcacctcgctgtgtcggttgtgcatgaaatcaaggatgcccttggaatctattgcttcaggtgtggaaactggaaacctccgtgtgctcttactgctcagaaaccaccctcccatgtttttaacctctcttccgctgctgctgccacgagaaaagacggtgatcaattgatcatgacaaagagcgacgttggcggcttctcccggagctgcaatggtacaggccgtggccgtggccgtgcctaccgggaggaggacaccggccagtcggccaccgcagtaccgcaccctttacatgagaagacgatgacgagagcgagagatccaggtacgatttcgagcttcatggccgacgtcagtacggcttctgctgtgtcgccgctcgagaaccggcgggcgggcccgagcagtgccatgcactgcaagtaccaaggcgacgaactggagtgcaaatggatggacagctgcgagaagatcaggccatccacccaccccatccggagaccggagaattatatggtcgtgctccactccgccttaagtgcacagcactgtaaacatgacagctcggtccaaagcgacgaactggacggcaaactcagttggaaacctggctttggctcaagaaaacagttttgttccaagccatctcgtgccagatcggtggatgtggatttgcgcggccagacatacttctcgaccgacttaatgccgattttcaatttattgttcggcgtcataactcgtggctccgagataacgcgtctcgatgtcatagactatagcgtcgagaatcggcctgctacggaagcttggagagtgttgctgcagaagctgcaaacggggctagtgcgatggatgagagtaggggcacaaccaccgtggatgcctcgctcgacacagacaacattgtttatggcactagcagattacgtctgcgtcgtcacatatgattcgacgcagagattaaatcgagtttgttctggtcttttagacaccattagacagatgcaagtctgtgccgatgagttaaagaggttgagtatccgcaaccatgtgcctgagtatctagagtacgtgcacaaaaataccctggttaatgccatgagtgctgttactgagcacaaatctagagcaagttcttattggtctgcaacctcttcttga

SEQ ID NO: 62017 - DNA, 3288 bp, Zea Mays
cccctgcaggccacgccttctcgccgctcgcggaaccaccgccgccacctcaccactccagctccagcccccgcccgccataatcgcgtccccttctcgtccttccagagcttcttaaaccacccggcccgctcccagcgtcccttctccgcccacagccagcggcgaactcgatcgagcaggatggggtttatcggcgcgcacggcgtggagacgctgaagcggtataggtacagtggagaggaccgctcggtggtggccaagtacgtgctgcagcccttctggagccgatgcgtcactctcttcccgctctggatgcctacatggttatgctttccgacatttcagatcacacttacaggattttcgtttctagtactatcagcgctgcttggctatatatgttcgcctcaccttgacactgctccccctaggtgggtccatcttgcccatggattacttctcttcttgtaccagtttgaagcattggcccttggaagcaccttgatgtgtggaggatggacactttgtttctgggtagttgccgctgtcccgttctatcttgcaacctgggaacaaggtttgggtgggatggagccaaaaaactggattcacctggcttcaacccacacccatggccccactgtgccaagatgtcaggattttcggaaatcactaccctttttcggttggattccacttccatttctttctgaaattgaaattcctttatatgttcttgtgctgattcttatgatcgtatgtgctgttatacctactgttagatccaatgtcagcaatgtccaagaggtagttgaggcacgaaaaggaagcatggcattagcattagccatgatccttccttttattgtactgttagctggagttgctatctggtgctatctttctccttcaagtataatgaggaaccagccacatttgctcgtgattggaactggctttaattttggatatttggtgggaagaatgatacttgctcatttgtgtgatgaacccaaaggtctaaaatctgggatgttcatgtctctggtgtttctttgttttccaattgcaaatgctctcattgcaaagatcaacgatgggagtcctttagttgatgagcttgttctgctgctgctttattgtgcatatacaggtgaacctgagcattttcattttcatacttgtgtcttaaattttacatacaaaatttaaggatcagatcatattagaatcagactctatttctatttaatttgtgaaccaaaattaattaatggctcaaacgaatcatgaagaaacatttggatcgcgattcattaccacctctagtcatatgaccatttatatggaactaacattcagtttgtccattatattcaacagtatcatgacttgcgggctcttcctaaagagcccgtgtagatttataaagtgctatttcggatagtatattctctaaagtcttcatttcctatggatcactgcgtcataaaactgtagttctttttcttgtatcactgttatgccgggtatgatcagggagaccaacatctgcgcatgttgtattctcatattcatagtatgtacaactaaactatgcatataaaaaatctgcagtgtgttatgtgtctgtcttctgggattacggtaccccctttctatgtcgatgtttctgcttggttatctggtcacactcagcatttacatagcactgttccatttttcttgtgacagtgggtctctacctgcacctcgctgtgtcggttgtgcatgaaatcaaggatgcccttggaatctattgcttcaggataactagaaaggaggcttgaactttgtagtgaagatatattattattacttcacaagtgctagcgaggagcaacacagttcgtcaccgtgcacgctgggagtggatttttggccaagcctgagcctgacggctgaacgcgtcggccggcccctgccttctgatagctcgatagcagtcgacggcctcttctccgtctcgtggggcgtttgcgtcgaggaagaaacaacaatgcagcctttaagccttcaattctcaggcccagtttgctgctttgcatgcttgttcgtctctcaggctcttcacggtcacggcgcagcgacctggcatgttaaaaaaaatgggccgatatatatatcatgtgcaggttttctttaccacaaaacttttgcctagcgcttttttagcaccgatctccttgcgttcggattgtggatggaaaatggcgatgatcagccacgagaaaagacggtgatcaattgatcatgacaaagagcgacgttggcggcttctcccggagctgcaatggtacaggccgtggccgtggccgtgcctaccgggaggaggacaccggccagtcggccaccgcagtaccgcaccctttacatgagaagacgatgacgagagcgagagatccaggtacgatttcgagcttcatggccgacgtcagtacggcttctgctgtgtcgccgctcgagaaccggcgggcgggcccgagcagtgccatgcactgcaagtaccaaggcgacgaactggagtgcaaatggatggacagctgcgagaagatcaggccatccacccaccccatccggagaccggagaattatatggtcgtgctccactccgccttaagtgcacagcactgtaaacatgacagctcggtccaaagcgacgaactggacggcaaactcagttggaaacctggctttggctcaagaaaacagttttgttccaagccatctcgtgccagatcggtggatgtggatttgcgcggccagacatacttctcgaccgacttaatgccgattttcaatttattgttcggcgtcataactcgtggctccgagataacgcgtctcgatgtcatagactatagcgtcgagaatcggcctgctacggaagcttggagagtgttgctgcagaagctgcaaacggggctagtgcgatggatgagagtaggggcacaaccaccgtggatgcctcgctcgacacagacaacattgtttatggcactagcagattacgtctgcgtcgtcacatatgattcgacgcagagattaaatcgagtttgttctggtcttttagacaccattagacagatgcaagtctgtgccgatgagttaaagaggttgagtatccgcaaccatgtgcctgagtatctagagtacgtgcacaaaaataccctggttaatgccatgagtgctgttactgagcacaaatctagagcaagttcttattggtctgcaacctcttcttga

SEQ ID NO: 62018 - DNA, 2768 bp, Zea Mays
atataccacgcgttgcgttaggctagatccgctcccctgcaggccacgccttctcgccgctcgcggaaccaccgccgccacctcaccactccagctccagcccccgcccgccataatcgcgtccccttctcgtccttccagagcttcttaaaccacccggcccgctcccagcgtcccttctccgcccacagccagcggcgaactcgatcgagcaggatggggtttatcggcgcgcacggcgtggagacgctgaagcggtataggtacagtggagaggaccgctcggtggtggccaagtacgtgctgcagcccttctggagccgatgcgtcactctcttcccgctctggatgcctacatggttatgctttccgacatttcagatcacacttacaggattttcgtttctagtactatcagcgctgcttggctatatatgttcgcctcaccttgacactgctccccctaggtgggtccatcttgcccatggattacttctcttcttgtaccagacttttgatgctgttgatggtaaacaagcaaggcgtactagctcatcgagtcctcttggagaactttttgatcatggatgtgatgcacttgcgtgtgcttttgaagcattggcccttggaagcaccttgatgtgtggaggatggacactttgtttctgggtagttgccgctgtcccgttctatcttgcaacctgggaacacttctttacaaatacgctcattctgcctacaataaatggaccaacggagggcctgatgctgatctatgtatcacatttgtttacattttttactggcgctgaatggtgggcacaggattttcggaaatcactaccctttttcggttggattccacttccatttctttctgaaattgaaattcctttatatgttcttgtgctgattcttatgatcgtatgtgctgttatacctactgttagatccaatgtcagcaatgtccaagaggtagttgaggcacgaaaaggaagcatggcattagcattagccatgatccttccttttattgtactgttagctggagttgctatctggtgctatctttctccttcaagtataatgaggaaccagccacatttgctcgtgattggaactggctttaattttggatatttggtgggaagaatgatacttgctcatttgtgtgatgaacccaaaggtctaaaatctgggatgttcatgtctctggtgtttctttgttttccaattgcaaatgctctcattgcaaagatcaacgatgggagtcctttagttgatgagcttgttctgctgctgctttattgtgcatatacagtgggtctctacctgcacctcgctgtgtcggttgtgcatgaaatcaaggatgcccttggaatctattgcttcagggatttttggccaagcctgagcctgacggctgaacgcgtcggccggcccctgccttctgatagctcgatagcagtcgacggcctcttctccgtctcgtggggcgtttgcgtcgaggaagaaacaacaatgcagcctttaagccttcaattctcaggcccagtttgctgctttgcatgcttgttcgtctctcaggctcttcacggtcacggcgcagcgacctggcatgttaaaaaaaatgggccgatatatatatcatgtgcaggttttctttaccacaaaacttttgcctagcgcttttttagcaccgatctccttgcgttcggattgtggatggaaaatggcgatgatcagccacgagaaaagacggtgatcaattgatcatgacaaagagcgacgttggcggcttctcccggagctgcaatggtacaggccgtggccgtggccgtgcctaccgggaggaggacaccggccagtcggccaccgcagtaccgcaccctttacatgagaagacgatgacgagagcgagagatccaggtacgatttcgagcttcatggccgacgtcagtacggcttctgctgtgtcgccgctcgagaaccggcgggcgggcccgagcagtgccatgcactgcaagtaccaaggcgacgaactggagtgcaaatggatggacagctgcgagaagatcaggccatccacccaccccatccggagaccggagaattatatggtcgtgctccactccgccttaagtgcacagcactgtaaacatgacagctcggtccaaagcgacgaactggacggcaaactcagttggaaacctggctttggctcaagaaaacagttttgttccaagccatctcgtgccagatcggtggatgtggatttgcgcggccagacatacttctcgaccgacttaatgccgattttcaatttattgttcggcgtcataactcgtggctccgagataacgcgtctcgatgtcatagactatagcgtcgagaatcggcctgctacggaagcttggagagtgttgctgcagaagctgcaaacggggctagtgcgatggatgagagtaggggcacaaccaccgtggatgcctcgctcgacacagacaacattgtttatggcactagcagattacgtctgcgtcgtcacatatgattcgacgcagagattaaatcgagtttgttctggtcttttagacaccattagacagatgcaagtctgtgccgatgagttaaagaggttgagtatccgcaaccatgtgcctgagtatctagagtacgtgcacaaaaataccctggttaatgccatgagtgctgttactgagcacaaatctagagcaagttcttattggtctgcaacctcttcttga

SEQ ID NO: 62019 - DNA, 3079 bp, Zea Mays
cagaaagcgtgacaattgacgaatataccacgcgttgcgttaggctagatccgctcccctgcaggccacgccttctcgccgctcgcggaaccaccgccgccacctcaccactccagctccagcccccgcccgccataatcgcgtccccttctcgtccttccagagcttcttaaaccacccggcccgctcccagcgtcccttctccgcccacagccagcggcgaactcgatcgagcaggatggggtttatcggcgcgcacggcgtggagacgctgaagcggtataggtacagtggagaggaccgctcggtggtggccaagtacgtgctgcagcccttctggagccgatgcgtcactctcttcccgctctggatgcctacatggttatgctttccgacatttcagatcacacttacaggattttcgtttctagtactatcagcgctgcttggctatatatgttcgcctcaccttgacactgctccccctaggtgggtccatcttgcccatggattacttctcttcttgtaccagacttttgatgctgttgatggtaaacaagcaaggcgtactagctcatcgagtcctcttggagaactttttgatcatggatgtgatgcacttgcgtgtgcttttgaagcattggcccttggaagcaccttgatgtgtggaggatggacactttgtttctgggtagttgccgctgtcccgttctatcttgcaacctgggaacacttctttacaaatacgctcattctgcctacaataaatggaccaacggagggcctgatgctgatctatgtatcacatttgtttacattttttactggcgctgaatggtgggcacaggattttcggaaatcactaccctttttcggttggattccacttccatttctttctgaaattgaaattcctttatatgttcttgtgctgattcttatgatcgtatgtgctgttatacctactgttagatccaatgtcagcaatgtccaagaggtagttgaggcacgaaaaggaagcatggcattagcattagccatgatccttccttttattgtactgttagctggagttgctatctggtgctatctttctccttcaagtataatgaggaaccagccacatttgctcgtgattggaactggctttaattttggatatttggtgggaagaatgatacttgctcatttgtgtgatgaacccaaaggtctaaaatctgggatgttcatgtctctggtgtttctttgttttccaattgcaaatgctctcattgcaaagatcaacgatgggagtcctttagttgatgagcttgttctgctgctgctttattgtgcatatacagtgggtctctacctgcacctcgctgtgtcggttgtgcatgaaatcaaggatgcccttggaatctattgcttcaggataactagaaaggaggcttgaactttgtagtgaagatatattattattacttcacaagtgctagcgaggagcaacacagttcgtcaccgtgcacgctgggagtgtgtgtgcccctctgaaatgccacagccatctgtttgttgagcagagggatctagggattgtattgcgcagttatcttggtcatataacaatatagcagtgtgatgtacactgtagtagggtcgttagaagatatactgtgaaaaacttgcttggagaaagtgatcgtagcatgtgattatcttgggatttttggccaagcctgagcctgacggctgaacgcgtcggccggcccctgccttctgatagctcgatagcagtcgacggcctcttctccgtctcgtggggcgtttgcgtcgaggaagaaacaacaatgcagcctttaagccttcaattctcaggcccagtttgctgctttgcatgcttgttcgtctctcaggctcttcacggtcacggcgcagcgacctggcatgttaaaaaaaatgggccgatatatatatcatgtgcaggttttctttaccacaaaacttttgcctagcgcttttttagcaccgatctccttgcgttcggattgtggatggaaaatggcgatgatcagccacgagaaaagacggtgatcaattgatcatgacaaagagcgacgttggcggcttctcccggagctgcaatggtacaggccgtggccgtggccgtgcctaccgggaggaggacaccggccagtcggccaccgcagtaccgcaccctttacatgagaagacgatgacgagagcgagagatccaggtacgatttcgagcttcatggccgacgtcagtacggcttctgctgtgtcgccgctcgagaaccggcgggcgggcccgagcagtgccatgcactgcaagtaccaaggcgacgaactggagtgcaaatggatggacagctgcgagaagatcaggccatccacccaccccatccggagaccggagaattatatggtcgtgctccactccgccttaagtgcacagcactgtaaacatgacagctcggtccaaagcgacgaactggacggcaaactcagttggaaacctggctttggctcaagaaaacagttttgttccaagccatctcgtgccagatcggtggatgtggatttgcgcggccagacatacttctcgaccgacttaatgccgattttcaatttattgttcggcgtcataactcgtggctccgagataacgcgtctcgatgtcatagactatagcgtcgagaatcggcctgctacggaagcttggagagtgttgctgcagaagctgcaaacggggctagtgcgatggatgagagtaggggcacaaccaccgtggatgcctcgctcgacacagacaacattgtttatggcactagcagattacgtctgcgtcgtcacatatgattcgacgcagagattaaatcgagtttgttctggtcttttagacaccattagacagatgcaagtctgtgccgatgagttaaagaggttgagtatccgcaaccatgtgcctgagtatctagagtacgtgcacaaaaataccctggttaatgccatgagtgctgttactgagcacaaatctagagcaagttcttattggtctgcaacctcttcttga

SEQ ID NO: 62020 - DNA, 1675 bp, Zea Mays
ccgctcccctgcaggccacgccttctcgccgctcgcggaaccaccgccgccacctcaccactccagctccagcccccgcccgccataatcgcgtccccttctcgtccttccagagcttcttaaaccacccggcccgctcccagcgtcccttctccgcccacagccagcggcgaactcgatcgagcaggatggggtttatcggcgcgcacggcgtggagacgctgaagcggtataggtacagtggagaggaccgctcggtggtggccaagtacgtgctgcagcccttctggagccgatgcgtcactctcttcccgctctggatgcctacatggttatgctttccgacatttcagatcacacttacaggattttcgtttctagtactatcagcgctgcttggctatatatgttcgcctcaccttgacactgctccccctaggtgggtccatcttgcccatggattacttctcttcttgtaccagtttgaagcattggcccttggaagcaccttgatgtgtggaggatggacactttgtttctgggtagttgccgctgtcccgttctatcttgcaacctgggaacaaggtttgggtgggatggagccaaaaaactggattcacctggcttcaacccacacccatggccccactgtgccaagatgtcaggattttcggaaatcactaccctttttcggttggattccacttccatttctttctgaaattgaaattcctttatatgttcttgtgctgattcttatgatcgtatgtgctgttatacctactgttagatccaatgtcagcaatgtccaagaggtagttgaggcacgaaaaggaagcatggcattagcattagccatgatccttccttttattgtactgttagctggagttgctatctggtgctatctttctccttcaagtataatgaggaaccagccacatttgctcgtgattggaactggctttaattttggatatttggtgggaagaatgatacttgctcatttgtgtgatgaacccaaaggtctaaaatctgggatgttcatgtctctggtgtttctttgttttccaattgcaaatgctctcattgcaaagatcaacgatgggagtcctttagttgatgagcttgttctgctgctgctttattgtgcatatacagtgggtctctacctgcacctcgctgtgtcggttgtgcatgaaatcaaggatgcccttggaatctattgcttcaggataactagaaaggaggcttgaactttgtagtgaagatatattattattacttcacaagtgctagcgaggagcaacacagttcgtcaccgtgcacgctgggagtgtgtgtgcccctctgaaatgccacagccatctgtttgttgagcagagggatctagggattgtattgcgcagttatcttggtcatataacaatatagcagtgtgatgtacactgtagtagggtcgttagaagatatactgtgaaaaacttgcttggagaaagtgatcgtagcatgtgattatcttggttattgtctacaccctccgtttttttttaaaaaaaaaatatgtattatatttcgctataaatctagataaacatctatttagactcgtagcggaaacgactcttttttttgtgtgtgatgggcactcttttggggacggagatctgactgt

SEQ ID NO: 62021 - DNA, 1698 bp, Zea Mays
tagatccgctcccctgcaggccacgccttctcgccgctcgcggaaccaccgccgccacctcaccactccagctccagcccccgcccgccataatcgcgtccccttctcgtccttccagagcttcttaaaccacccggcccgctcccagcgtcccttctccgcccacagccagcggcgaactcgatcgagcaggatggggtttatcggcgcgcacggcgtggagacgctgaagcggtataggtacagtggagaggaccgctcggtggtggccaagtacgtgctgcagcccttctggagccgatgcgtcactctcttcccgctctggatgccgtgggtccatcttgcccatggattacttctcttcttgtaccagacttttgatgctgttgatggtaaacaagcaaggcgtactagctcatcgagtcctcttggagaactttttgatcatggatgtgatgcacttgcgtgtgcttttgaagcattggcccttggaagcaccttgatgtgtggaggatggacactttgtttctgggtagttgccgctgtcccgttctatcttgcaacctgggaacacttctttacaaatacgctcattctgcctacaataaatggaccaacggagggcctgatgctgatctatgtatcacatttgtttacattttttactggcgctgaatggtgggcacaggattttcggaaatcactaccctttttcggttggattccacttccatttctttctgaaattgaaattcctttatatgttcttgtgctgattcttatgatcgtatgtgctgttatacctactgttagatccaatgtcagcaatgtccaagaggtagttgaggcacgaaaaggaagcatggcattagcattagccatgatccttccttttattgtactgttagctggagttgctatctggtgctatctttctccttcaagtataatgaggaaccagccacatttgctcgtgattggaactggctttaattttggatatttggtgggaagaatgatacttgctcatttgtgtgatgaacccaaaggtctaaaatctgggatgttcatgtctctggtgtttctttgttttccaattgcaaatgctctcattgcaaagatcaacgatgggagtcctttagttgatgagcttgttctgctgctgctttattgtgcatatacagtgggtctctacctgcacctcgctgtgtcggttgtgcatgaaatcaaggatgcccttggaatctattgcttcaggataactagaaaggaggcttgaactttgtagtgaagatatattattattacttcacaagtgctagcgaggagcaacacagttcgtcaccgtgcacgctgggagtgtgtgtgcccctctgaaatgccacagccatctgtttgttgagcagagggatctagggattgtattgcgcagttatcttggtcatataacaatatagcagtgtgatgtacactgtagtagggtcgttagaagatatactgtgaaaaacttgcttggagaaagtgatcgtagcatgtgattatcttggttattgtctacaccctccgtttttttttaaaaaaaaaatatgtattatatttcgctataaatctagataaacatctatttagactcgtagcggaaacgactcttttttttgtgtgtgatgggcactcttttggggacggagatctgactgt

SEQ ID NO: 62022 - DNA, 1745 bp, Zea Mays
gctagatccgctcccctgcaggccacgccttctcgccgctcgcggaaccaccgccgccacctcaccactccagctccagcccccgcccgccataatcgcgtccccttctcgtccttccagagcttcttaaaccacccggcccgctcccagcgtcccttctccgcccacagccagcggcgaactcgatcgagcaggatggggtttatcggcgcgcacggcgtggagacgctgaagcggtataggtacagtggagaggaccgctcggtggtggccaagtacgtgctgcagcccttctggagccgatgcgtcactctcttcccgctctggatgcctacatggttatgctttccgacatttcagatcacacttacaggattttcgtttctagtactatcagcgctgcttggctatatatgttcgcctcaccttgacactgctccccctaggtgggtccatcttgcccatggattacttctcttcttgtaccagtttgaagcattggcccttggaagcaccttgatgtgtggaggatggacactttgtttctgggtagttgccgctgtcccgttctatcttgcaacctgggaacacttctttacaaatacgctcattctgcctacaataaatggaccaacggagggcctgatgctgatctatgtatcacatttgtttacattttttactggcgctgaatggtgggcacaggattttcggaaatcactaccctttttcggttggattccacttccatttctttctgaaattgaaattcctttatatgttcttgtgctgattcttatgatcgtatgtgctgttatacctactgttagatccaatgtcagcaatgtccaagaggtagttgaggcacgaaaaggaagcatggcattagcattagccatgtttggctttgctactctgcttttggaaacaatccttccttttattgtactgttagctggagttgctatctggtgctatctttctccttcaagtataatgaggaaccagccacatttgctcgtgattggaactggctttaattttggatatttggtgggaagaatgatacttgctcatttgtgtgatgaacccaaaggtctaaaatctgggatgttcatgtctctggtgtttctttgttttccaattgcaaatgctctcattgcaaagatcaacgatgggagtcctttagttgatgagcttgttctgctgctgctttattgtgcatatacagtgggtctctacctgcacctcgctgtgtcggttgtgcatgaaatcaaggatgcccttggaatctattgcttcaggataactagaaaggaggcttgaactttgtagtgaagatatattattattacttcacaagtgctagcgaggagcaacacagttcgtcaccgtgcacgctgggagtgtgtgtgcccctctgaaatgccacagccatctgtttgttgagcagagggatctagggattgtattgcgcagttatcttggtcatataacaatatagcagtgtgatgtacactgtagtagggtcgttagaagatatactgtgaaaaacttgcttggagaaagtgatcgtagcatgtgattatcttggttattgtctacaccctccgtttttttttaaaaaaaaaatatgtattatatttcgctataaatctagataaacatctatttagactcgtagcggaaacgactcttttttttgtgtgtgatgggcactcttttggggacggagatctgactgt

SEQ ID NO: 62023 - DNA, 1730 bp, Zea Mays
cacgcgttgcgttaggctagatccgctcccctgcaggccacgccttctcgccgctcgcggaaccaccgccgccacctcaccactccagctccagcccccgcccgccataatcgcgtccccttctcgtccttccagagcttcttaaaccacccggcccgctcccagcgtcccttctccgcccacagccagcggcgaactcgatcgagcaggatggggtttatcggcgcgcacggcgtggagacgctgaagcggtataggtacagtggagaggaccgctcggtggtggccaagtacgtgctgcagcccttctggagccgatgcgtcactctcttcccgctctggatgcctacatggttatgctttccgacatttcagatcacacttacaggattttcgtttctagtactatcagcgctgcttggctatatatgttcgcctcaccttgacactgctccccctaggtgggtccatcttgcccatggattacttctcttcttgtaccagtttgaagcattggcccttggaagcaccttgatgtgtggaggatggacactttgtttctgggtagttgccgctgtcccgttctatcttgcaacctgggaacacttctttacaaatacgctcattctgcctacaataaatggaccaacggagggcctgatgctgatctatgtatcacatttgtttacattttttactggcgctgaatggtgggcacaggattttcggaaatcactaccctttttcggttggattccacttccatttctttctgaaattgaaattcctttatatgttcttgtgctgattcttatgatcgtatgtgctgttatacctactgttagatccaatgtcagcaatgtccaagaggtagttgaggcacgaaaaggaagcatggcattagcattagccatgatccttccttttattgtactgttagctggagttgctatctggtgctatctttctccttcaagtataatgaggaaccagccacatttgctcgtgattggaactggctttaattttggatatttggtgggaagaatgatacttgctcatttgtgtgatgaacccaaaggtctaaaatctgggatgttcatgtctctggtgtttctttgttttccaattgcaaatgctctcattgcaaagatcaacgatgggagtcctttagttgatgagcttgttctgctgctgctttattgtgcatatacagtgggtctctacctgcacctcgctgtgtcggttgtgcatgaaatcaaggatgcccttggaatctattgcttcaggataactagaaaggaggcttgaactttgtagtgaagatatattattattacttcacaagtgctagcgaggagcaacacagttcgtcaccgtgcacgctgggagtgtgtgtgcccctctgaaatgccacagccatctgtttgttgagcagagggatctagggattgtattgcgcagttatcttggtcatataacaatatagcagtgtgatgtacactgtagtagggtcgttagaagatatactgtgaaaaacttgcttggagaaagtgatcgtagcatgtgattatcttggttattgtctacaccctccgtttttttttaaaaaaaaaatatgtattatatttcgctataaatctagataaacatctatttagactcgtagcggaaacgactcttttttttgtgtgtgatgggcactcttttggggacggagatctgactgt

SEQ ID NO: 62024 - DNA, 1865 bp, Zea Mays
atataccacgcgttgcgttaggctagatccgctcccctgcaggccacgccttctcgccgctcgcggaaccaccgccgccacctcaccactccagctccagcccccgcccgccataatcgcgtccccttctcgtccttccagagcttcttaaaccacccggcccgctcccagcgtcccttctccgcccacagccagcggcgaactcgatcgagcaggatggggtttatcggcgcgcacggcgtggagacgctgaagcggtataggtacagtggagaggaccgctcggtggtggccaagtacgtgctgcagcccttctggagccgatgcgtcactctcttcccgctctggatgcctacatggttatgctttccgacatttcagatcacacttacaggattttcgtttctagtactatcagcgctgcttggctatatatgttcgcctcaccttgacactgctccccctaggtgggtccatcttgcccatggattacttctcttcttgtaccagacttttgatgctgttgatggtaaacaagcaaggcgtactagctcatcgagtcctcttggagaactttttgatcatggatgtgatgcacttgcgtgtgcttttgaagcattggcccttggaagcaccttgatgtgtggaggatggacactttgtttctgggtagttgccgctgtcccgttctatcttgcaacctgggaacacttctttacaaatacgctcattctgcctacaataaatggaccaacggagggcctgatgctgatctatgtatcacatttgtttacattttttactggcgctgaatggtgggcacaggattttcggaaatcactaccctttttcggttggattccacttccatttctttctgaaattgaaattcctttatatgttcttgtgctgattcttatgatcgtatgtgctgttatacctactgttagatccaatgtcagcaatgtccaagaggtagttgaggcacgaaaaggaagcatggcattagcattagccatgtttggctttgctactctgcttttggaaacaatccttccttttattgtactgttagctggagttgctatctggtgctatctttctccttcaagtataatgaggaaccagccacatttgctcgtgattggaactggctttaattttggatatttggtgggaagaatgatacttgctcatttgtgtgatgaacccaaaggtctaaaatctgggatgttcatgtctctggtgtttctttgttttccaattgcaaatgctctcattgcaaagatcaacgatgggagtcctttagttgatgagcttgttctgctgctgctttattgtgcatatacagtgggtctctacctgcacctcgctgtgtcggttgtgcatgaaatcaaggatgcccttggaatctattgcttcaggataactagaaaggaggcttgaactttgtagtgaagatatattattattacttcacaagtgctagcgaggagcaacacagttcgtcaccgtgcacgctgggagtgtgtgtgcccctctgaaatgccacagccatctgtttgttgagcagagggatctagggattgtattgcgcagttatcttggtcatataacaatatagcagtgtgatgtacactgtagtagggtcgttagaagatatactgtgaaaaacttgcttggagaaagtgatcgtagcatgtgattatcttggttattgtctacaccctccgtttttttttaaaaaaaaaatatgtattatatttcgctataaatctagataaacatctatttagactcgtagcggaaacgactcttttttttgtgtgtgatgggcactcttttggggacggagatctgactgt

SEQ ID NO: 62025 - DNA, 1802 bp, Zea Mays
atataccacgcgttgcgttaggctagatccgctcccctgcaggccacgccttctcgccgctcgcggaaccaccgccgccacctcaccactccagctccagcccccgcccgccataatcgcgtccccttctcgtccttccagagcttcttaaaccacccggcccgctcccagcgtcccttctccgcccacagccagcggcgaactcgatcgagcaggatggggtttatcggcgcgcacggcgtggagacgctgaagcggtataggtacagtggagaggaccgctcggtggtggccaagtacgtgctgcagcccttctggagccgatgcgtcactctcttcccgctctggatgcctacatggttatgctttccgacatttcagatcacacttacaggattttcgtttctagtactatcagcgctgcttggctatatatgttcgcctcaccttgacactgctccccctaggtgggtccatcttgcccatggattacttctcttcttgtaccagacttttgatgctgttgatggtaaacaagcaaggcgtactagctcatcgagtcctcttggagaactttttgatcatggatgtgatgcacttgcgtgtgcttttgaagcattggcccttggaagcaccttgatgtgtggaggatggacactttgtttctgggtagttgccgctgtcccgttctatcttgcaacctgggaacaaggtttgggtgggatggagccaaaaaactggattcacctggcttcaacccacacccatggccccactgtgccaagatgtcaggattttcggaaatcactaccctttttcggttggattccacttccatttctttctgaaattgaaattcctttatatgttcttgtgctgattcttatgatcgtatgtgctgttatacctactgttagatccaatgtcagcaatgtccaagaggtagttgaggcacgaaaaggaagcatggcattagcattagccatgatccttccttttattgtactgttagctggagttgctatctggtgctatctttctccttcaagtataatgaggaaccagccacatttgctcgtgattggaactggctttaattttggatatttggtgggaagaatgatacttgctcatttgtgtgatgaacccaaaggtctaaaatctgggatgttcatgtctctggtgtttctttgttttccaattgcaaatgctctcattgcaaagatcaacgatgggagtcctttagttgatgagcttgttctgctgctgctttattgtgcatatacagtgggtctctacctgcacctcgctgtgtcggttgtgcatgaaatcaaggatgcccttggaatctattgcttcaggataactagaaaggaggcttgaactttgtagtgaagatatattattattacttcacaagtgctagcgaggagcaacacagttcgtcaccgtgcacgctgggagtgtgtgtgcccctctgaaatgccacagccatctgtttgttgagcagagggatctagggattgtattgcgcagttatcttggtcatataacaatatagcagtgtgatgtacactgtagtagggtcgttagaagatatactgtgaaaaacttgcttggagaaagtgatcgtagcatgtgattatcttggttattgtctacaccctccgtttttttttaaaaaaaaaatatgtattatatttcgctataaatctagataaacatctatttagactcgtagcggaaacgactcttttttttgtgtgtgatgggcactcttttggggacggagatctgactgt

SEQ ID NO: 62026 - DNA, 1800 bp, Zea Mays
attgacgaatataccacgcgttgcgttaggctagatccgctcccctgcaggccacgccttctcgccgctcgcggaaccaccgccgccacctcaccactccagctccagcccccgcccgccataatcgcgtccccttctcgtccttccagagcttcttaaaccacccggcccgctcccagcgtcccttctccgcccacagccagcggcgaactcgatcgagcaggatggggtttatcggcgcgcacggcgtggagacgctgaagcggtataggtacagtggagaggaccgctcggtggtggccaagtacgtgctgcagcccttctggagccgatgcgtcactctcttcccgctctggatgcctacatggttatgctttccgacatttcagatcacacttacaggattttcgtttctagtactatcagcgctgcttggctatatatgttcgcctcaccttgacactgctccccctagacttttgatgctgttgatggtaaacaagcaaggcgtactagctcatcgagtcctcttggagaactttttgatcatggatgtgatgcacttgcgtgtgcttttgaagcattggcccttggaagcaccttgatgtgtggaggatggacactttgtttctgggtagttgccgctgtcccgttctatcttgcaacctgggaacacttctttacaaatacgctcattctgcctacaataaatggaccaacggagggcctgatgctgatctatgtatcacatttgtttacattttttactggcgctgaatggtgggcacaggattttcggaaatcactaccctttttcggttggattccacttccatttctttctgaaattgaaattcctttatatgttcttgtgctgattcttatgatcgtatgtgctgttatacctactgttagatccaatgtcagcaatgtccaagaggtagttgaggcacgaaaaggaagcatggcattagcattagccatgatccttccttttattgtactgttagctggagttgctatctggtgctatctttctccttcaagtataatgaggaaccagccacatttgctcgtgattggaactggctttaattttggatatttggtgggaagaatgatacttgctcatttgtgtgatgaacccaaaggtctaaaatctgggatgttcatgtctctggtgtttctttgttttccaattgcaaatgctctcattgcaaagatcaacgatgggagtcctttagttgatgagcttgttctgctgctgctttattgtgcatatacagtgggtctctacctgcacctcgctgtgtcggttgtgcatgaaatcaaggatgcccttggaatctattgcttcaggataactagaaaggaggcttgaactttgtagtgaagatatattattattacttcacaagtgctagcgaggagcaacacagttcgtcaccgtgcacgctgggagtgtgtgtgcccctctgaaatgccacagccatctgtttgttgagcagagggatctagggattgtattgcgcagttatcttggtcatataacaatatagcagtgtgatgtacactgtagtagggtcgttagaagatatactgtgaaaaacttgcttggagaaagtgatcgtagcatgtgattatcttggttattgtctacaccctccgtttttttttaaaaaaaaaatatgtattatatttcgctataaatctagataaacatctatttagactcgtagcggaaacgactcttttttttgtgtgtgatgggcactcttttggggacggagatctgactgt

SEQ ID NO: 62027 - DNA, 927 bp, Zea Mays
cgccttctcgccgctcgcggaaccaccgccgccacctcaccactccagctccagcccccgcccgccataatcgcgtccccttctcgtccttccagagcttcttaaaccacccggcccgctcccagcgtcccttctccgcccacagccagcggcgaactcgatcgagcaggatggggtttatcggcgcgcacggcgtggagacgctgaagcggtataggtacagtggagaggaccgctcggtggtggccaagtacgtgctgcagcccttctggagccgatgcgtcactctcttcccgctctggatgcctacatggttatgctttccgacatttcagatcacacttacaggattttcgtttctagtactatcagcgctgcttggctatatatgttcgcctcaccttgacactgctccccctagacttttgatgctgttgatggtaaacaagcaaggcgtactagctcatcgagtcctcttggagaactttttgatcatggatgtgatgcacttgcgtgtgcttttgaagcattggcccttggaagcaccttgatgtgtggaggatggacactttgtttctgggtagttgccgctgtcccgttctatcttgcaacctgggaacacttctttacaaatacgctcattctgcctacaataaatggaccaacggagggcctgatgctgatctatgtatcacatttgtttacattttttactggcgctgaatggtgggcacaggattttcggaaatcactaccctttttcggttggattccacttccatttctttctgaaattgaaattcctttatatgttcttgtgctgattcttatgatcgtatgtgctgttatacctactgttagatccaatttattgaattgataaatgcaggtagtgactttgggacattcacctcagcacaaagcaat

SEQ ID NO: 62028 - DNA, 2565 bp, Zea Mays
cgacaccacaaataataagcggtccgctacgccgccccgccccgcttcccgcccagccgccgccgtagcctccaaagtacccaggttacctggcccgccgccgcgcgcgggggcgtgctatggacccgtccactgccaaggcggccgcgccgcccaataatgcggaccacgtcctccacatccagcccgacaacctgccgccgccgcacccgagcaacaaccagcagccgaacccaccgccgccggagaccccaaagctctcgcagaaccccgagaagccgccggcctccagcccctcgcgcccgccgctgccccccgcgctcctccgccgccgctcctccatcgccaagcccaagtcgcgcttcgtcgagccgcccaccccgatgcacccggactccgcccacccctccccggtccaccccgccgccaccgccgccgcctcgctgaccgccaccccgacccatcgcgccgcgagcgtctccaccccgcacacccccgcggaggccgacgacgacgaggacatcttccgcaacaaggatggctcccgcgcgccggcctccgcggcgcggtgccgccgccgggtccgccttggcctcgagctctgcgtgctcgtcctcttcctcggcctgctcgtcgtcagcctcgtcgtgcgccccctgcagggccgcgtactgtgggggctggagatctggaagtggtgcgtcatggtcaccgccgtcttctccggccacctcctcagccagtggctcgtcacgctcatcgttttcgtcgtcgagcgcaacttcctgctgcgcaccaaggtgctctacttcgtcttcgggctcaagaagagcttccaggtctgcctctggctcgcgctcgtgctcatcgcctggtcccagctcttcgacagcgaggtcggccgctcccgcaagaccgccaggaccctcaactacgtctccaggttcctcgcctccatgctcatcggctccgtcatctggctcgtcaagaccttccttatgaaggtggttgcgtccacgttccaccgcaagaccttcttcgaccggattcaagagagcgtgttccatcagtacgtgctgcagacgctgtcgggcccgccgttaatggagctggcggagaatgtggggcgcgagggcagtggccttgggcgggtcagtatcggcagggccaaggaggacaaaggcgtgccggaggtgatcgatgttgtcaagctcaggaggatgagtcaggagaaggtctcagcatggacgatgagagggctcatcacagcaatccgaagctctaggctgtcaaccatatctaatactatcgagagctttgatgatgtagatggcatggaacagaaggataaagaaataaatagtgaatgggaggccaaggccgcggcgtatgccatattcaagaatgtcgcaaagcccagctataagcacattgaggaggtggatctgctgagatttttcaccaaggaggaggtgcacctggtgattccaatgtttgagggagcaccagagaccggaaagataaaaaagtctgcactaaagaattgggtggtgaaagcatacctcgatcgcaagtcactggcacattctctgaacgacacaaagaccgcagttatgcaacttcacaacctcatcagtgttatagtcatcattataatcatcattgttacactactattgatgggcattgcgacaaccaagattcttgttgtcatctcgtcccagcttctggttgcgggattcatatttgggaatgcatgcaagactgtatttgaggcccttatatttgtattcatcatgcatccatttgatgttggtgaccgctgtgttatcgacggaacacagatgatcgtcgaggaaatgaatatattaaccactgttctcttgaagaatgacaacgaaaagatatattatccaaattctgtgttgtccacaaagccaatcagcaacttttaccgaagccctaacatgtatgacacgattgattttgcaattgatgtttcaacttcagttgagagcattggagctttgaggtccaaaattaaagggtacttggagagcaaaccaacgcattggcacccagtccacactgtaaatctcaaggacatcttggatgtgaacaagattaacatgtctctctcagtgcagcacaccatgaactttcaaaacatccgggagaagaacatcaggaggtctgagctcgttatggagttgaagaaaatattcgaggagatgtccatccggacgatggaatggcttttctctaaataatgcaaaatatttcgagctccgcacaaaacggaacagtctctcgtcaaagctgccaagcctggcatggattggtagggaatatgaacaatcgtcatggacagtgcaaatgttttcatgctacatttttcatcgaaagttgatgtgggatgcttttattaggctatcttaagtagaccccctatcccatcttctatcttattcactatttcaattttcgctctgtaaataatgtcaaacattgttatttatagttccacgttctctattttatcctatctactgaagacacttttag

SEQ ID NO: 62029 - DNA, 3159 bp, Zea Mays
cgacaccacaaataataagcggtccgctacgccgccccgccccgcttcccgcccagccgccgccgtagcctccaaagtacccaggttacctggcccgccgccgcgcgcgggggcgtgctatggacccgtccactgccaaggcggccgcgccgcccaataatgcggaccacgtcctccacatccagcccgacaacctgccgccgccgcacccgagcaacaaccagcagccgaacccaccgccgccggagaccccaaagctctcgcagaaccccgagaagccgccggcctccagcccctcgcgcccgccgctgccccccgcgctcctccgccgccgctcctccatcgccaagcccaagtcgcgcttcgtcgagccgcccaccccgatgcacccggactccgcccacccctccccggtccaccccgccgccaccgccgccgcctcgctgaccgccaccccgacccatcgcgccgcgagcgtctccaccccgcacacccccgcggaggccgacgacgacgaggacatcttccgcaacaaggatggctcccgcgcgccggcctccgcggcgcggtgccgccgccgggtccgccttggcctcgagctctgcgtgctcgtcctcttcctcggcctgctcgtcgtcagcctcgtcgtgcgccccctgcagggccgcgtactgtgggggctggagatctggaagtggtgcgtcatggtcaccgccgtcttctccggccacctcctcagccagtggctcgtcacgctcatcgttttcgtcgtcgagcgcaacttcctgctgcgcaccaaggtgctctacttcgtcttcgggctcaagaagagcttccaggtctgcctctggctcgcgctcgtgctcatcgcctggtcccagctcttcgacagcgaggtcggccgctcccgcaagaccgccaggaccctcaactacgtctccaggttcctcgcctccatgctcatcggctccgtcatctggctcgtcaagaccttccttatgaaggtggttgcgtccacgttccaccgcaagaccttcttcgaccggattcaagagagcgtgttccatcagtacgtgctgcagacgctgtcgggcccgccgttaatggagctggcggagaatgtggggcgcgagggcagtggccttgggcgggtcagtatcggcagggccaaggaggacaaaggcgtgccggaggtgatcgatgttgtcaagctcaggaggatgagtcaggagaaggtctcagcatggacgatgagagggctcatcacagcaatccgaagctctaggctgtcaaccatatctaatactatcgagagctttgatgatgtagatggcatggaacagaaggataaagaaataaatagtgaatgggaggccaaggccgcggcgtatgccatattcaagaatgtcgcaaagcccagctataagcacattgaggaggtggatctgctgagatttttcaccaaggaggaggtgcacctggtgattccaatgtttgagggagcaccagagaccggaaagataaaaaagtctgcactaaagaattgggtggtgaaagcatacctcgatcgcaagtcactggcacattctctgaacgacacaaagaccgcagttatgcaacttcacaacctcatcagtgttatagtcatcattataatcatcattgttacactactattgatgggcattgcgacaaccaagattcttgttgtcatctcgtcccagcttctggttgcgggattcatatttgggaatgcatgcaagactgtatttgaggcccttatatttgtattcatcatgcatccatttgatgttggtgaccgctgtgttatcgacggaacacagatgatcgtcgaggaaatgaatatattaaccactgttctcttgaagaatgacaacgaaaagatatattatccaaattctgtgttgtccacaaagccaatcagcaacttttaccgaagccctaacatgtatgacacgattgattttgcaattgatgtttcaacttcagttgagagcattggagctttgaggtccaaaattaaagggtacttggagagcaaaccaacgcattggcacccagtccacactgtaaatctcaaggacatcttggatgtgaacaagattaacatgtctctctcagtgcagcacaccatgaactttcaaaacatccgggagaagaacatcaggaggtctgagctcgttatggagttgaagaaaatattcgaggagatgtccatccggtaccaccttctaccccagaaagttgaactcacctacgtcggctcgaacccactgcccatgggtccttctcatacaagatagaggatgggtgaagacttttaagtctcatattgacaacttgatccatttcatgggatctgacaactgatggctagctgtgcagtctgttctgaagttagtaaaactctgcatagtagatattagctcgtagaataatttgtcagataatgcatttgtaagcggtgatggtactggtgatcaatgctttgggattggccattacaccatttgattatctacaccgtttggtgcatcacaatcgaaactgttgcgaaatagccactaataaagaaattcagctgggagattgaagtgggcctgtcgaaatgggatgctgaaggaaatgttgtagactgctcaagcagcactgcagcagtgggatgggagaagcactgtcaattcggtcaacagtttatttgggccatagtgcagggaatatgaacaatcgtcatggacagtgcaaatgttttcatgctacatttgtcatcgacagttgatgtgggctgctcttattaggcggcttctatgggatggacgatggaatggcttttctctaaataatgcaaaatatttcgagctccgcacaaaacggaacagtctctcgtcaaagctgccaagcctggcatggattggtagggaatatgaacaatcgtcatggacagtgcaaatgttttcatgctacatttttcatcgaaagttgatgtgggatgcttttattaggctatcttaagtagaccccctatcccatcttctatcttattcactatttcaattttcgctctgtaaataatgtcaaacattgttatttatagttccacgttctctattttatcctatctactgaagacacttttag

SEQ ID NO: 62030 - DNA, 3051 bp, Zea Mays
cttgatctctagataaattatttccgtccaagaattggaaaaggaaatccaggattctagagagaagaccgagttttatcgcaccaagatgcaggagcttattctttacaaaagtaggtgtgagaacaggcttaatgaagtctcagaaagtatgtctgccgataaacgtgaggttcaatcccttgcagcaaaatatgatgaaagatgcaagaaggttggagatgtggcatcaaaattaacaatggatgaggccagttttccgtgagatccaggagaagaaacttgaaatttataacgccatagttaagctgcaaaaaggggatgaaagtgatgaaaagcttcaggagcgggctaataagatacagtctgatcttgaggagcttgtgaaatcattgaatgaacaatgcaagagatatgggttgagagctaagccaactacattggtggaacttccttttggttggcaaactggaatacaagagacagcagctacatgggatgaagaatgggacagatttggagatgaaggattctccatcataaaggaactaacagttgaagtagagcctcccgttgtaccaaagagtcaacctactgttgaagatgtcaaagtgtctacaaatggggcatcaacagagaaagaagacaataagtttgctaaatctactgctgctgctgctgtggagcaggcagttgaacctgaagcaataccatccaatagcaaactagagtcaacaaaaagtcctccagttagtcctgtcaagaacagagacgatggttcgaccgatgagcttgatacaaagcaatctggaccaaatgacgtcttaccacgtgccactgagagcgtcagtaaccgtggaatggattcctctgcccatggagataaaacttatgatggacattcatgggccccatcatttgatcatggcactgacaatgactccctatggaactttggtcataagatatactgcactatctggtacttacctccacgatctgtttctcaggatggtgagaatggtgattcagatctcttctttgggccacaaggtcttccaccgataaggactggaggttcctcatctaatagtttgtttgtcaaggaacagaaaccatcttttgattctgttcctggtactccaatggagaaacctttctttgattccatcccaggcacaccagttcagaagtccgtcttcgattactccgtccctagtacaccgatgcaaaactcagtctttgattattccatcccaagcacaccgatgcaaaagcctctctttgattccgtccctggtacaccagtgcagaaatcagtatttgattctgttccgagtacaccgatgcagaaatcagtatttgattctgctccaagtacgccaacgcagaaaccattctttgactcttttccaagcaccccaatgcagagatccatgtttgattctggcccaagcagagcagaatctcctactgctggcagcgtgtacggcaaagagcaaaagggattctttgattcttcagttccgagtacaccaatgtacaactcaaacctcacgcccagatacagtgaagcaggagatgattcatttgacacaatgtctcaatacagctccttcggcatgcacgacaacaattcttttggacagatagacagcttctcaagatttgattccttccggagcaatgctgataatggcggtaatgacgcctttgcgagatttgattctttccgcagcacttcagatcaaggcgggggcaacagcttcatgaggtacgattccatgaacagcagcagtgaccatgacagaacggatacatttgcgaggtttgattccatgaagaacagtgacttcaacaaccagggctactcatttgatgatgacgacccctttggaactgggccgttcaaatcaacagagacatcgaacagcccgacgagacatgggacggatgcgtggagtgcattttgacaggtattgtattatagaggtcatgttcttgtgcaccttactgcagatatacatacacgtacaagggcaagacattattttttttgcatgggcctctgctccgcaccttttggacgggacggggcttgcttgtgtgtttaattttgtacctaggctgggaacatgtgtttggagggatggtgctgcttataaacattctttataccttgtattgtacaagtacacctacaagatgctagtcaacccgttgggttgaagaactctccgagtgttttcttccattgtgtagggttttttttctctctcagtttcttctgtttctgcaaaaagttctgagctctgtacatacattttggctaagtcaacctagttatgaggatattgtgagcaattaagtcggttcagcgagaagctagggatcagtttgttcgttgttttaacaaaccgtgagggttgccctccataggggtggtcattctaaggctgaaacttgaacccgaactaaactcgaatagaccgaattgtcggtctatttgggttttttggttcaggttcgattcttatatgtgctatattttggggtatgggttctgttgggggtctgctgctctgcttcgtcgtcgaaggttctttaaaaagaaataccttcgaaagatcagcgtataatcaagcacaatgtgaaggtatacacgaagctgctgtcttcgaaagatcagtgtataatcaagcacggtgcgaaggtatacacgaagctgctgtctgaggagcttcggcataatgatagcttgagatgaagggctgcaccgacttaaaaaagaaaagaccgatcagtccatgataatttgtgttaattgtaactagttatcaaggtcataaatgtaattttgaccgggctgcgtcccgtgcctataaataggtgaacagtactcccgtactgttcacgctgactggtactcactcttgcgtcacgcttggacttttgctctttatcaagccgaaggtacaaatgtaattcaatattatttctatttatccattgtaatataataaaaatatattaataatgtcatgattattc

SEQ ID NO: 62031 - DNA, 3022 bp, Zea Mays
atatttcttatggtaatttaaatggcagtggcgcttgatctctagataaattatttccgtccaagaattggaaaaggaaatccaggattctagagagaagaccgagttttatcgcaccaagatgcaggagcttattctttacaaaagtaggtgtgagaacaggcttaatgaagtctcagaaagtatgtctgccgataaacgtgaggttcaatcccttgcagcaaaatatgatgaaagatgcaagaaggttggagatgtggcatcaaaattaacaatggatgaggccagttttccgtgagatccaggagaagaaacttgaaatttataacgccatagttaagctgcaaaaaggggatgaaagtgatgaaaagcttcaggagcgggctaataagatacagtctgatcttgaggagcttgtgaaatcattgaatgaacaatgcaagagatatgggttgagagctaagccaactacattggtggaacttccttttggttggcaaactggaatacaagagacagcagctacatgggatgaagaatgggacagatttggagatgaaggaactaacagttgaagtagagcctcccgttgtaccaaagagtcaacctactgttgaagatgtcaaagtgtctacaaatggggcatcaacagagaaagaagacaataagtttgctaaatctactgctgctgctgctgtggagcaggcagttgaacctgaagcaataccatccaatagcaaactagagtcaacaaaaagtcctccagttagtcctgtcaagaacagagacgatggttcgaccgatgagcttgatacaaagcaatctggaccaaatgacgtcttaccacgtgccactgagagcgtcagtaaccgtggaatggattcctctgcccatggagataaaacttatgatggacattcatgggccccatcatttgatcatggcactgacaatgactccctatggaactttggtcataaggatggtgagaatggtgattcagatctcttctttgggccacaaggtcttccaccgataaggactggaggttcctcatctaatagtttgtttgtcaaggaacagaaaccatcttttgattctgttcctggtactccaatggagaaacctttctttgattccatcccaggcacaccagttcagaagtccgtcttcgattactccgtccctagtacaccgatgcaaaactcagtctttgattattccatcccaagcacaccgatgcaaaagcctctctttgattccgtccctggtacaccagtgcagaaatcagtatttgattctgttccgagtacaccgatgcagaaatcagtatttgattctgctccaagtacgccaacgcagaaaccattctttgactcttttccaagcaccccaatgcagagatccatgtttgattctggcccaagcagagcagaatctcctactgctggcagcgtgtacggcaaagagcaaaagggattctttgattcttcagttccgagtacaccaatgtacaactcaaacctcacgcccagatacagtgaagcaggagatgattcatttgacacaatgtctcaatacagctccttcggcatgcacgacaacaattcttttggacagatagacagcttctcaagatttgattccttccggagcaatgctgataatggcggtaatgacgcctttgcgagatttgattctttccgcagcacttcagatcaaggcgggggcaacagcttcatgaggtacgattccatgaacagcagcagtgaccatgacagaacggatacatttgcgaggtttgattccatgaagaacagtgacttcaacaaccagggctactcatttgatgatgacgacccctttggaactgggccgttcaaatcaacagagacatcgaacagcccgacgagacatgggacggatgcgtggagtgcattttgacaggtattgtattatagaggtcatgttcttgtgcaccttactgcagatatacatacacgtacaagggcaagacattattttttttgcatgggcctctgctccgcaccttttggacgggacggggcttgcttgtgtgtttaattttgtacctaggctgggaacatgtgtttggagggatggtgctgcttataaacattctttataccttgtattgtacaagtacacctacaagatgctagtcaacccgttgggttgaagaactctccgagtgttttcttccattgtgtagggttttttttctctctcagtttcttctgtttctgcaaaaagttctgagctctgtacatacattttggctaagtcaacctagttatgaggatattgtgagcaattaagtcggttcagcgagaagctagggatcagtttgttcgttgttttaacaaaccgtgagggttgccctccataggggtggtcattctaaggctgaaacttgaacccgaactaaactcgaatagaccgaattgtcggtctatttgggttttttggttcaggttcgattcttatatgtgctatattttggggtatgggttctgttgggggtctgctgctctgcttcgtcgtcgaaggttctttaaaaagaaataccttcgaaagatcagcgtataatcaagcacaatgtgaaggtatacacgaagctgctgtcttcgaaagatcagtgtataatcaagcacggtgcgaaggtatacacgaagctgctgtctgaggagcttcggcataatgatagcttgagatgaagggctgcaccgacttaaaaaagaaaagaccgatcagtccatgataatttgtgttaattgtaactagttatcaaggtcataaatgtaattttgaccgggctgcgtcccgtgcctataaataggtgaacagtactcccgtactgttcacgctgactggtactcactcttgcgtcacgcttggacttttgctctttatcaagccgaaggtacaaatgtaattcaatattatttctatttatccattgtaatataataaaaatatattaataatgtcatgattattc

SEQ ID NO: 62032 - DNA, 3046 bp, Zea Mays
ccaatcatatttcttatggtaatttaaatggcagtggcgcttgatctctagataaattatttccgtccaagaattggaaaaggaaatccaggattctagagagaagaccgagttttatcgcaccaagatgcaggagcttattctttacaaaagtaggtgtgagaacaggcttaatgaagtctcagaaagtatgtctgccgataaacgtgagggttcaatcccttgcagcaaaatatgatgaaagatgcaagaaggttggagatgtggcatcaaaattaacaatggatgaggccagttttccgtgagatccaggagaagaaacttgaaatttataacgccatagttaagctgcaaaaaggggatgaaagtgatgaaaagcttcaggagcgggctaataagatacagtctgatcttgaggagcttgtgaaatcattgaatgaacaatgcaagagatatgggttgagagctaagccaactacattggtggaacttccttttggttggcaaactggaatacaagagacagcagctacatgggatgaagaatgggacagatttggagatgaaggattctccatcataaaggaactaacagttgaagtagagcctcccgttgtaccaaagagtcaacctactgttgaagatgtcaaagtgtctacaaatggggcatcaacagagaaagaagacaataagtttgctaaatctactgctgctgctgctgtggagcaggcagttgaacctgaagcaataccatccaatagcaaactagagtcaacaaaaagtcctccagttagtcctgtcaagaacagagacgatggttcgaccgatgagcttgatacaaagcaatctggaccaaatgacgtcttaccacgtgccactgagagcgtcagtaaccgtggaatggattcctctgcccatggagataaaacttatgatggacattcatgggccccatcatttgatcatggcactgacaatgactccctatggaactttggtcataaggatggtgagaatggtgattcagatctcttctttgggccacaaggtcttccaccgataaggactggaggttcctcatctaatagtttgtttgtcaaggaacagaaaccatcttttgattctgttcctggtactccaatggagaaacctttctttgattccatcccaggcacaccagttcagaagtccgtcttcgattactccgtccctagtacaccgatgcaaaactcagtctttgattattccatcccaagcacaccgatgcaaaagcctctctttgattccgtccctggtacaccagtgcagaaatcagtatttgattctgttccgagtacaccgatgcagaaatcagtatttgattctgctccaagtacgccaacgcagaaaccattctttgactcttttccaagcaccccaatgcagagatccatgtttgattctggcccaagcagagcagaatctcctactgctggcagcgtgtacggcaaagagcaaaagggattctttgattcttcagttccgagtacaccaatgtacaactcaaacctcacgcccagatacagtgaagcaggagatgattcatttgacacaatgtctcaatacagctccttcggcatgcacgacaacaattcttttggacagatagacagcttctcaagatttgattccttccggagcaatgctgataatggcggtaatgacgcctttgcgagatttgattctttccgcagcacttcagatcaaggcgggggcaacagcttcatgaggtacgattccatgaacagcagcagtgaccatgacagaacggatacatttgcgaggtttgattccatgaagaacagtgacttcaacaaccagggctactcatttgatgatgacgacccctttggaactgggccgttcaaatcaacagagacatcgaacagcccgacgagacatgggacggatgcgtggagtgcattttgacaggtattgtattatagaggtcatgttcttgtgcaccttactgcagatatacatacacgtacaagggcaagacattattttttttgcatgggcctctgctccgcaccttttggacgggacggggcttgcttgtgtgtttaattttgtacctaggctgggaacatgtgtttggagggatggtgctgcttataaacattctttataccttgtattgtacaagtacacctacaagatgctagtcaacccgttgggttgaagaactctccgagtgttttcttccattgtgtagggttttttttctctctcagtttcttctgtttctgcaaaaagttctgagctctgtacatacattttggctaagtcaacctagttatgaggatattgtgagcaattaagtcggttcagcgagaagctagggatcagtttgttcgttgttttaacaaaccgtgagggttgccctccataggggtggtcattctaaggctgaaacttgaacccgaactaaactcgaatagaccgaattgtcggtctatttgggttttttggttcaggttcgattcttatatgtgctatattttggggtatgggttctgttgggggtctgctgctctgcttcgtcgtcgaaggttctttaaaaagaaataccttcgaaagatcagcgtataatcaagcacaatgtgaaggtatacacgaagctgctgtcttcgaaagatcagtgtataatcaagcacggtgcgaaggtatacacgaagctgctgtctgaggagcttcggcataatgatagcttgagatgaagggctgcaccgacttaaaaaagaaaagaccgatcagtccatgataatttgtgttaattgtaactagttatcaaggtcataaatgtaattttgaccgggctgcgtcccgtgcctataaataggtgaacagtactcccgtactgttcacgctgactggtactcactcttgcgtcacgcttggacttttgctctttatcaagccgaaggtacaaatgtaattcaatattatttctatttatccattgtaatataataaaaatatattaataatgtcatgattattc

SEQ ID NO: 62033 - DNA, 4684 bp, Zea Mays
atggaggcggccttcgacgcctacttctgcgccgcggatctggaccgcgacggccggatcagcggccaggaggccgtcgccttcttcaagggctccggcctcccgcagcccgtcctagcgcagatttggacatatgctgataaaaatcggactggtttccttgggcgcgaagacttctgcaattcgcttaaacttgtcacagtagctcagagcggtcgagaattgacacctgatattgttaggtcagcattatttggtccagctgctgcaaagatacctgctcctcggataaatgtttctactgctggtcctcagacaaacagtgtagctagccccccgaatgccactcgagcactagggtctggtcaacagaatcctgctgtaagaggaccacaagtgcttcctggggcatcatcaaatccacaagtgaggccgccacaacctccaaatgcaaacactgtgccccctgttcagggagttgcatcaaggccacccgtgggaggtggtcctagtgggctaaaccataccagctcaaccacaacaaatctcgctacggattggtttagtggtaagaggagtgcaagttcgttgggtgcaacttcacaagctccaaccagaggtatttctccgcagggcaaccttactactgcaggaatttcagcacagaattcaactcctctgccagtctacaattctcatatgccgggtgctacaacacctgccaatgcaaattcaacaaacgtaaacatgatgccttcacaaccatcagttagtgactccaagacattggtacccttgggtaatggattgccatctaactcaacttttggtgttgaccctttttctgtgactctacaagcgaaacaagagtcagctttgacccccaatgttccaaataatcttcccagttctacagctcctgcctcagctgctggacctcatcaccctcctaagccaatgcaggccggtcctttgcagggtatatcgtcgcttccttctcatactagccagttgccacacagtcagccagctcctaggcaacaacaatttaatgctattccaagcactccaggaccagtgggtgcaaatattcctggtggacaaattccttcaaacccataccaatctcaggccccatggccaaaaatcactcaagtggatgtcaggaaatacatgattgtatttatcaaggtagacagagatcgtgatgggaagatcaccggcgaagaagcaaggaatctatttttaagttggaggctgccaagagatatcttaaggaaggtatgggatttgtctgatcaggataaggatgggatgctgtctttcaaggaattttgtgttgccgtgtatttaatggagagacaccgagagcatcgtcctcttcctgatgtactaccagatggtatttgggctgagggcacctcgctaccctctaccggccagtttgcaggaaaccctagtggaccgccttctcatgcaagtacagtagaggaatgcaaggaccacatcatgggatgcttccctcatccatgaagccaacatctcgaaggcctcttcctttagatgctgacgatactgttaaggcagagcaacaaaagccaaagatccctgtattggaggaacatctagttggccagttgagcaaggaggaacaaggcacactggatgcaaagtttaaggaagcttcagatgctgataagaaagtccaagaattggaaaaggaaatccaggattctagagagaagaccgagttttatcgcaccaagatgcaggagcttattctttacaaaagtaggtgtgagaacaggcttaatgaagtctcagaaagtatgtctgccgataaacgtgaggttcaatcccttgcagcaaaatatgatgaaagatgcaagaaggttggagatgtggcatcaaaattaacaatggatgaggccagttttccgtgagatccaggagaagaaacttgaaatttataacgccatagttaagctgcaaaaaggggatgaaagtgatgaaaagcttcaggagcgggctaataagatacagtctgatcttgaggagcttgtgaaatcattgaatgaacaatgcaagagatatgggttgagagctaagccaactacattggtggaacttccttttggttggcaaactggaatacaagagacagcagctacatgggatgaagaatgggacagatttggagatgaaggattctccatcataaaggaactaacagttgaagtagagcctcccgttgtaccaaagagtcaacctactgttgaagatgtcaaagtgtctacaaatggggcatcaacagagaaagaagacaataagtttgctaaatctactgctgctgctgctgtggagcaggcagttgaacctgaagcaataccatccaatagcaaactagagtcaacaaaaagtcctccagttagtcctgtcaagaacagagacgatggttcgaccgatgagcttgatacaaagcaatctggaccaaatgacgtcttaccacgtgccactgagagcgtcagtaaccgtggaatggattcctctgcccatggagataaaacttatgatggacattcatgggccccatcatttgatcatggcactgacaatgactccctatggaactttggtcataaggatggtgagaatggtgattcagatctcttctttgggccacaaggtcttccaccgataaggactggaggttcctcatctaatagtttgtttgtcaaggaacagaaaccatcttttgattctgttcctggtactccaatggagaaacctttctttgattccatcccaggcacaccagttcagaagtccgtcttcgattactccgtccctagtacaccgatgcaaaactcagtctttgattattccatcccaagcacaccgatgcaaaagcctctctttgattccgtccctggtacaccagtgcagaaatcagtatttgattctgttccgagtacaccgatgcagaaatcagtatttgattctgctccaagtacgccaacgcagaaaccattctttgactcttttccaagcaccccaatgcagagatccatgtttgattctggcccaagcagagcagaatctcctactgctggcagcgtgtacggcaaagagcaaaagggattctttgattcttcagttccgagtacaccaatgtacaactcaaacctcacgcccagatacagtgaagcaggagatgattcatttgacacaatgtctcaatacagctccttcggcatgcacgacaacaattcttttggacagatagacagcttctcaagatttgattccttccggagcaatgctgataatggcggtaatgacgcctttgcgagatttgattctttccgcagcacttcagatcaaggcgggggcaacagcttcatgaggtacgattccatgaacagcagcagtgaccatgacagaacggatacatttgcgaggtttgattccatgaagaacagtgacttcaacaaccagggctactcatttgatgatgacgacccctttggaactgggccgttcaaatcaacagagacatcgaacagcccgacgagacatgggacggatgcgtggagtgcattttgacaggtattgtattatagaggtcatgttcttgtgcaccttactgcagatatacatacacgtacaagggcaagacattattttttttgcatgggcctctgctccgcaccttttggacgggacggggcttgcttgtgtgtttaattttgtacctaggctgggaacatgtgtttggagggatggtgctgcttataaacattctttataccttgtattgtacaagtacacctacaagatgctagtcaacccgttgggttgaagaactctccgagtgttttcttccattgtgtagggttttttttctctctcagtttcttctgtttctgcaaaaagttctgagctctgtacatacattttggctaagtcaacctagttatgaggatattgtgagcaattaagtcggttcagcgagaagctagggatcagtttgttcgttgttttaacaaaccgtgagggttgccctccataggggtggtcattctaaggctgaaacttgaacccgaactaaactcgaatagaccgaattgtcggtctatttgggttttttggttcaggttcgattcttatatgtgctatattttggggtatgggttctgttgggggtctgctgctctgcttcgtcgtcgaaggttctttaaaaagaaataccttcgaaagatcagcgtataatcaagcacaatgtgaaggtatacacgaagctgctgtcttcgaaagatcagtgtataatcaagcacggtgcgaaggtatacacgaagctgctgtctgaggagcttcggcataatgatagcttgagatgaagggctgcaccgacttaaaaaagaaaagaccgatcagtccatgataatttgtgttaattgtaactagttatcaaggtcataaatgtaattttgaccgggctgcgtcccgtgcctataaataggtgaacagtactcccgtactgttcacgctgactggtactcactcttgcgtcacgcttggacttttgctctttatcaagccgaaggtacaaatgtaattcaatattatttctatttatccattgtaatataataaaaatatattaataatgtcatgattattc

SEQ ID NO: 62034 - DNA, 4855 bp, Zea Mays
atggaggcggccttcgacgcctacttctgcgccgcggatctggaccgcgacggccggatcagcggccaggaggccgtcgccttcttcaagggctccggcctcccgcagcccgtcctagcgcagatttggacatatgctgataaaaatcggactggtttccttgggcgcgaagacttctgcaattcgcttaaacttgtcacagtagctcagagcggtcgagaattgacacctgatattgttaggtcagcattatttggtccagctgctgcaaagatacctgctcctcggataaatgtttctactgctggtcctcagacaaacagtgtagctagccccccgaatgccactcgagcactagggtctggtcaacagaatcctgctgtaagaggaccacaagtgcttcctggggcatcatcaaatccacaagtgaggccgccacaacctccaaatgcaaacactgtgccccctgttcagggagttgcatcaaggccacccgtgggaggtggtcctagtgggctaaaccataccagctcaaccacaacaaatctcgctacggattggtttagtggtaagaggagtgcaagttcgttgggtgcaacttcacaagctccaaccagaggtatttctccgcagggcaaccttactactgcaggaatttcagcacagaattcaactcctctgccagtctacaattctcatatgccgggtgctacaacacctgccaatgcaaattcaacaaacgtaaacatgatgccttcacaaccatcagttagtgactccaagacattggtacccttgggtaatggattgccatctaactcaacttttggtgttgaccctttttctgtgactctacaagcgaaacaagagtcagctttgacccccaatgttccaaataatcttcccagttctacagctcctgcctcagctgctggacctcatcaccctcctaagccaatgcaggccggtcctttgcagggtatatcgtcgcttccttctcatactagccagttgccacacagtcagccagctcctaggcaacaacaatttaatgctattccaagcactccaggaccagtgggtgcaaatattcctggtggacaaattccttcaaacccataccaatctcaggccccatggccaaaaatcactcaagtggatgtcaggaaatacatgattgtatttatcaaggtagacagagatcgtgatgggaagatcaccggcgaagaagcaaggaatctatttttaagttggaggctgccaagagatatcttaaggaaggtatgggatttgtctgatcaggataaggatgggatgctgtctttcaaggaattttgtgttgccgtgtatttaatggagagacaccgagagcatcgtcctcttcctgatgtactaccagatggtatttgggctgagggcacctcgctaccctctaccggccagtttgcaggaaaccctagtggaccgccttctcatgcaagtacaggattcgcaagtagaggaatgcaaggaccacatcatgggatgcttccctcatccatgaagccaacatctcgaaggcctcttcctttagatgctgacgatactgttaaggcagagcaacaaaagccaaagatccctgtattggaggaacatctagttggccagttgagcaaggaggaacaaggcacactggatgcaaagtttaaggaagcttcagatgctgataagaaaatgttccaatcatatttcttatggtaatttaaatggcagtggcgcttgatctctagataaattatttccgtccaagaattggaaaaggaaatccaggattctagagagaagaccgagttttatcgcaccaagatgcaggagcttattctttacaaaagtaggtgtgagaacaggcttaatgaagtctcagaaagtatgtctgccgataaacgtgaggttcaatcccttgcagcaaaatatgatgaaagatgcaagaaggttggagatgtggcatcaaaattaacaatggatgaggccagttttccgtgagatccaggtatatttcattttatcaatttatttagaaaaccgtgaacatcatccttgaaatccggctatgagcatattttatttttcttatgttttcaggagaagaaacttgaaatttataacgccatagttaagctgcaaaaaggggatgaaagtgatgaaaagcttcaggagcgggctaataagatacagtctgatcttgaggagcttgtgaaatcattgaatgaacaatgcaagagatatgggttgagagctaagccaactacattggtggaacttccttttggttggcaaactggaatacaagagacagcagctacatgggatgaagaatgggacagatttggagatgaaggattctccatcataaaggaactaacagttgaagtagagcctcccgttgtaccaaagagtcaacctactgttgaagatgtcaaagtgtctacaaatggggcatcaacagagaaagaagacaataagtttgctaaatctactgctgctgctgctgtggagcaggcagttgaacctgaagcaataccatccaatagcaaactagagtcaacaaaaagtcctccagttagtcctgtcaagaacagagacgatggttcgaccgatgagcttgatacaaagcaatctggaccaaatgacgtcttaccacgtgccactgagagcgtcagtaaccgtggaatggattcctctgcccatggagataaaacttatgatggacattcatgggccccatcatttgatcatggcactgacaatgactccctatggaactttggtcataaggatggtgagaatggtgattcagatctcttctttgggccacaaggtcttccaccgataaggactggaggttcctcatctaatagtttgtttgtcaaggaacagaaaccatcttttgattctgttcctggtactccaatggagaaacctttctttgattccatcccaggcacaccagttcagaagtccgtcttcgattactccgtccctagtacaccgatgcaaaactcagtctttgattattccatcccaagcacaccgatgcaaaagcctctctttgattccgtccctggtacaccagtgcagaaatcagtatttgattctgttccgagtacaccgatgcagaaatcagtatttgattctgctccaagtacgccaacgcagaaaccattctttgactcttttccaagcaccccaatgcagagatccatgtttgattctggcccaagcagagcagaatctcctactgctggcagcgtgtacggcaaagagcaaaagggattctttgattcttcagttccgagtacaccaatgtacaactcaaacctcacgcccagatacagtgaagcaggagatgattcatttgacacaatgtctcaatacagctccttcggcatgcacgacaacaattcttttggacagatagacagcttctcaagatttgattccttccggagcaatgctgataatggcggtaatgacgcctttgcgagatttgattctttccgcagcacttcagatcaaggcgggggcaacagcttcatgaggtacgattccatgaacagcagcagtgaccatgacagaacggatacatttgcgaggtttgattccatgaagaacagtgacttcaacaaccagggctactcatttgatgatgacgacccctttggaactgggccgttcaaatcaacagagacatcgaacagcccgacgagacatgggacggatgcgtggagtgcattttgacaggtattgtattatagaggtcatgttcttgtgcaccttactgcagatatacatacacgtacaagggcaagacattattttttttgcatgggcctctgctccgcaccttttggacgggacggggcttgcttgtgtgtttaattttgtacctaggctgggaacatgtgtttggagggatggtgctgcttataaacattctttataccttgtattgtacaagtacacctacaagatgctagtcaacccgttgggttgaagaactctccgagtgttttcttccattgtgtagggttttttttctctctcagtttcttctgtttctgcaaaaagttctgagctctgtacatacattttggctaagtcaacctagttatgaggatattgtgagcaattaagtcggttcagcgagaagctagggatcagtttgttcgttgttttaacaaaccgtgagggttgccctccataggggtggtcattctaaggctgaaacttgaacccgaactaaactcgaatagaccgaattgtcggtctatttgggttttttggttcaggttcgattcttatatgtgctatattttggggtatgggttctgttgggggtctgctgctctgcttcgtcgtcgaaggttctttaaaaagaaataccttcgaaagatcagcgtataatcaagcacaatgtgaaggtatacacgaagctgctgtcttcgaaagatcagtgtataatcaagcacggtgcgaaggtatacacgaagctgctgtctgaggagcttcggcataatgatagcttgagatgaagggctgcaccgacttaaaaaagaaaagaccgatcagtccatgataatttgtgttaattgtaactagttatcaaggtcataaatgtaattttgaccgggctgcgtcccgtgcctataaataggtgaacagtactcccgtactgttcacgctgactggtactcactcttgcgtcacgcttggacttttgctctttatcaagccgaaggtacaaatgtaattcaatattatttctatttatccattgtaatataataaaaatatattaataatgtcatgattattc

SEQ ID NO: 62035 - DNA, 4572 bp, Zea Mays
gcaccgcccgcacgccgacacgcgcggctacacctgccactcctcccgatctcgccggccggcgactggtgcctcccgccccagccctcctccgggggcgatggaggcggccttcgacgcctacttctgcgccgcggatctggaccgcgacggccggatcagcggccaggaggccgtcgccttcttcaagggctccggcctcccgcagcccgtcctagcgcagatttggacatatgctgataaaaatcggactggtttccttgggcgcgaagacttctgcaattcgcttaaacttgtcacagtagctcagagcggtcgagaattgacacctgatattgttaggtcagcattatttggtccagctgctgcaaagatacctgctcctcggataaatgtttctactgctggtcctcagacaaacagtgtagctagccccccgaatgccactcgagcactagggtctggtcaacagaatcctgctgtaagaggaccacaagtgcttcctggggcatcatcaaatccacaagtgaggccgccacaacctccaaatgcaaacactgtgccccctgttcagggagttgcatcaaggccacccgtgggaggtggtcctagtgggctaaaccataccagctcaaccacaacaaatctcgctacggattggtttagtggtaagaggagtgcaagttcgttgggtgcaacttcacaagctccaaccagaggtatttctccgcagggcaaccttactactgcaggaatttcagcacagaattcaactcctctgccagtctacaattctcatatgccgggtgctacaacacctgccaatgcaaattcaacaaacgtaaacatgatgccttcacaaccatcagttagtgactccaagacattggtacccttgggtaatggattgccatctaactcaacttttggtgttgaccctttttctgtgactctacaagcgaaacaagagtcagctttgacccccaatgttccaaataatcttcccagttctacagctcctgcctcagctgctggacctcatcaccctcctaagccaatgcaggccggtcctttgcagggtatatcgtcgcttccttctcatactagccagttgccacacagtcagccagctcctaggcaacaacaatttaatgctattccaagcactccaggaccagtgggtgcaaatattcctggtggacaaattccttcaaacccataccaatctcaggccccatggccaaaaatcactcaagtggatgtcaggaaatacatgattgtatttatcaaggtagacagagatcgtgatgggaagatcaccggcgaagaagcaaggaatctatttttaagttggaggctgccaagagatatcttaaggaaggtatgggatttgtctgatcaggataaggatgggatgctgtctttcaaggaattttgtgttgccgtgtatttaatggagagacaccgagagcatcgtcctcttcctgatgtactaccagatggtatttgggctgagggcacctcgctaccctctaccggccagtttgcaggaaaccctagtggaccgccttctcatgcaagtacaggattcgcaagtagaggaatgcaaggaccacatcatgggatgcttccctcatccatgaagccaacatctcgaaggcctcttcctttagatgctgacgatactgttaaggcagagcaacaaaagccaaagatccctgtattggaggaacatctagttggccagttgagcaaggaggaacaaggcacactggatgcaaagtttaaggaagcttcagatgctgataagaaagtccaagaattggaaaaggaaatccaggattctagagagaagaccgagttttatcgcaccaagatgcaggagcttattctttacaaaagtaggtgtgagaacaggcttaatgaagtctcagaaagtatgtctgccgataaacgtgaggttcaatcccttgcagcaaaatatgatgaaagatgcaagaaggttggagatgtggcatcaaaattaacaatggatgaggccagttttccgtgagatccaggagaagaaacttgaaatttataacgccatagttaagctgcaaaaaggggatgaaagtgatgaaaagcttcaggagcgggctaataagatacagtctgatcttgaggagcttgtgaaatcattgaatgaacaatgcaagagatatgggttgagagctaagccaactacattggtggaacttccttttggttggcaaactggaatacaagagacagcagctacatgggatgaagaatgggacagatttggagatgaagttagtcctgtcaagaacagagacgatggttcgaccgatgagcttgatacaaagcaatctggaccaaatgacgtcttaccacgtgccactgagagcgtcagtaaccgtggaatggattcctctgcccatggagataaaacttatgatggacattcatgggccccatcatttgatcatggcactgacaatgactccctatggaactttggtcataaggatggtgagaatggtgattcagatctcttctttgggccacaaggtcttccaccgataaggactggaggttcctcatctaatagtttgtttgtcaaggaacagaaaccatcttttgattctgttcctggtactccaatggagaaacctttctttgattccatcccaggcacaccagttcagaagtccgtcttcgattactccgtccctagtacaccgatgcaaaactcagtctttgattattccatcccaagcacaccgatgcaaaagcctctctttgattccgtccctggtacaccagtgcagaaatcagtatttgattctgttccgagtacaccgatgcagaaatcagtatttgattctgctccaagtacgccaacgcagaaaccattctttgactcttttccaagcaccccaatgcagagatccatgtttgattctggcccaagcagagcagaatctcctactgctggcagcgtgtacggcaaagagcaaaagggattctttgattcttcagttccgagtacaccaatgtacaactcaaacctcacgcccagatacagtgaagcaggagatgattcatttgacacaatgtctcaatacagctccttcggcatgcacgacaacaattcttttggacagatagacagcttctcaagatttgattccttccggagcaatgctgataatggcggtaatgacgcctttgcgagatttgattctttccgcagcacttcagatcaaggcgggggcaacagcttcatgaggtacgattccatgaacagcagcagtgaccatgacagaacggatacatttgcgaggtttgattccatgaagaacagtgacttcaacaaccagggctactcatttgatgatgacgacccctttggaactgggccgttcaaatcaacagagacatcgaacagcccgacgagacatgggacggatgcgtggagtgcattttgacaggtattgtattatagaggtcatgttcttgtgcaccttactgcagatatacatacacgtacaagggcaagacattattttttttgcatgggcctctgctccgcaccttttggacgggacggggcttgcttgtgtgtttaattttgtacctaggctgggaacatgtgtttggagggatggtgctgcttataaacattctttataccttgtattgtacaagtacacctacaagatgctagtcaacccgttgggttgaagaactctccgagtgttttcttccattgtgtagggttttttttctctctcagtttcttctgtttctgcaaaaagttctgagctctgtacatacattttggctaagtcaacctagttatgaggatattgtgagcaattaagtcggttcagcgagaagctagggatcagtttgttcgttgttttaacaaaccgtgagggttgccctccataggggtggtcattctaaggctgaaacttgaacccgaactaaactcgaatagaccgaattgtcggtctatttgggttttttggttcaggttcgattcttatatgtgctatattttggggtatgggttctgttgggggtctgctgctctgcttcgtcgtcgaaggttctttaaaaagaaataccttcgaaagatcagcgtataatcaagcacaatgtgaaggtatacacgaagctgctgtcttcgaaagatcagtgtataatcaagcacggtgcgaaggtatacacgaagctgctgtctgaggagcttcggcataatgatagcttgagatgaagggctgcaccgacttaaaaaagaaaagaccgatcagtccatgataatttgtgttaattgtaactagttatcaaggtcataaatgtaattttgaccgggctgcgtcccgtgcctataaataggtgaacagtactcccgtactgttcacgctgactggtactcactcttgcgtcacgcttggacttttgctctttatcaagccgaaggtacaaatgtaattcaatattatttctatttatccattgtaatataataaaaatatattaataatgtcatgattattc

SEQ ID NO: 62036 - DNA, 4924 bp, Zea Mays
cagaaatcttaagccccttgatgtgatgaaagtttttgtgttgcacggctactttgcccccggaggatccagcgaaatgcaatgcaactcatcttcgtcggggcggacaaacagacgacacaaggcgaaggcaccgcccgcacgccgacacgcgcggctacacctgccactcctcccgatctcgccggccggcgactggtgcctcccgccccagccctcctccgggggcgatggaggcggccttcgacgcctacttctgcgccgcggatctggaccgcgacggccggatcagcggccaggaggccgtcgccttcttcaagggctccggcctcccgcagcccgtcctagcgcagatttggacatatgctgataaaaatcggactggtttccttgggcgcgaagacttctgcaattcgcttaaacttgtcacagtagctcagagcggtcgagaattgacacctgatattgttaggtcagcattatttggtccagctgctgcaaagatacctgctcctcggataaatgtttctactgctggtcctcagacaaacagtgtagctagccccccgaatgccactcgagcactagggtctggtcaacagaatcctgctgtaagaggaccacaagtgcttcctggggcatcatcaaatccacaagtgaggccgccacaacctccaaatgcaaacactgtgccccctgttcagggagttgcatcaaggccacccgtgggaggtggtcctagtgggctaaaccataccagctcaaccacaacaaatctcgctacggattggtttagtggtaagaggagtgcaagttcgttgggtgcaacttcacaagctccaaccagaggtatttctccgcagggcaaccttactactgcaggaatttcagcacagaattcaactcctctgccagtctacaattctcatatgccgggtgctacaacacctgccaatgcaaattcaacaaacgtaaacatgatgccttcacaaccatcagttagtgactccaagacattggtacccttgggtaatggattgccatctaactcaacttttggtgttgaccctttttctgtgactctacaagcgaaacaagagtcagctttgacccccaatgttccaaataatcttcccagttctacagctcctgcctcagctgctggacctcatcaccctcctaagccaatgcaggccggtcctttgcagggtatatcgtcgcttccttctcatactagccagttgccacacagtcagccagctcctaggcaacaacaatttaatgctattccaagcactccaggaccagtgggtgcaaatattcctggtggacaaattccttcaaacccataccaatctcaggccccatggccaaaaatcactcaagtggatgtcaggaaatacatgattgtatttatcaaggtagacagagatcgtgatgggaagatcaccggcgaagaagcaaggaatctatttttaagttggaggctgccaagagatatcttaaggaaggtatgggatttgtctgatcaggataaggatgggatgctgtctttcaaggaattttgtgttgccgtgtatttaatggagagacaccgagagcatcgtcctcttcctgatgtactaccagatggtatttgggctgagggcacctcgctaccctctaccggccagtttgcaggaaaccctagtggaccgccttctcatgcaagtacaggattcgcaagtagaggaatgcaaggaccacatcatgggatgcttccctcatccatgaagccaacatctcgaaggcctcttcctttagatgctgacgatactgttaaggcagagcaacaaaagccaaagatccctgtattggaggaacatctagttggccagttgagcaaggaggaacaaggcacactggatgcaaagtttaaggaagcttcagatgctgataagaaagtccaagaattggaaaaggaaatccaggattctagagagaagaccgagttttatcgcaccaagatgcaggagcttattctttacaaaagtaggtgtgagaacaggcttaatgaagtctcagaaagtatgtctgccgataaacgtgaggttcaatcccttgcagcaaaatatgatgaaagatgcaagaaggttggagatgtggcatcaaaattaacaatggatgaggccagttttccgtgagatccaggagaagaaacttgaaatttataacgccatagttaagctgcaaaaaggggatgaaagtgatgaaaagcttcaggagcgggctaataagatacagtctgatcttgaggagcttgtgaaatcattgaatgaacaatgcaagagatatgggttgagagctaagccaactacattggtggaacttccttttggttggcaaactggaatacaagagacagcagctacatgggatgaagaatgggacagatttggagatgaaggattctccatcataaaggaactaacagttgaagtagagcctcccgttgtaccaaagagtcaacctactgttgaagatgtcaaagtgtctacaaatggggcatcaacagagaaagaagacaataagtttgctaaatctactgctgctgctgctgtggagcaggcagttgaacctgaagcaataccatccaatagcaaactagagtcaacaaaaagtcctccagttagtcctgtcaagaacagagacgatggttcgaccgatgagcttgatacaaagcaatctggaccaaatgacgtcttaccacgtgccactgagagcgtcagtaaccgtggaatggattcctctgcccatggagataaaacttatgatggacattcatgggccccatcatttgatcatggcactgacaatgactccctatggaactttggtcataaggatggtgagaatggtgattcagatctcttctttgggccacaaggtcttccaccgataaggactggaggttcctcatctaatagtttgtttgtcaaggaacagaaaccatcttttgattctgttcctggtactccaatggagaaacctttctttgattccatcccaggcacaccagttcagaagtccgtcttcgattactccgtccctagtacaccgatgcaaaactcagtctttgattattccatcccaagcacaccgatgcaaaagcctctctttgattccgtccctggtacaccagtgcagaaatcagtatttgattctgttccgagtacaccgatgcagaaatcagtatttgattctgctccaagtacgccaacgcagaaaccattctttgactcttttccaagcaccccaatgcagagatccatgtttgattctggcccaagcagagcagaatctcctactgctggcagcgtgtacggcaaagagcaaaagggattctttgattcttcagttccgagtacaccaatgtacaactcaaacctcacgcccagatacagtgaagcaggagatgattcatttgacacaatgtctcaatacagctccttcggcatgcacgacaacaattcttttggacagatagacagcttctcaagatttgattccttccggagcaatgctgataatggcggtaatgacgcctttgcgagatttgattctttccgcagcacttcagatcaaggcgggggcaacagcttcatgaggtacgattccatgaacagcagcagtgaccatgacagaacggatacatttgcgaggtttgattccatgaagaacagtgacttcaacaaccagggctactcatttgatgatgacgacccctttggaactgggccgttcaaatcaacagagacatcgaacagcccgacgagacatgggacggatgcgtggagtgcattttgacaggtattgtattatagaggtcatgttcttgtgcaccttactgcagatatacatacacgtacaagggcaagacattattttttttgcatgggcctctgctccgcaccttttggacgggacggggcttgcttgtgtgtttaattttgtacctaggctgggaacatgtgtttggagggatggtgctgcttataaacattctttataccttgtattgtacaagtacacctacaagatgctagtcaacccgttgggttgaagaactctccgagtgttttcttccattgtgtagggttttttttctctctcagtttcttctgtttctgcaaaaagttctgagctctgtacatacattttggctaagtcaacctagttatgaggatattgtgagcaattaagtcggttcagcgagaagctagggatcagtttgttcgttgttttaacaaaccgtgagggttgccctccataggggtggtcattctaaggctgaaacttgaacccgaactaaactcgaatagaccgaattgtcggtctatttgggttttttggttcaggttcgattcttatatgtgctatattttggggtatgggttctgttgggggtctgctgctctgcttcgtcgtcgaaggttctttaaaaagaaataccttcgaaagatcagcgtataatcaagcacaatgtgaaggtatacacgaagctgctgtcttcgaaagatcagtgtataatcaagcacggtgcgaaggtatacacgaagctgctgtctgaggagcttcggcataatgatagcttgagatgaagggctgcaccgacttaaaaaagaaaagaccgatcagtccatgataatttgtgttaattgtaactagttatcaaggtcataaatgtaattttgaccgggctgcgtcccgtgcctataaataggtgaacagtactcccgtactgttcacgctgactggtactcactcttgcgtcacgcttggacttttgctctttatcaagccgaaggtacaaatgtaattcaatattatttctatttatccattgtaatataataaaaatatattaataatgtcatgattattc

SEQ ID NO: 62037 - DNA, 4936 bp, Zea Mays
aacatttccaaccatcccttcttcttttatgttcttttccaaaagtaaccgcaagtacttaaactctagccagaaatcttaagccccttgatgtgatgaaagtttttgtgttgcacggctactttgcccccggaggatccagcgaaatgcaatgcaactcatcttcgtcggggcggacaaacagacgacacaaggcgaaggcaccgcccgcacgccgacacgcgcggctacacctgccactcctcccgatctcgccggccggcgactggtgcctcccgccccagccctcctccgggggcgatggaggcggccttcgacgcctacttctgcgccgcggatctggaccgcgacggccggatcagcggccaggaggccgtcgccttcttcaagggctccggcctcccgcagcccgtcctagcgcagatttggacatatgctgataaaaatcggactggtttccttgggcgcgaagacttctgcaattcgcttaaacttgtcacagtagctcagagcggtcgagaattgacacctgatattgttaggtcagcattatttggtccagctgctgcaaagatacctgctcctcggataaatgtttctactgctggtcctcagacaaacagtgtagctagccccccgaatgccactcgagcactagggtctggtcaacagaatcctgctgtaagaggaccacaagtgcttcctggggcatcatcaaatccacaagtgaggccgccacaacctccaaatgcaaacactgtgccccctgttcagggagttgcatcaaggccacccgtgggaggtggtcctagtgggctaaaccataccagctcaaccacaacaaatctcgctacggattggtttagtggtaagaggagtgcaagttcgttgggtgcaacttcacaagctccaaccagaggtatttctccgcagggcaaccttactactgcaggaatttcagcacagaattcaactcctctgccagtctacaattctcatatgccgggtgctacaacacctgccaatgcaaattcaacaaacgtaaacatgatgccttcacaaccatcagttagtgactccaagacattggtacccttgggtaatggattgccatctaactcaacttttggtgttgaccctttttctgtgactctacaagcgaaacaagagtcagctttgacccccaatgttccaaataatcttcccagttctacagctcctgcctcagctgctggacctcatcaccctcctaagccaatgcaggccggtcctttgcagggtatatcgtcgcttccttctcatactagccagttgccacacagtcagccagctcctaggcaacaacaatttaatgctattccaagcactccaggaccagtgggtgcaaatattcctggtggacaaattccttcaaacccataccaatctcaggccccatggccaaaaatcactcaagtggatgtcaggaaatacatgattgtatttatcaaggtagacagagatcgtgatgggaagatcaccggcgaagaagcaaggaatctatttttaagttggaggctgccaagagatatcttaaggaaggtatgggatttgtctgatcaggataaggatgggatgctgtctttcaaggaattttgtgttgccgtgtatttaatggagagacaccgagagcatcgtcctcttcctgatgtactaccagatggtatttgggctgagggcacctcgctaccctctaccggccagtttgcaggaaaccctagtggaccgccttctcatgcaagtacaggattcgcaagtagaggaatgcaaggaccacatcatgggatgcttccctcatccatgaagccaacatctcgaaggcctcttcctttagatgctgacgatactgttaaggcagagcaacaaaagccaaagatccctgtattggaggaacatctagttggccagttgagcaaggaggaacaaggcacactggatgcaaagtttaaggaagcttcagatgctgataagaaagtccaagaattggaaaaggaaatccaggattctagagagaagaccgagttttatcgcaccaagatgcaggagcttattctttacaaaagtaggtgtgagaacaggcttaatgaagtctcagaaagtatgtctgccgataaacgtgaggttcaatcccttgcagcaaaatatgatgaaagatgcaagaaggagaagaaacttgaaatttataacgccatagttaagctgcaaaaaggggatgaaagtgatgaaaagcttcaggagcgggctaataagatacagtctgatcttgaggagcttgtgaaatcattgaatgaacaatgcaagagatatgggttgagagctaagccaactacattggtggaacttccttttggttggcaaactggaatacaagagacagcagctacatgggatgaagaatgggacagatttggagatgaaggattctccatcataaaggaactaacagttgaagtagagcctcccgttgtaccaaagagtcaacctactgttgaagatgtcaaagtgtctacaaatggggcatcaacagagaaagaagacaataagtttgctaaatctactgctgctgctgctgtggagcaggcagttgaacctgaagcaataccatccaatagcaaactagagtcaacaaaaagtcctccagttagtcctgtcaagaacagagacgatggttcgaccgatgagcttgatacaaagcaatctggaccaaatgacgtcttaccacgtgccactgagagcgtcagtaaccgtggaatggattcctctgcccatggagataaaacttatgatggacattcatgggccccatcatttgatcatggcactgacaatgactccctatggaactttggtcataaggatggtgagaatggtgattcagatctcttctttgggccacaaggtcttccaccgataaggactggaggttcctcatctaatagtttgtttgtcaaggaacagaaaccatcttttgattctgttcctggtactccaatggagaaacctttctttgattccatcccaggcacaccagttcagaagtccgtcttcgattactccgtccctagtacaccgatgcaaaactcagtctttgattattccatcccaagcacaccgatgcaaaagcctctctttgattccgtccctggtacaccagtgcagaaatcagtatttgattctgttccgagtacaccgatgcagaaatcagtatttgattctgctccaagtacgccaacgcagaaaccattctttgactcttttccaagcaccccaatgcagagatccatgtttgattctggcccaagcagagcagaatctcctactgctggcagcgtgtacggcaaagagcaaaagggattctttgattcttcagttccgagtacaccaatgtacaactcaaacctcacgcccagatacagtgaagcaggagatgattcatttgacacaatgtctcaatacagctccttcggcatgcacgacaacaattcttttggacagatagacagcttctcaagatttgattccttccggagcaatgctgataatggcggtaatgacgcctttgcgagatttgattctttccgcagcacttcagatcaaggcgggggcaacagcttcatgaggtacgattccatgaacagcagcagtgaccatgacagaacggatacatttgcgaggtttgattccatgaagaacagtgacttcaacaaccagggctactcatttgatgatgacgacccctttggaactgggccgttcaaatcaacagagacatcgaacagcccgacgagacatgggacggatgcgtggagtgcattttgacaggtattgtattatagaggtcatgttcttgtgcaccttactgcagatatacatacacgtacaagggcaagacattattttttttgcatgggcctctgctccgcaccttttggacgggacggggcttgcttgtgtgtttaattttgtacctaggctgggaacatgtgtttggagggatggtgctgcttataaacattctttataccttgtattgtacaagtacacctacaagatgctagtcaacccgttgggttgaagaactctccgagtgttttcttccattgtgtagggttttttttctctctcagtttcttctgtttctgcaaaaagttctgagctctgtacatacattttggctaagtcaacctagttatgaggatattgtgagcaattaagtcggttcagcgagaagctagggatcagtttgttcgttgttttaacaaaccgtgagggttgccctccataggggtggtcattctaaggctgaaacttgaacccgaactaaactcgaatagaccgaattgtcggtctatttgggttttttggttcaggttcgattcttatatgtgctatattttggggtatgggttctgttgggggtctgctgctctgcttcgtcgtcgaaggttctttaaaaagaaataccttcgaaagatcagcgtataatcaagcacaatgtgaaggtatacacgaagctgctgtcttcgaaagatcagtgtataatcaagcacggtgcgaaggtatacacgaagctgctgtctgaggagcttcggcataatgatagcttgagatgaagggctgcaccgacttaaaaaagaaaagaccgatcagtccatgataatttgtgttaattgtaactagttatcaaggtcataaatgtaattttgaccgggctgcgtcccgtgcctataaataggtgaacagtactcccgtactgttcacgctgactggtactcactcttgcgtcacgcttggacttttgctctttatcaagccgaaggtacaaatgtaattcaatattatttctatttatccattgtaatataataaaaatatattaataatgtcatgattattc

SEQ ID NO: 62038 - DNA, 3079 bp, Zea Mays
gtctttcatagcttctcctgactcaactttgactcttgaaactttaacttgcggactggttgctttgaccttcagatgctcgaggttgattgacgatataattcttgaggatcccttggacttgtgggttaggacccacacacgcttccgctgcttcactttgatcttgtttgttgatgttgatcacattgtcttcattgagttagcggctaacccccttaacaggagcgtcgatatgcacttggtgaagatgctgccgactctgatcttgactgatttggaggagttggaggttgccaaatggacaggtgcaagaggaaagggtagcgagaaaaggtaagtatagacggattagagagagcagggggagaacccaactacttaactctatggcattcacctagtaaactgatgtcattgcggattaagggccacaacacatcaacactcattccaaagaagcaaatcagtcatcacacaaagacaaatagcacaagcatacaacaacaaacattttgttgctacatgttccttctaattaaatggtggtctttcatgaaaagggaataactactctctaaggttgttgaaggacaaggagaagaacaagacgtgtaggatagggacacgagcaccataaagaatggagttaaagcaagcattgtaagcgatcaacgaaaggatacgaccaagggcataatgggtagaacaacactcccgggttgagatagaaaaggggagatttccaaaagcagaccttagataggtatcaagtcaaaatctagtgattacaagggtaaggggtatatcaaacaaacgctatgactggcaacgctgtagaggaaaagggaatgaccaagagcaggtaggtaagacaacactcttgaactggaacgagggagggactttaaaatgcagggacgggataagcatcaaggtaaagatcaagggatgacgagggttaaggtgataacggacaaacacccaaccaaaaatttattttagacaaaacttgcaaggtgtcgagaagggggagcagtcaatgatgaataggtgaggcattatcctcaaacacggatggaaaagaggaggcttcaaaggatatgttcgagataggtaggagggtaaggacatagatatcacaagggttttgaaggtaataacggacaaagatgtaggagaggaggtaaataagcataagacaaaagatattagtaccataaatgatggagttaagataggacctgcaaatggaaaaggagagggtacgtccaagggccagatagataagcagccactatctaatggaggtggaagagaggagatttttaaggatccagaataaagatgagtgtcaacgcaagatggatggatgacaaggtgatggtgatagcaaataaaacacatcaacggatggaattaagacaaaacttgtaaggcgacaagaagtgaaaagaaatcaagagagagataggtaacccgcaactctcaaaccgagttgaaagaaagggaaggcttttaaaggataagtttaaggtaagaatttaggtagaagacataaatatcacaagggtcagaggcgacaacatacaagggcatgaaaaaaacgaaggcattgaagagctagtggtataagtacaacaaagaatgaagttatgttaaggcttacacacggtgaagaagaggatattaccaagggtgagataagtaaaacactgctctcaacttaggataagagattggagattttagataacaaacataatgtaatcacaaggcaggacagagtgatgagaagggtaaaggaaataacaatcaaaaacacaacgaaggatagagttaacaactcgcaggtgacaaagaagaggatacgaccaagggaaaagtaggtaaagtacgatgctcaaattgagatggaaaaaggagaagattttaaatgccggtataagataaacctcaagtaagatatagagatgtctaaggtgaaggtgataataacaaaagtcatgacaaatgatagagttaagggaagactcacgtagtggcgaagtggagaaaacaatcaacagtaagataggtgagggtgcaatattatggttgacgtaagaactcattatcgagagaagttataaaggaacaacgagatcaccaaggatgggcgacatgaaatgatcgctcatggactgttaagaaacaggggtggtcaaggacatgttaactgaaatgtcttgaacggttattggggtatgaaaataagcatacataagaatataagagtatgcaagattccaaggatacgagcatactaagaccaagggcacagaaattaccgagagatagcgacttaacaacagaataagaaatgatctcagaagacaagaaggtcatggacacataaactgaactatttaaataggcaatagaggtacaagggtaagtattttagattaagggataagggtattaaaaaaatgcaagggtacgagcatgtcaataacaaaatggaatagagatggtcaaatggtagcaatttaaaaatggacgaggaaagagtcccaaaagactaaaggctatggtcagggggcatctacaaagatgtcgcaagcacaagagtgaggtaagttctaatagactgagagaagtatagaccatgctagaataaaatactttttgacaagggggcatataggagcacaacatagaattagtcgagatgactaaaatttgaagcagaatcaaggatgaggtgaagtaacagtcaagaagtccttaaaacggccaatgctactctaggtcagcggtcctacagtcagcacggctttgataccacttatgtcacacccggttttagaaggcaaaccgaatgcgaaccatgtacgtgccaggatcagcaattcacgtacacagcagttacataacatggacatcatcacacagtgctcaaatagtactaaaaagggaataatagtcgattacatcataagtctgagacatccacatagtctttacaaataatcaaagtgcgaaaacgaaaagtagataaacgcggccttcacaggcagccgactgggggttgccg

SEQ ID NO: 62039 - DNA, 3462 bp, Zea Mays
agcagtcatggcctcgccgggcgccctgcgctgcttaaaaacctcggcccttaattcgctcgcaccggttactgctgctcctgcttcctcacaccaccctacctctcctgccagagcaggaggaagaaagattggcaggaagcagcagttcctagaccaaggaccggccggggaggacggaggatagagacggcgagcgagcaagtgtaactgttgccgtggaaacgggagagggatagagagagagagagaaacgggccgggaggagagagataagcgctagccaggaaggaaacaaggtggaagcttgcgcagtgggggtgggtgtggaaatggcgtgaagcatgtctggatccccaaggtttcgcgataccctgctgcctattctgcagcgttcgtctcgagctggaactggaaggcggctaccactccggcgcagtcttgcccggcctactcatcgtcgtgtataaatcagagcagggggccaggccacagaaggcactgcagcagagcagcacagagatctctactccttcccttacagctgtggaacgagtgagcgagcaggagggacaagacaaggttggtagtagtagtagtaggtgggtggctagcctgcagccagccggcaatggatttcggcgacgaacctgagggctccgacagccagcgccagcggaagcggtaccaccggcacacgccgcgccagattcagcagctcgaggcgtacgatctcgcttcgtttccatttcttttgctgcttctttattctgtccggccgcccttgtggttgttcgtcgtgagacgtgatggtttggcggaaaggaatgtaatggcgtgcgtgctcgcccatgactgcaggatgttcaaggagtgcccgcaccccgacgagaaccagcgcgccgcgctcagccgggagctcggcctggagccgcgccagatcaagttctggtttcagaaccgccgcacccagatgaaggcgcagcacgagcgcgcggacaactgcttcctgcgcgcggagaacgacaagatccggtgcgagaacatcaccatgcgcgaggcgctcaagaacgtcatctgccccagctgcggcggcccgcccgtcgacgaggacttcttcgacgagcagaagctccgcatggagaatgcccgcctcaaggaagagctggatcgggtgtcgagcatcacgtccaagtacctcggccggccgttcacgcagatgcctccggtgccgaccatgtccgtgtcgtcgctggacctgtccgtgggcgggatgggctccctcggcgggccgtcgctggacctcgacctcctcagcggctgctcgtccgggctgccgtaccaggtgccggcgcccgtgacggaaatggagcgccccatgatggtcgatatggcggcgcgcgccatggacgagctcatccggctcgcccaggccggcgagcaaatctgggtcaagggcgtgcccggggacgcgagggaggtgctcgacgtcggtacttacgacagcctcttcgccaagcccggcgccgcgttccgcccgccggacatcaacgtcgaggcgtccagggactcgggcctcgtgttcatgagcgccgtcgcgctcgtcgacgtcttcatggacacgaacaagtggatggaattcttccccggcatcgtgtccaaggcgcaaaccgtcgatgttctcgtgaacggcttgggcgggaggagcgagtccttaatcatgatgtatgaggagctgcacatcatgactccggtcgtgccgactcgcgagctgagcttcctccgctactgcaagcagatcgagcaggggctgtgggccgtcgcggacgtctccctggaggggcagcgcgacgcccattacggcgtgccgtcccgctcccgtcgcatgccgtcggggtgcctcatcgccgacatgtcgaacggctactccaaggtgacctgggtcgaacacatggagatcgagcagatgctcccgatcaacgtcctttaccgcaacctggtgctgagcggcgccgcgttcggggcgcaccgctggctggccgcgctgcagcgtgcgtgcgagcggttcgcgtccgtggccaccctcggcgtgccgcaccacgacgtcgccggagtgacgccggaggggaagcggagcatgacgaagctgtcgcagcggatggtgagcagcttctgtgccagcctgagctcgtcgccgctgcagcggtggacgctgctctctggcaccacggacgtgagcgtccgggtctccacgcaccgcagcaccgactcaggccagcccaacggcgtcgtcctcagcgccgccacctccatctggctgcccgtccccggcgaccatgtcttcgccttcgtccgcgacgagaacgcgcgctcccagtgggatgtcctgtcgcacggcaatcaggttcaggaggtgtcgcgcatccccaacggctccaaccccggcaactgcatctccctgctaagaggtctgaacgcgaaccagaacagcatgctgatccttcaggagagctgcacggacgcgtcgggggcgctggtggtgtactcgccgatcgacatcccggcggcgaacgtggtgatgagcggcgaggacccgtcgggcatcccgctgctgccgtcgggcttcgccatcctgccggggtccggcgcgggcgcgtccagcagcgccgtcgtcccgccgccgggctgcgtggtcaccgtcgcgttccagatcctcgtcagcaacctgccgtcgtccaggctgaacgccgagtccgtcgccaccgtcaacagcctcatcggcaccaccgtgcagcagatcaaggcggcgctcaactgtgccggccattgatcgcctcgtcgcccttccaccctcgctccgccgccacagtaactgacgagagttggttggcccgttgaatgctcgcattcatggagtccacctgccgctgctcccgcggaaactgctgacgccctccagcaacctatatccatgatccatccccaccatgcaccataacagcttttccttcctctagattcagcgtcgttttccttggcttaaagttctcaggattcgcccgagtcctcttcttctttcttttttttttctttcctccttaggcatcattcgctcgtgcgccaaagatctgtcgaaggctttatgagactgagggagtcaagaacgcaccatgctaccttgtccctttcctccggctgcagccgttttttcccctcgccatgcacccacccacccaccccacacacacttcttccttttcccttagtaaaaacttgcatgcatgctcacatccttgtcatgtcgccattgtcgttggtgctgccgcaacagaggatgaatggttcgggtattgacttctgtccattaatgtaaagccttcaatgaacattcatttcgattataaatggaaaggagaaaaaaaacacaagttctggtaaaaagctgtgagaagcatgcgtgtt

SEQ ID NO: 62040 - DNA, 893 bp, Zea Mays
gcaacaccaatacatgaagggatgcggactcccatgcgaagtcgagcctgggctcctatgagccctccgagggataattgggaagatggaaatcctgctacttggggtagcagtccagcttaccaggaaccccacaagctcggccatacgaagcccccacacctggatcagggtgggcaaacactccaggagttagtttcaatgatgctcctactcccagggataactatgcaaatgccccaagtccatacgtgccttccacgcctgttggccaaccaatgacgccaaactcagcctcatatcttccaggcacacctggtggtcaaccaatgaccccaggcaatgctggaatggatatgatgtcgccgataataggtggtgagggtgaagctacatggctgctgccggatgttttggtcaatgtgttgagcggaggtgatgacggtcctggtgtggttagggaggtactcggggatggatcttgccgagttgcacttgggtcttcgggcaacggtgacatggtgacggttcttccgaacgaggtcgaggtcatcaggccgaagaagagtgacaagatcaagatactgaatggtagtttccgtgggcacacaggaaaacttataggtatagatggttctgacggaatagtgaggcttgacgacacatacgaagttaagatattagatatggtgattttggccaaactggcgacttgaaatggatgtatattttgttttgtaacgtgtccaccatagaacatattttgtaacaatgccctcgtttgcaataaagctttttgttgcttacgactacaatagttttgcacacttgtgcttttgcccaagggccgctcgtttttagaccttcagttgctgactggtcgtatatatcat

SEQ ID NO: 62041 - DNA, 2570 bp, Zea Mays
cgcgaggcggctcggctctacacctacgcgtgcgcggcctcgcctcttccctcgcacgactcgccgcgaggagtttccccttcctccgcgtgcatccccgcgagagctcgaaaacctagccgccaaatccatggctcgccgcgaccacgacgacgacgacgaggaagaggtcgaggaggaggcatacgacttggacgaggaggaggatgacgaggatgaggaagacgactacgaggaggaggcgaggcgcgggaaggcctcccgcggcggtggcaagggtggcggcgggcggaagcggtcacgcgaagacaacttcatcgacgactcggccatcgaggacgaggacgaggacgacgacgacgacggcgggggccggccgaggaagaagggcggcggcggggtgcgagggttcttcgacgaggaggcccaggtcgacgaggatgaggaagaagaggacgaaggcgagggagaggacgattttattaatgatgctggggccgaccttcctgatgaggatgttgttaggggctcaagacgtcattctattcctatgagagatgaggaagaggatattgatgagattgagagacaagtgcgggagagatacgcacgatccactcatattgagtacggtgaggaagctgcagaagtggaacagcaagctctgctgccgtccgtgaaggatcccaaactatggatggtcaaatgtgcgattggacatgagagagaaactgctatttgtctgatgcaaaagttcatcgatcggtcagaccttcagataaagtcagtcgtggcattggatcatcttaaaaattatatttatgttgaagctgaaaaggaggcccatgtcaaagaggcttgcaaaggtctaagaaacatttatgcttcagcaaaaataacattagtgccgataaaagaaatggcagatgtcctctccgttgagagcaaatctgttgatctttcaagggattcttgggttcgaatgaaattgggcatatataaaggcgaccttgctaaggttgttgatgttgataatgtacgtcaaagagtagacgtgaagctgatccctagaatagatctacaagctttggctagtaaacttgaaggggagtctgtaaagaagaaagcatttgtcccaccaccacgattcttcaatatcgatgaggcgagggagatgcatattcgtgtggaacggaggcgagataaagaatctggggagtactttgagtgggttgataatttgaagttcaaagatggtttcttgtacaaatctgtctccactaaatcgatccacacaaacaatattcaaccgaattttgacgaacttgagaagtttaagaagcctggtgatgacatgaatggcgacatggctagcttgtccactctgtttgcaaacaggaaaaaaggacactttatgaagggtgatgccgtcattgttattaaaggcgatttgaaaaatctggagggttgggttgagaaagtagaggatgaaaccgttcacatcaggccaaaaatatctgatctcccgaaaacattggccttcaatgaaaaagagctttgcaaatatttcaagcctggtgaccatgtcaaggtgatctcaggagttcaagaaggcgctactggcatggttgttaaagtggaagggcatgtcttgatcattttgtctgacacaactaaagaacatatccgtgtgtttgctgatcatgtcgttgaaagctctgaaattaccacaggaatcaccagaatcgggataattgggaagatggaaatcctgctacttggggtagcagtccagcttaccaggaaccccacaagctcggccatacgaagcccccacacctggatcagggtgggcaaacactccaggagttagtttcaatgatgctcctactcccagggataactatgcaaatgccccaagtccatacgtgccttccacgcctgttggccaaccaatgacgccaaactcagcctcatatcttccaggcacacctggtggtcaaccaatgaccccaggcaatgctggaatggatatgatgtcgccgataataggtggtgagggtgaagctacatggctgctgccggatgttttggtcaatgtgttgagcggaggtgatgacggtcctggtgtggttagggaggtactcggggatggatcttgccgagttgcacttgggtcttcgggcaacggtgacatggtgacggttcttccgaacgaggtcgaggtcatcaggccgaagaagagtgacaagatcaagatactgaatggtagtttccgtgggcacacaggaaaacttataggtatagatggttctgacggaatagtgaggcttgacgacacatacgaagttaagatattagatatggtgattttggccaaactggcgacttgaaatggatgtatattttgttttgtaacgtgtccaccatagaacatattttgtaacaatgccctcgtttgcaataaagctttttgttgcttacgactacaatagttttgcacacttgtgcttttgcccaagggccgctcgtttttagaccttcagttgctgactggtcgtatatatcat

SEQ ID NO: 62042 - DNA, 2626 bp, Zea Mays
ttccgattaatttagccggggcttggcagccctacgcgcggcttcgcggagtcgcgaggcggctcggctctacacctacgcgtgcgcggcctcgcctcttccctcgcacgactcgccgcgaggagtttccccttcctccgcgtgcatccccgcgagagctcgaaaacctagccgccaaatccatggctcgccgcgaccacgacgacgacgacgaggaagaggtcgaggaggaggcatacgacttggacgaggaggaggatgacgaggatgaggaagacgactacgaggaggaggcgaggcgcgggaaggcctcccgcggcggtggcaagggtggcggcgggcggaagcggtcacgcgaagacaacttcatcgacgactcggccatcgaggacgaggacgaggacgacgacgacgacggcgggggccggccgaggaagaagggcggcggcggggtgcgagggttcttcgacgaggaggcccaggtcgacgaggatgaggaagaagaggacgaaggcgagggagaggacgattttattaatgatgctggggccgaccttcctgatgaggatgttgttaggggctcaagacgtcattctattcctatgagagatgaggaagaggatattgatgagattgagagacaagtgcgggagagatacgcacgatccactcatattgagtacggtgaggaagctgcagaagtggaacagcaagctctgctgccgtccgtgaaggatcccaaactatggatggtcaaatgtgcgattggacatgagagagaaactgctatttgtctgatgcaaaagttcatcgatcggtcagaccttcagataaagtcagtcgtggcattggatcatcttaaaaattatatttatgttgaagctgaaaaggaggcccatgtcaaagaggcttgcaaaggtctaagaaacatttatgcttcagcaaaaataacattagtgccgataaaagaaatggcagatgtcctctccgttgagagcaaatctgttgatctttcaagggattcttgggttcgaatgaaattgggcatatataaaggcgaccttgctaaggttgttgatgttgataatgtacgtcaaagagtagacgtgaagctgatccctagaatagatctacaagctttggctagtaaacttgaaggggagtctgtaaagaagaaagcatttgtcccaccaccacgattcttcaatatcgatgaggcgagggagatgcatattcgtgtggaacggaggcgagataaagaatctggggagtactttgagtgggttgataatttgaagttcaaagatggtttcttgtacaaatctgtctccactaaatcgatccacacaaacaatattcaaccgaattttgacgaacttgagaagtttaagaagcctggtgatgacatgaatggcgacatggctagcttgtccactctgtttgcaaacaggaaaaaaggacactttatgaagggtgatgccgtcattgttattaaaggcgatttgaaaaatctggagggttgggttgagaaagtagaggatgaaaccgttcacatcaggccaaaaatatctgatctcccgaaaacattggccttcaatgaaaaagagctttgcaaatatttcaagcctggtgaccatgtcaaggtgatctcaggagttcaagaaggcgctactggcatggttgttaaagtggaagggcatgtcttgatcattttgtctgacacaactaaagaacatatccgtgtgtttgctgatcatgtcgttgaaagctctgaaattaccacaggaatcaccagaatcgggataattgggaagatggaaatcctgctacttggggtagcagtccagcttaccagccaggaaccccacaagctcggccatacgaagcccccacacctggatcagggtgggcaaacactccaggagttagtttcaatgatgctcctactcccagggataactatgcaaatgccccaagtccatacgtgccttccacgcctgttggccaaccaatgacgccaaactcagcctcatatcttccaggcacacctggtggtcaaccaatgaccccaggcaatgctggaatggatatgatgtcgccgataataggtggtgagggtgaagctacatggctgctgccggatgttttggtcaatgtgttgagcggaggtgatgacggtcctggtgtggttagggaggtactcggggatggatcttgccgagttgcacttgggtcttcgggcaacggtgacatggtgacggttcttccgaacgaggtcgaggtcatcaggccgaagaagagtgacaagatcaagatactgaatggtagtttccgtgggcacacaggaaaacttataggtatagatggttctgacggaatagtgaggcttgacgacacatacgaagttaagatattagatatggtgattttggccaaactggcgacttgaaatggatgtatattttgttttgtaacgtgtccaccatagaacatattttgtaacaatgccctcgtttgcaataaagctttttgttgcttacgactacaatagttttgcacacttgtgcttttgcccaagggccgctcgtttttagaccttcagttgctgactggtcgtatatatcat

SEQ ID NO: 62043 - DNA, 1015 bp, Zea Mays
ggcagacatgagatgtgaggaatatggcaccttgatagctagataagtgtctctgaactctgctgcaatgtatacacaaataatcattacatacatccctatatcacaaggacagtcatcagtcagtgcaaacaaaaaagtaagaaaacaacctaccatttatagaacacaaacgtaatactccctggaccaaattatagttagctttgtcttactttaaatttttttatctttgatgaaatgtataggagaatgcaccaaaccaacaacatcgacaacatcaaattagttttattaaactctccacaaaatatgtctttgataatgcatttatttgaacctgtagatgctaatacattttcctaataacttggtcagttttagaagattgatttaggacaaaaaataaagtgtcatgtaatttattgcagaaaaaatgtgccatgtatttacaacggagggaataacttctatgcatatagtcacgcttcaagacaattaagaataatagaatcatagaacataattgaataatattgtgtgttgtttaaaaatatccctttttgtctcatgccaaaggacaagcacaaaaccagcctaaatctcttgtggttaactatgtcgctatctatgggagttttatccacctgcgtttcttctatatgcacagagcatgtcttacacatgctggtgttgagtttttttattaaattgaatactatttcgacaatgtgagagcgatgcaaacataaagcaggatcaaaagaaccatttagagccagcatacctggccgccagaatcgtctctctgcttattttggcacgacgaaaaggtcgacgacacaggacctatcatttcctcaagggtcgttcgccagctttgttgtagtttgctgacaggcaggatcacaccctgcaaatcctcaggctacgacaaaccaaaaatggacaaaatgcaggtgggggagaaaggagaaagatgagattaatttgggacctggacccaggcgcgctg

SEQ ID NO: 62044 - DNA, 600 bp, Zea Mays
gtcggctcaaatatatctaggcgtcggatttccaatcaacggctacatcatgacgacacagtcttgccttggacgcatcgcgaacctccttgttctgcacgctcctcgatccttctcgtcggtactacgtcttgttgcctcctttcgccccagcgctgcagagaaagtatgtggccacgcaacaagcaagtagagtttgcatatacggaactgctgctccaccaagaatcagataactctgcgcagttgtcccaagattgtgattctgaatgcccaacaacaactcaatcaaaacaataaagaaggaaggtacaagggaaggaagttcagttcagtatgtcatttctttggatatcaggctcgatgatctacaccatcaaatttcgactgtgactatgcttatgctcttggacgtatctccctgcatatgattgcagttggattgactggctacatgacaactgtggctaatctgaaagaccctgttgacaaatggagatgtgctgctgctcctttaattgtaaatacatgtatcataaatttttacagaatgtgacattggatctctaaattttccttttcaacataaaaattttcgat

SEQ ID NO: 62045 - DNA, 1118 bp, Zea Mays
gagaacaagaggtctgaataatttccttatctttaaagccgtaaggaaacggcgactataacattgtccacgtcggctcaaatatatctaggcgtcggatttccaatcaacggctacatcatgacgacacagtcttgccttggacgcatcgcgaacctccttgttctgcacgctcctcgatccttctcgtcggtactacgtcttgttgcctcctttcgccccagcgctgcaggtcctcttggtcctcgctctctttgccgcttcctcctactcaatccctccgccgcttctttatccaaaaaaatctcgcggaagatccagcttcctccattttcactccttcagtcttcgtgttccagtccgcgcttcctccatcttcgcactccttcagtcttcgtgttctaatctgcgcttgggttcatttttcccccacggctactgcagatattgtttatcatgttcagatcccatttcttgaatcgttttgttcagcgtttgctcgacttcatggttttagggttcgtgttctttgtggatgagatcctcctctgtttgctaattgtggtatcgtcgtttgcggagccgcatattcttcaaaaatggaataccgaaaatcttttggtgctacttcaacatttttgttcagtgcattttagtttacttttctgctttcgcactgagaaagtatgtggccacgcaacaagcaagtagagtttgcatatacggaactgctgctccaccaagaatcagataactctgcgcagttgtcccaagattgtgattctgaatgcccaacaacaactcaatcaaaacaataaagaaggaaggtacaagggaaggaagttcagttcagtatgtcatttctttggatatcaggctcgatgatctacaccatcaaatttcgactgtgactatgcttatgctcttggacgtatctccctgcatatgattgcagttggattgactggctacatgacaactgtggctaatctgaaagaccctgttgacaaatggagatgtgctgctgctcctttaattgtaaatacatgtatcataaatttttacagaatgtgacattggatctctaaattttccttttcaacataaaaattttcgat

SEQ ID NO: 62046 - DNA, 3117 bp, Zea Mays
cgggggagatgatacgggagctgctggactcagccttaggtacattgcctaggagtgaaagcaagaacttaaccactgctacatttcaatcaggacaggaggaagccatttcatcgattgaccatcattttctggaaaatgataatgctaataacggggatttggttcaaaatggctttcatagatgtcctgatcctgatgtaaatcagatttctggccgacatttgctcaacatggatggttactgttgctatattcatcctatcattgagaaaaggttgcaaggtttgtggagtaatagtttggagcaaactatacagaaaaatggttatcatgaagagttatcttggtctcttcatgacgaggactttggtggttcatcaacaaaacttgtgcaattaacaggcaaaactgccatggaagtctgtaaagcacaatcatcagatactctcaagctttcacctgatgacgaaatagaaggggaaatagtttatttacaatccaggctacttgatggtgttgtttctatgaagcagagatatgtccgtcttgtatcttgcagaagatttgatactcaaggttgtccagaatatttcttatgagttggattctttcaataaaagaaaatgggatcatatcattgtgaatcagtttcttcgtgatctgagagaagctaagaagcgcggaaactcagagaggagacacaaggaagctctagctattctggctgcaactgcaccttctgttacaccgacctcacgaaacacaacagtgaggaaagagacagaaaacaatgtgacacctgctaaacgagaggttatccttgttgtcaggcattatcgttttttattgatttctgtttgtttccagaacatgccaagaagcattactggatcctcaagaattggccaactatcttcttcaccacaagcaaaggatttatcattttccaacagtgatgtctcagacgaaactaactttggcattttcaatctggcgaagttctccaagaaaagtgctcttccctgtgatatatgcatgcgatgtgatacaatattgaaccgtatttttgtttgctcgagctgctactgtacacttagattgctaccagagtctggtgtatcccactggcccatggaaatgtgaactttgccatgagatgccctcagattctgttacctctggtgaacaatcagaccaaaatggtccgaaagcttgtttggtgcaatgtggtttatgccatggaacatctggtgcttttagaaagactgtgaagggtcaatgggttcatgctttctgtgctgagtggctgttggagacaacattcagaagagggcaacataatccagtcgacggaatggagaggcttcatcacaaggataaagatacatgctctatatgccaccgctgtgttggtgcatgcttgaagtgctgtacattagattgtcaaattacttttcatccttcatgtgctagagatgctggtctttacatgaatacaaaaagattgggtaatatgttacaacataaagcatactgttgtagacacagtattgaacagagaaaggcctatagtcaacaatatggtcctgatgaaatcaagggcatgaaacaaatgagggctatagcttgaagatggtgaagaaactcttggattatatttatatgtttctgtttttctcgttcttggcaggttgaactggaactattacgtttcctttgtgagaggattgttaagagagaaaaagtgaagaaagatttggttggatgtgcacatgacatacttgctgcaaggaggataactgccgtctcttctttgtggacttcatgttatacttctggacctggagcaagttcagaatctgccactacttctgttaataacaaatcatatggtggaacaattcaaaggtctgatgatgtcacagtgagattggaagatgtcacagtggacagtacagttaccaaaaaacatactgtcaggttttctctgcataacagggacactgataggaacactgctgacagttccacatcaacaatatcatacaaacggaagttggatgatggggaatcacttgcattcaagagtcatcccggaacaccagctactgccttgttggagtcacgggatgcagaaaagccaatagataaaaagaacaagacccctccagagagatatgtttacactcgccgcagctccatgtccaaaaggaagcaatgtagtcagcatgtagttcaaagacctggtggatgacagcaggcgaagtcgcttcttgggatatctggataataatattcttggaagctcgatgcagaaaaggacaaagtaaatacagcaagcggggctggccattaatcatgacagccgcaggggctggcgcgtggccgcactggaatcggaaatttggtgcaaattgggctcttcgaagatttgaccaattgagcccatgtcaccttggagtccaacatgcgctgaattcattcactaatttagtcaagggcaggttttgtgaaatacgcccaattgccagtatggcgtcttcacattatgtcgaagaaggaaatcgattgagttatgtgtggtgaaagaaagtgggtagacaaatattactgactggtgaaagctaccaataggccatccgcacattaatgaccatgtttaggagttgttgctatgtactaacagaactgcatgttttgttgtgtggctccattctgacttgtgaaatgaactctcggtaagtcatagggcatttcatgtttgtacaggcatgtaggtttagctttctggtatgtagctaaattcaaagcatcatcttgtagccttatgtggttaaccagatctttgatctattagttaatttagtaaaccaagagctgccttgtgttcgtatgggttgagtcgggcttttactgtattgatatctattattagcgtgaaggctgtttattgccgatgttgagcttcataagcattatctttttttaacaaaacacagtgcttgttttgtgaatacttgtaacctcgaatgtgtaataaatgtagcacgtctattcaactcaatggctcaagtgtcatatatggtcaaccttgcatgtccattactgtcatta

SEQ ID NO: 62047 - DNA, 4267 bp, Zea Mays
ttgagctcgaatttgggcaaccataacaaggatttggataggagcaaagatgatattcaggacagcttggattatattggaggcagtgtagagctgattactcaagatgagagtaataaagataattgtgatcaggacatgcaggaagtgattgtgcagcaagaggagcagccggttgaaatcgctttagatcaaagcaggactgatagcattgttttaccgggatccagagaagatcggtggcgttctctgagctggctcttaggagcaaggggacggtttgtgctcacttcagagcgtccaaacaagaagaggaagctcttaggtgcagatgctgggctagagcaacttgtacttctgccatcccctgaaggcgaggctggttcagtctgtgatgagaaaggtgctctgaaacctttcaaaagggaccctggtccatccatagatggaggaaaccaggaatttgtacatttattttgtagtctctggagaccagagttttatgttgaggacatggaatcaatggagcctgtcaccaatgtagtagatacccaagagaatcaatcaaaattggtgtgcagcctttgcaaggtcatgcatggtgcatgtgtccgctgcagccatggagcatgcaggacttcctttcatcctatatgtgcaagagagttcaagcttcagattgagatatgggggaagtttggtcatgataatgttgagatgcgagcattttgtgcaaagcattcttctgtcaaaagcatcagctccatacagaatgacaaaagtgtatctgaactggactccgctcaagttgagctgcatgatggaaagcctgttactgggaaggaacagcaagtgagatttacgcgcagtaacaaggacaaatttgtgaacagcacaattactactagttcttgtagcctaaacgaagcacatacaaatgaagtggctaccatttcacccgttcttggaaggactcaagaaacacaaagtgcagatatggctgctgatcaaccctcttcagatgggaatcttatgagcgattctggagatgtttccggaattcttagaaagtcgaccaaggaaagattagtcttgatgacattgaattggagccaagtcttcgttcagaatcagtggaagctgctttccagccggagacaactgcatactcccctggtttgaagttgaaaatgatcaagtggctgcagaactctgagtgtgcaccttctgttcaggttaagtcatttaaagagggttcattggcacaaggtacattgcctaggagtgaaagcaagaacttaaccactgctacatttcaatcaggacaggaggaagccatttcatcgattgaccatcattttctggaaaatgataatgctaataacggggatttggttcaaaatggctttcatagatgtcctgatcctgatgtaaatcagatttctggccgacatttgctcaacatggatggttactgttgctatattcatcctatcattgagaaaaggttgcaaggtttgtggagtaatagtttggagcaaactatacagaaaaatggttatcatgaagagttatcttggtctcttcatgacgaggactttggtggttcatcaacaaaacttgtgcaattaacaggcaaaactgccatggaagtctgtaaagcacaatcatcagatactctcaagctttcacctgatgacgaaatagaaggggaaatagtttatttacaatccaggctacttgatggtgttgtttctatgaagcagagatatgaagatttgatactcaaggttgtccagaatatttcttatgagttggattctttcaataaaagaaaatgggatcatatcattgtgaatcagtttcttcgtgatctgagagaagctaagaagcgcggaaactcagagaggagacacaaggaagctctagctattctggctgcaactgcaccttctgttacaccgacctcacgaaacacaacagtgaggaaagagacagaaaacaatgtgacacctgctaaacgagagaacatgccaagaagcattactggatcctcaagaattggccaactatcttcttcaccacaagcaaaggatttatcattttccaacagtgatgtctcagacgaaactaactttggcattttcaatctggcgaagttctccaagaaaagtgctcttccctgtgatatatgcatgcgatgtgatacaatattgaaccgtatttttgtttgctcgagctgtaaggctactgtacacttagattgctaccagagtctggtgtatcccactggcccatggaaatgtgaactttgccatgagatgccctcagattctgttacctctggtgaacaatcagaccaaaatggtccgaaagcttgtttggtgcaatgtggtttatgccatggaacatctggtgcttttagaaagactgtgaagggtcaatgggttcatgctttctgtgctgagtggctgttggagacaacattcagaagagggcaacataatccagtcgacggaatggagaggcttcatcacaaggataaagatacatgctctatatgccaccgctgtgttggtgcatgcttgaagtgctgtacattagattgtcaaattacttttcatccttcatgtgctagagatgctggtctttacatgaatacaaaaagattgggtaatatgttacaacataaagcatactgttgtagacacagtattgaacagagaaaggcctatagtcaacaatatggtcctgatgaaatcaagggcatgaaacaaatgagggttgaactggaactattacgtttcctttgtgagaggattgttaagagagaaaaagtgaagaaagatttggttggatgtgcacatgacatacttgctgcaaggaggataactgccgtctcttctttgtggacttcatgttatacttctggacctggagcaagttcagaatctgccactacttctgttaataacaaatcatatggtggaacaattcaaaggtctgatgatgtcacagtgagattggaagatgtcacagtggacagtacagttaccaaaaaacatactgtcaggttttctctgcataacagggacactgataggaacactgctgacagttccacatcaacaatatcatacaaacggaagttggatgatggggaatcacttgcattcaagagtcatcccggaacaccagctactgccttgttggagtcacgggatgcagaaaagccaatagataaaaagctcagggatatgtatcaaaaggagcttgtcatggttacttctcaccaagctttgttgaagaacaagacccctccagagagatatgtttacactcgccgcagctccatgtccaaaaggaagcaatgtagtcagcatgtagttcaaagacctggtggatgacagcaggcgaagtcgcttcttgggatatctggataataatattcttggaagctcgatgcagaaaaggacaaagtaaatacagcaagcggggctggccattaatcatgacagccgcaggggctggcgcgtggccgcactggaatcggaaatttggtgcaaattgggctcttcgaagatttgaccaattgagcccatgtcaccttggagtccaacatgcgctgaattcattcactaatttagtcaagggcaggttttgtgaaatacgcccaattgccagtatggcgtcttcacattatgtcgaagaaggaaatcgattgagttatgtgtggtgaaagaaagtgggtagacaaatattactgactggtgaaagctaccaataggccatccgcacattaatgaccatgtttaggagttgttgctatgtactaacagaactgcatgttttgttgtgtggctccattctgacttgtgaaatgaactctcggtaagtcatagggcatttcatgtttgtacaggcatgtaggtttagctttctggtatgtagctaaattcaaagcatcatcttgtagccttatgtggttaaccagatctttgatctattagttaatttagtaaaccaagagctgccttgtgttcgtatgggttgagtcgggcttttactgtattgatatctattattagcgtgaaggctgtttattgccgatgttgagcttcataagcattatctttttttaacaaaacacagtgcttgttttgtgaatacttgtaacctcgaatgtgtaataaatgtagcacgtctattcaactcaatggctcaagtgtcatatatggtcaaccttgcatgtccattactgtcatta

SEQ ID NO: 62048 - DNA, 4217 bp, Zea Mays
ttgagctcgaatttgggcaaccataacaaggatttggataggagcaaagatgatattcaggacagcttggattatattggaggcagtgtagagctgattactcaagatgagagtaataaagataattgtgatcaggacatgcaggaagtgattgtgcagcaagaggagcagccggttgaaatcgctttagatcaaagcaggactgatagcattgttttaccgggatccagagaagatcggtggcgttctctgagctggctcttaggagcaaggggacggtttgtgctcacttcagagcgtccaaacaagaagaggaagctcttaggtgcagatgctgggctagagcaacttgtacttctgccatcccctgaaggcgaggctggttcagtctgtgatgagaaaggtgctctgaaacctttcaaaagggaccctggtccatccatagatggaggaaaccaggaatttgtacatttattttgtagtctctggagaccagagttttatgttgaggacatggaatcaatggagcctgtcaccaatgtagtagatacccaagagaatcaatcaaaattggtgtgcagcctttgcaaggtcatgcatggtgcatgtgtccgctgcagccatggagcatgcaggacttcctttcatcctatatgtgcaagagagttcaagcttcagattgagatatgggggaagtttggtcatgataatgttgagatgcgagcattttgtgcaaagcattcttctgtcaaaagcatcagctccatacagaatgacaaaagtgtatctgaactggactccgctcaagttgagctgcatgatggaaagcctgttactgggaaggaacagcaagtgagatttacgcgcagtaacaaggacaaatttgtgaacagcacaattactactagttcttgtagcctaaacgaagcacatacaaatgaagtggctaccatttcacccgttcttggaaggactcaagaaacacaaagtgcagatatggctgctgatcaaccctcttcagatgggaatcttatgagcgattctggagatgtttccggaattcttagaaagtcgaccaaggaaagattagtcttgatgacattgaattggagccaagtcttcgttcagaatcagtggaagctgctttccagccggagacaactgcatactcccctggtttgaagttgaaaatgatcaagtggctgcagaactctgagtgtgcaccttctgttcaggttaagtcatttaaagagggttcattggcacaaggtacattgcctaggagtgaaagcaagaacttaaccactgctacatttcaatcaggacaggaggaagccatttcatcgattgaccatcattttctggaaaatgataatgctaataacggggatttggttcaaaatggctttcatagatgtcctgatcctgatgtaaatcagatttctggccgacatttgctcaacatggatggttactgttgctatattcatcctatcattgagaaaaggttgcaaggtttgtggagtaatagtttggagcaaactatacagaaaaatggttatcatggcaaaactgccatggaagtctgtaaagcacaatcatcagatactctcaagctttcacctgatgacgaaatagaaggggaaatagtttatttacaatccaggctacttgatggtgttgtttctatgaagcagagatatgtccgtcttgtatcttgcagaagatttgatactcaaggttgtccagaatatttcttatgagttggattctttcaataaaagaaaatgggatcatatcattgtgaatcagtttcttcgtgatctgagagaagctaagaagcgcggaaactcagagaggagacacaaggaagctctagctattctggctgcaactgcaccttctgttacaccgacctcacgaaacacaacagtgaggaaagagacagaaaacaatgtgacacctgctaaacgagagaacatgccaagaagcattactggatcctcaagaattggccaactatcttcttcaccacaagcaaaggatttatcattttccaacagtgatgtctcagacgaaactaactttggcattttcaatctggcgaagttctccaagaaaagtgctcttccctgtgatatatgcatgcgatgtgatacaatattgaaccgtatttttgtttgctcgagctgtaaggctactgtacacttagattgctaccagagtctggtgtatcccactggcccatggaaatgtgaactttgccatgagatgccctcagattctgttacctctggtgaacaatcagaccaaaatggtccgaaagcttgtttggtgcaatgtggtttatgccatggaacatctggtgcttttagaaagactgtgaagggtcaatgggttcatgctttctgtgctgagtggctgttggagacaacattcagaagagggcaacataatccagtcgacggaatggagaggcttcatcacaaggataaagatacatgctctatatgccaccgctgtgttggtgcatgcttgaagtgctgtacattagattgtcaaattacttttcatccttcatgtgctagagatgctggtctttacatgaatacaaaaagattgggtaatatgttacaacataaagcatactgttgtagacacagtattgaacagagaaaggcctatagtcaacaatatggtcctgatgaaatcaagggcatgaaacaaatgagggttgaactggaactattacgtttcctttgtgagaggattgttaagagagaaaaagtgaagaaagatttggttggatgtgcacatgacatacttgctgcaaggaggataactgccgtctcttctttgtggacttcatgttatacttctggacctggagcaagttcagaatctgccactacttctgttaataacaaatcatatggtggaacaattcaaaggtctgatgatgtcacagtgagattggaagatgtcacagtggacagtacagttaccaaaaaacatactgtcaggttttctctgcataacagggacactgataggaacactgctgacagttccacatcaacaatatcatacaaacggaagttggatgatggggaatcacttgcattcaagagtcatcccggaacaccagctactgccttgttggagtcacgggatgcagaaaagccaatagataaaaagctcagggatatgtatcaaaaggagcttgtcatggttacttctcaccaagctttgttgaagaacaagacccctccagagagatatgtttacactcgccgcagctccatgtccaaaaggaagcaatgtagtcagcatgtagttcaaagacctggtggatgacagcaggcgaagtcgcttcttgggatatctggataataatattcttggaagctcgatgcagaaaaggacaaagtaaatacagcaagcggggctggccattaatcatgacagccgcaggggctggcgcgtggccgcactggaatcggaaatttggtgcaaattgggctcttcgaagatttgaccaattgagcccatgtcaccttggagtccaacatgcgctgaattcattcactaatttagtcaagggcaggttttgtgaaatacgcccaattgccagtatggcgtcttcacattatgtcgaagaaggaaatcgattgagttatgtgtggtgaaagaaagtgggtagacaaatattactgactggtgaaagctaccaataggccatccgcacattaatgaccatgtttaggagttgttgctatgtactaacagaactgcatgttttgttgtgtggctccattctgacttgtgaaatgaactctcggtaagtcatagggcatttcatgtttgtacaggcatgtaggtttagctttctggtatgtagctaaattcaaagcatcatcttgtagccttatgtggttaaccagatctttgatctattagttaatttagtaaaccaagagctgccttgtgttcgtatgggttgagtcgggcttttactgtattgatatctattattagcgtgaaggctgtttattgccgatgttgagcttcataagcattatctttttttaacaaaacacagtgcttgttttgtgaatacttgtaacctcgaatgtgtaataaatgtagcacgtctattcaactcaatggctcaagtgtcatatatggtcaaccttgcatgtccattactgtcatta

SEQ ID NO: 62049 - DNA, 5141 bp, Zea Mays
gcgctttgatttttacagaagcgtctctctcctcagtcctctttccctctcgctcccggatctgaactcctccgaaaaaatcgtacccgagagaaaccctagcactggaggttttccgccgtggcgcctcgccggagacctccgctcgccgtggccgccgacgcgtcgccctcgtcgtccccccggaagtccggcgaagatgcgccgccgcccgccgggagcacgccggcggcggcggccggcgtcaccccgtgcgagcaagccaggaaggcactgtgtgtgcggtcgccgtttgatggggaggaggctgctggacgggacccctggctgccatcccgtgttgccagatgggcggcggtgggcgacgtgcggaagaatcataagaagagccagccccaacagcagcaaccggagccatcccctcccctggagcagaacccgagagtgcctgccgggcgcaagggcttttgggagaagttggagccctattttcgagagttcacagtggatgatttggaggaattattgacgaagcatcatttctgtgctagccagattgatccatgttttgtgatacctgttgtgggctctaaggagttaggggagaattcagatctatctcatgcttttgaagtagatgaaagtccagagttgagctcgaatttgggcaaccataacaaggatttggataggagcaaagatgatattcaggacagcttggattatattggaggcagtgtagagctgattactcaagatgagagtaataaagataattgtgatcaggacatgcaggaagtgattgtgcagcaagaggagcagccggttgaaatcgctttagatcaaagcaggactgatagcattgttttaccgggatccagagaagatcggtggcgttctctgagctggctcttaggagcaaggggacggtttgtgctcacttcagagcgtccaaacaagaagaggaagctcttaggtgcagatgctgggctagagcaacttgtacttctgccatcccctgaaggcgaggctggttcagtctgtgatgtttgttgtttgggagaaagtgacatggtgtctaacaggatgcttcattgcaagaactgtgagatatctgtgcaccagaagtgttatggtgtgcatgttgtgccagatcgtttctggttttgtgtttggtgtacccggaatattgggatgccacggaggttgacacggagcgatgcgtgcaggactgtgttaatgccctgtgtgctctgtccaaaggagaaaggtgctctgaaacctttcaaaagggaccctggtccatccatagatggaggaaaccaggaatttgtacatttattttgtagtctctggagaccagagttttatgttgaggacatggaatcaatggagcctgtcaccaatgtagtagatacccaagagaatcaatcaaaattggtgtgcagcctttgcaaggtcatgcatggtgcatgtgtccgctgcagccatggagcatgcaggacttcctttcatcctatatgtgcaagagagttcaagcttcagattgagatatgggggaagtttggtcatgataatgttgagatgcgagcattttgtgcaaagcattcttctgtcaaaagcatcagctccatacagaatgacaaaagtgtatctgaactggactccgctcaagttgagctgcatgatggaaagcctgttactgggaaggaacagcaagtgagatttacgcgcagtaacaaggacaaatttgtgaacagcacaattactactagttcttgtagcctaaacgaagcacatacaaatgaagtggctaccatttcacccgttcttggaaggactcaagaaacacaaagtgcagatatggctgctgatcaaccctcttcagatgggaatcttatgagcgattctggagatgtttccggaattcttagaaagctagtcgaccaaggaaagattagtcttgatgacattgaattggagccaagtcttcgttcagaatcagtggaagctgctttccagccggagacaactgcatactcccctggtttgaagttgaaaatgatcaagtggctgcagaactctgagtgtgcaccttctgttcaggttaagtcatttaaagagggttcattggcacaaggtacattgcctaggagtgaaagcaagaacttaaccactgctacatttcaatcaggacaggaggaagccatttcatcgattgaccatcattttctggaaaatgataatgctaataacggggatttggttcaaaatggctttcatagatgtcctgatcctgatgtaaatcagatttctggccgacatttgctcaacatggatggttactgttgctatattcatcctatcattgagaaaaggttgcaaggtttgtggagtaatagtttggagcaaactatacagaaaaatggttatcatgaagagttatcttggtctcttcatgacgaggactttggtggttcatcaacaaaacttgtgcaattaacaggcaaaactgccatggaagtctgtaaagcacaatcatcagatactctcaagctttcacctgatgacgaaatagaaggggaaatagtttatttacaatccaggctacttgatggtgttgtttctatgaagcagagatatgaagatttgatactcaaggttgtccagaatatttcttatgagttggattctttcaataaaagaaaatgggatcatatcattgtgaatcagtttcttcgtgatctgagagaagctaagaagcgcggaaactcagagaggagacacaaggaagctctagctattctggctgcaactgcaccttctgttacaccgacctcacgaaacacaacagtgaggaaagagacagaaaacaatgtgacacctgctaaacgagagaacatgccaagaagcattactggatcctcaagaattggccaactatcttcttcaccacaagcaaaggatttatcattttccaacagtgatgtctcagacgaaactaactttggcattttcaatctggcgaagttctccaagaaaagtgctcttccctgtgatatatgcatgcgatgtgatacaatattgaaccgtatttttgtttgctcgagctgtaagcaggctactgtacacttagattgctaccagagtctggtgtatcccactggcccatggaaatgtgaactttgccatgagatgccctcagattctgttacctctggtgaacaatcagaccaaaatggtccgaaagcttgtttggtgcaatgtggtttatgccatggaacatctggtgcttttagaaagactgtgaagggtcaatgggttcatgctttctgtgctgagtggctgttggagacaacattcagaagagggcaacataatccagtcgacggaatggagaggcttcatcacaaggataaagatacatgctctatatgccaccgctgtgttggtgcatgcttgaagtgctgtacattagattgtcaaattacttttcatccttcatgtgctagagatgctggtctttacatgaatacaaaaagattgggtaatatgttacaacataaagcatactgttgtagacacagtattgaacagagaaaggcctatagtcaacaatatggtcctgatgaaatcaagggcatgaaacaaatgagggttgaactggaactattacgtttcctttgtgagaggattgttaagagagaaaaagtgaagaaagatttggttggatgtgcacatgacatacttgctgcaaggaggataactgccgtctcttctttgtggacttcatgttatacttctggacctggagcaagttcagaatctgccactacttctgttaataacaaatcatatggtggaacaattcaaaggtctgatgatgtcacagtgagattggaagatgtcacagtggacagtacagttaccaaaaaacatactgtcaggttttctctgcataacagggacactgataggaacactgctgacagttccacatcaacaatatcatacaaacggaagttggatgatggggaatcacttgcattcaagagtcatcccggaacaccagctactgccttgttggagtcacgggatgcagaaaagccaatagataaaaagctcagggatatgtatcaaaaggagcttgtcatggttacttctcaccaagctttgttgaagaacaagacccctccagagagatatgtttacactcgccgcagctccatgtccaaaaggaagcaatgtagtcagcatgtagttcaaagacctggtggatgacagcaggcgaagtcgcttcttgggatatctggataataatattcttggaagctcgatgcagaaaaggacaaagtaaatacagcaagcggggctggccattaatcatgacagccgcaggggctggcgcgtggccgcactggaatcggaaatttggtgcaaattgggctcttcgaagatttgaccaattgagcccatgtcaccttggagtccaacatgcgctgaattcattcactaatttagtcaagggcaggttttgtgaaatacgcccaattgccagtatggcgtcttcacattatgtcgaagaaggaaatcgattgagttatgtgtggtgaaagaaagtgggtagacaaatattactgactggtgaaagctaccaataggccatccgcacattaatgaccatgtttaggagttgttgctatgtactaacagaactgcatgttttgttgtgtggctccattctgacttgtgaaatgaactctcggtaagtcatagggcatttcatgtttgtacaggcatgtaggtttagctttctggtatgtagctaaattcaaagcatcatcttgtagccttatgtggttaaccagatctttgatctattagttaatttagtaaaccaagagctgccttgtgttcgtatgggttgagtcgggcttttactgtattgatatctattattagcgtgaaggctgtttattgccgatgttgagcttcataagcattatctttttttaacaaaacacagtgcttgttttgtgaatacttgtaacctcgaatgtgtaataaatgtagcacgtctattcaactcaatggctcaagtgtcatatatggtcaaccttgcatgtccattactgtcatta

SEQ ID NO: 62050 - DNA, 5157 bp, Zea Mays
gcgctttgatttttacagaagcgtctctctcctcagtcctctttccctctcgctcccggatctgaactcctccgaaaaaatcgtacccgagagaaaccctagcactggaggttttccgccgtggcgcctcgccggagacctccgctcgccgtggccgccgacgcgtcgccctcgtcgtccccccggaagtccggcgaagatgcgccgccgcccgccgggagcacgccggcggcggcggccggcgtcaccccgtgcgagcaagccaggaaggcactgtgtgtgcggtcgccgtttgatggggaggaggctgctggacgggacccctggctgccatcccgtgttgccagatgggcggcggtgggcgacgtgcggaagaatcataagaagagccagccccaacagcagcaaccggagccatcccctcccctggagcagaacccgagagtgcctgccgggcgcaagggcttttgggagaagttggagccctattttcgagagttcacagtggatgatttggaggaattattgacgaagcatcatttctgtgctagccagattgatccatgttttgtgatacctgttgtgggctctaaggagttaggggagaattcagatctatctcatgcttttgaagtagatgaaagtccagagttgagctcgaatttgggcaaccataacaaggatttggataggagcaaagatgatattcaggacagcttggattatattggaggcagtgtagagctgattactcaagatgagagtaataaagataattgtgatcaggacatgcaggaagtgattgtgcagcaagaggagcagccggttgaaatcgctttagatcaaagcaggactgatagcattgttttaccgggatccagagaagatcggtggcgttctctgagctggctcttaggagcaaggggacggtttgtgctcacttcagagcgtccaaacaagaagaggaagctcttaggtgcagatgctgggctagagcaacttgtacttctgccatcccctgaaggcgaggctggttcagtctgtgatgtttgttgtttgggagaaagtgacatggtgtctaacaggatgcttcattgcaagaactgtgagatatctgtgcaccagaagtgttatggtgtgcatgttgtgccagatcgtttctggttttgtgtttggtgtacccggaatattgggatgccacggaggttgacacggagcgatgcgtgcaggactgtgttaatgccctgtgtgctctgtccaaaggagaaaggtgctctgaaacctttcaaaagggaccctggtccatccatagatggaggaaaccaggaatttgtacatttattttgtagtctctggagaccagagttttatgttgaggacatggaatcaatggagcctgtcaccaatgtagtagatacccaagagaatcaatcaaaattggtgtgcagcctttgcaaggtcatgcatggtgcatgtgtccgctgcagccatggagcatgcaggacttcctttcatcctatatgtgcaagagagttcaagcttcagattgagatatgggggaagtttggtcatgataatgttgagatgcgagcattttgtgcaaagcattcttctgtcaaaagcatcagctccatacagaatgacaaaagtgtatctgaactggactccgctcaagttgagctgcatgatggaaagcctgttactgggaaggaacagcaagtgagatttacgcgcagtaacaaggacaaatttgtgaacagcacaattactactagttcttgtagcctaaacgaagcacatacaaatgaagtggctaccatttcacccgttcttggaaggactcaagaaacacaaagtgcagatatggctgctgatcaaccctcttcagatgggaatcttatgagcgattctggagatgtttccggaattcttagaaagctagtcgaccaaggaaagattagtcttgatgacattgaattggagccaagtcttcgttcagaatcagtggaagctgctttccagccggagacaactgcatactcccctggtttgaagttgaaaatgatcaagtggctgcagaactctgagtgtgcaccttctgttcaggttaagtcatttaaagagggttcattggcacaaggtacattgcctaggagtgaaagcaagaacttaaccactgctacatttcaatcaggacaggaggaagccatttcatcgattgaccatcattttctggaaaatgataatgctaataacggggatttggttcaaaatggctttcatagatgtcctgatcctgatgtaaatcagatttctggccgacatttgctcaacatggatggttactgttgctatattcatcctatcattgagaaaaggttgcaaggtttgtggagtaatagtttggagcaaactatacagaaaaatggttatcatgaagagttatcttggtctcttcatgacgaggactttggtggttcatcaacaaaacttgtgcaattaacaggcaaaactgccatggaagtctgtaaagcacaatcatcagatactctcaagctttcacctgatgacgaaatagaaggggaaatagtttatttacaatccaggctacttgatggtgttgtttctatgaagcagagatatgtccgtcttgtatcttgcagaagatttgatactcaaggttgtccagaatatttcttatgagttggattctttcaataaaagaaaatgggatcatatcattgtgaatcagtttcttcgtgatctgagagaagctaagaagcgcggaaactcagagaggagacacaaggaagctctagctattctggctgcaactgcaccttctgttacaccgacctcacgaaacacaacagtgaggaaagagacagaaaacaatgtgacacctgctaaacgagagaacatgccaagaagcattactggatcctcaagaattggccaactatcttcttcaccacaagcaaaggatttatcattttccaacagtgatgtctcagacgaaactaactttggcattttcaatctggcgaagttctccaagaaaagtgctcttccctgtgatatatgcatgcgatgtgatacaatattgaaccgtatttttgtttgctcgagctgtaaggctactgtacacttagattgctaccagagtctggtgtatcccactggcccatggaaatgtgaactttgccatgagatgccctcagattctgttacctctggtgaacaatcagaccaaaatggtccgaaagcttgtttggtgcaatgtggtttatgccatggaacatctggtgcttttagaaagactgtgaagggtcaatgggttcatgctttctgtgctgagtggctgttggagacaacattcagaagagggcaacataatccagtcgacggaatggagaggcttcatcacaaggataaagatacatgctctatatgccaccgctgtgttggtgcatgcttgaagtgctgtacattagattgtcaaattacttttcatccttcatgtgctagagatgctggtctttacatgaatacaaaaagattgggtaatatgttacaacataaagcatactgttgtagacacagtattgaacagagaaaggcctatagtcaacaatatggtcctgatgaaatcaagggcatgaaacaaatgagggttgaactggaactattacgtttcctttgtgagaggattgttaagagagaaaaagtgaagaaagatttggttggatgtgcacatgacatacttgctgcaaggaggataactgccgtctcttctttgtggacttcatgttatacttctggacctggagcaagttcagaatctgccactacttctgttaataacaaatcatatggtggaacaattcaaaggtctgatgatgtcacagtgagattggaagatgtcacagtggacagtacagttaccaaaaaacatactgtcaggttttctctgcataacagggacactgataggaacactgctgacagttccacatcaacaatatcatacaaacggaagttggatgatggggaatcacttgcattcaagagtcatcccggaacaccagctactgccttgttggagtcacgggatgcagaaaagccaatagataaaaagctcagggatatgtatcaaaaggagcttgtcatggttacttctcaccaagctttgttgaagaacaagacccctccagagagatatgtttacactcgccgcagctccatgtccaaaaggaagcaatgtagtcagcatgtagttcaaagacctggtggatgacagcaggcgaagtcgcttcttgggatatctggataataatattcttggaagctcgatgcagaaaaggacaaagtaaatacagcaagcggggctggccattaatcatgacagccgcaggggctggcgcgtggccgcactggaatcggaaatttggtgcaaattgggctcttcgaagatttgaccaattgagcccatgtcaccttggagtccaacatgcgctgaattcattcactaatttagtcaagggcaggttttgtgaaatacgcccaattgccagtatggcgtcttcacattatgtcgaagaaggaaatcgattgagttatgtgtggtgaaagaaagtgggtagacaaatattactgactggtgaaagctaccaataggccatccgcacattaatgaccatgtttaggagttgttgctatgtactaacagaactgcatgttttgttgtgtggctccattctgacttgtgaaatgaactctcggtaagtcatagggcatttcatgtttgtacaggcatgtaggtttagctttctggtatgtagctaaattcaaagcatcatcttgtagccttatgtggttaaccagatctttgatctattagttaatttagtaaaccaagagctgccttgtgttcgtatgggttgagtcgggcttttactgtattgatatctattattagcgtgaaggctgtttattgccgatgttgagcttcataagcattatctttttttaacaaaacacagtgcttgttttgtgaatacttgtaacctcgaatgtgtaataaatgtagcacgtctattcaactcaatggctcaagtgtcatatatggtcaaccttgcatgtccattactgtcatta

SEQ ID NO: 62051 - DNA, 4853 bp, Zea Mays
gcgctttgatttttacagaagcgtctctctcctcagtcctctttccctctcgctcccggatctgaactcctccgaaaaaatcgtacccgagagaaaccctagcactggaggttttccgccgtggcgcctcgccggagacctccgctcgccgtggccgccgacgcgtcgccctcgtcgtccccccggaagtccggcgaagatgcgccgccgcccgccgggagcacgccggcggcggcggccggcgtcaccccgtgcgagcaagccaggaaggcactgtgtgtgcggtcgccgtttgatggggaggaggctgctggacgggacccctggctgccatcccgtgttgccagatgggcggcggtgggcgacgtgcggaagaatcataagaagagccagccccaacagcagcaaccggagccatcccctcccctggagcagaacccgagagtgcctgccgggcgcaagggcttttgggagaagttggagccctattttcgagagttcacagtggatgatttggaggaattattgacgaagcatcatttctgtgctagccagattgatccatgttttgtgatacctgttgtgggctctaaggagttaggggagaattcagatctatctcatgcttttgaagtagatgaaagtccagagttgagctcgaatttgggcaaccataacaaggatttggataggagcaaagatgatattcaggacagcttggattatattggaggcagtgtagagctgattactcaagatgagagtaataaagataattgtgatcaggacatgcaggaagtgattgtgcagcaagaggagcagccggttgaaatcgctttagatcaaagcaggactgatagcattgttttaccgggatccagagaagatcggtggcgttctctgagctggctcttaggagcaaggggacggtttgtgctcacttcagagcgtccaaacaagaagaggaagctcttaggtgcagatgctgggctagagcaacttgtacttctgccatcccctgaaggcgaggctggttcagtctgtgatgagaaaggtgctctgaaacctttcaaaagggaccctggtccatccatagatggaggaaaccaggaatttgtacatttattttgtagtctctggagaccagagttttatgttgaggacatggaatcaatggagcctgtcaccaatgtagtagatacccaagagaatcaatcaaaattggtgtgcagcctttgcaaggtcatgcatggtgcatgtgtccgctgcagccatggagcatgcaggacttcctttcatcctatatgtgcaagagagttcaagcttcagattgagatatgggggaagtttggtcatgataatgttgagatgcgagcattttgtgcaaagcattcttctgtcaaaagcatcagctccatacagaatgacaaaagtgtatctgaactggactccgctcaagttgagctgcatgatggaaagcctgttactgggaaggaacagcaagtgagatttacgcgcagtaacaaggacaaatttgtgaacagcacaattactactagttcttgtagcctaaacgaagcacatacaaatgaagtggctaccatttcacccgttcttggaaggactcaagaaacacaaagtgcagatatggctgctgatcaaccctcttcagatgggaatcttatgagcgattctggagatgtttccggaattcttagaaagctagtcgaccaaggaaagattagtcttgatgacattgaattggagccaagtcttcgttcagaatcagtggaagctgctttccagccggagacaactgcatactcccctggtttgaagttgaaaatgatcaagtggctgcagaactctgagtgtgcaccttctgttcaggttaagtcatttaaagagggttcattggcacaaggtacattgcctaggagtgaaagcaagaacttaaccactgctacatttcaatcaggacaggaggaagccatttcatcgattgaccatcattttctggaaaatgataatgctaataacggggatttggttcaaaatggctttcatagatgtcctgatcctgatgtaaatcagatttctggccgacatttgctcaacatggatggttactgttgctatattcatcctatcattgagaaaaggttgcaaggtttgtggagtaatagtttggagcaaactatacagaaaaatggttatcatggcaaaactgccatggaagtctgtaaagcacaatcatcagatactctcaagctttcacctgatgacgaaatagaaggggaaatagtttatttacaatccaggctacttgatggtgttgtttctatgaagcagagatatgaagatttgatactcaaggttgtccagaatatttcttatgagttggattctttcaataaaagaaaatgggatcatatcattgtgaatcagtttcttcgtgatctgagagaagctaagaagcgcggaaactcagagaggagacacaaggaagctctagctattctggctgcaactgcaccttctgttacaccgacctcacgaaacacaacagtgaggaaagagacagaaaacaatgtgacacctgctaaacgagagaacatgccaagaagcattactggatcctcaagaattggccaactatcttcttcaccacaagcaaaggatttatcattttccaacagtgatgtctcagacgaaactaactttggcattttcaatctggcgaagttctccaagaaaagtgctcttccctgtgatatatgcatgcgatgtgatacaatattgaaccgtatttttgtttgctcgagctgtaaggctactgtacacttagattgctaccagagtctggtgtatcccactggcccatggaaatgtgaactttgccatgagatgccctcagattctgttacctctggtgaacaatcagaccaaaatggtccgaaagcttgtttggtgcaatgtggtttatgccatggaacatctggtgcttttagaaagactgtgaagggtcaatgggttcatgctttctgtgctgagtggctgttggagacaacattcagaagagggcaacataatccagtcgacggaatggagaggcttcatcacaaggataaagatacatgctctatatgccaccgctgtgttggtgcatgcttgaagtgctgtacattagattgtcaaattacttttcatccttcatgtgctagagatgctggtctttacatgaatacaaaaagattgggtaatatgttacaacataaagcatactgttgtagacacagtattgaacagagaaaggcctatagtcaacaatatggtcctgatgaaatcaagggcatgaaacaaatgagggttgaactggaactattacgtttcctttgtgagaggattgttaagagagaaaaagtgaagaaagatttggttggatgtgcacatgacatacttgctgcaaggaggataactgccgtctcttctttgtggacttcatgttatacttctggacctggagcaagttcagaatctgccactacttctgttaataacaaatcatatggtggaacaattcaaaggtctgatgatgtcacagtgagattggaagatgtcacagtggacagtacagttaccaaaaaacatactgtcaggttttctctgcataacagggacactgataggaacactgctgacagttccacatcaacaatatcatacaaacggaagttggatgatggggaatcacttgcattcaagagtcatcccggaacaccagctactgccttgttggagtcacgggatgcagaaaagccaatagataaaaagctcagggatatgtatcaaaaggagcttgtcatggttacttctcaccaagctttgttgaagaacaagacccctccagagagatatgtttacactcgccgcagctccatgtccaaaaggaagcaatgtagtcagcatgtagttcaaagacctggtggatgacagcaggcgaagtcgcttcttgggatatctggataataatattcttggaagctcgatgcagaaaaggacaaagtaaatacagcaagcggggctggccattaatcatgacagccgcaggggctggcgcgtggccgcactggaatcggaaatttggtgcaaattgggctcttcgaagatttgaccaattgagcccatgtcaccttggagtccaacatgcgctgaattcattcactaatttagtcaagggcaggttttgtgaaatacgcccaattgccagtatggcgtcttcacattatgtcgaagaaggaaatcgattgagttatgtgtggtgaaagaaagtgggtagacaaatattactgactggtgaaagctaccaataggccatccgcacattaatgaccatgtttaggagttgttgctatgtactaacagaactgcatgttttgttgtgtggctccattctgacttgtgaaatgaactctcggtaagtcatagggcatttcatgtttgtacaggcatgtaggtttagctttctggtatgtagctaaattcaaagcatcatcttgtagccttatgtggttaaccagatctttgatctattagttaatttagtaaaccaagagctgccttgtgttcgtatgggttgagtcgggcttttactgtattgatatctattattagcgtgaaggctgtttattgccgatgttgagcttcataagcattatctttttttaacaaaacacagtgcttgttttgtgaatacttgtaacctcgaatgtgtaataaatgtagcacgtctattcaactcaatggctcaagtgtcatatatggtcaaccttgcatgtccattactgtcatta

SEQ ID NO: 62052 - DNA, 5138 bp, Zea Mays
gcgctttgatttttacagaagcgtctctctcctcagtcctctttccctctcgctcccggatctgaactcctccgaaaaaatcgtacccgagagaaaccctagcactggaggttttccgccgtggcgcctcgccggagacctccgctcgccgtggccgccgacgcgtcgccctcgtcgtccccccggaagtccggcgaagatgcgccgccgcccgccgggagcacgccggcggcggcggccggcgtcaccccgtgcgagcaagccaggaaggcactgtgtgtgcggtcgccgtttgatggggaggaggctgctggacgggacccctggctgccatcccgtgttgccagatgggcggcggtgggcgacgtgcggaagaatcataagaagagccagccccaacagcagcaaccggagccatcccctcccctggagcagaacccgagagtgcctgccgggcgcaagggcttttgggagaagttggagccctattttcgagagttcacagtggatgatttggaggaattattgacgaagcatcatttctgtgctagccagattgatccatgttttgtgatacctgttgtgggctctaaggagttaggggagaattcagatctatctcatgcttttgaagtagatgaaagtccagagttgagctcgaatttgggcaaccataacaaggatttggataggagcaaagatgatattcaggacagcttggattatattggaggcagtgtagagctgattactcaagatgagagtaataaagataattgtgatcaggacatgcaggaagtgattgtgcagcaagaggagcagccggttgaaatcgctttagatcaaagcaggactgatagcattgttttaccgggatccagagaagatcggtggcgttctctgagctggctcttaggagcaaggggacggtttgtgctcacttcagagcgtccaaacaagaagaggaagctcttaggtgcagatgctgggctagagcaacttgtacttctgccatcccctgaaggcgaggctggttcagtctgtgatgtttgttgtttgggagaaagtgacatggtgtctaacaggatgcttcattgcaagaactgtgagatatctgtgcaccagaagtgttatggtgtgcatgttgtgccagatcgtttctggttttgtgtttggtgtacccggaatattgggatgccacggaggttgacacggagcgatgcgtgcaggactgtgttaatgccctgtgtgctctgtccaaaggagaaaggtgctctgaaacctttcaaaagggaccctggtccatccatagatggaggaaaccaggaatttgtacatttattttgtagtctctggagaccagagttttatgttgaggacatggaatcaatggagcctgtcaccaatgtagtagatacccaagagaatcaatcaaaattggtgtgcagcctttgcaaggtcatgcatggtgcatgtgtccgctgcagccatggagcatgcaggacttcctttcatcctatatgtgcaagagagttcaagcttcagattgagatatgggggaagtttggtcatgataatgttgagatgcgagcattttgtgcaaagcattcttctgtcaaaagcatcagctccatacagaatgacaaaagtgtatctgaactggactccgctcaagttgagctgcatgatggaaagcctgttactgggaaggaacagcaagtgagatttacgcgcagtaacaaggacaaatttgtgaacagcacaattactactagttcttgtagcctaaacgaagcacatacaaatgaagtggctaccatttcacccgttcttggaaggactcaagaaacacaaagtgcagatatggctgctgatcaaccctcttcagatgggaatcttatgagcgattctggagatgtttccggaattcttagaaagctagtcgaccaaggaaagattagtcttgatgacattgaattggagccaagtcttcgttcagaatcagtggaagctgctttccagccggagacaactgcatactcccctggtttgaagttgaaaatgatcaagtggctgcagaactctgagtgtgcaccttctgttcaggttaagtcatttaaagagggttcattggcacaaggtacattgcctaggagtgaaagcaagaacttaaccactgctacatttcaatcaggacaggaggaagccatttcatcgattgaccatcattttctggaaaatgataatgctaataacggggatttggttcaaaatggctttcatagatgtcctgatcctgatgtaaatcagatttctggccgacatttgctcaacatggatggttactgttgctatattcatcctatcattgagaaaaggttgcaaggtttgtggagtaatagtttggagcaaactatacagaaaaatggttatcatgaagagttatcttggtctcttcatgacgaggactttggtggttcatcaacaaaacttgtgcaattaacaggcaaaactgccatggaagtctgtaaagcacaatcatcagatactctcaagctttcacctgatgacgaaatagaaggggaaatagtttatttacaatccaggctacttgatggtgttgtttctatgaagcagagatatgaagatttgatactcaaggttgtccagaatatttcttatgagttggattctttcaataaaagaaaatgggatcatatcattgtgaatcagtttcttcgtgatctgagagaagctaagaagcgcggaaactcagagaggagacacaaggaagctctagctattctggctgcaactgcaccttctgttacaccgacctcacgaaacacaacagtgaggaaagagacagaaaacaatgtgacacctgctaaacgagagaacatgccaagaagcattactggatcctcaagaattggccaactatcttcttcaccacaagcaaaggatttatcattttccaacagtgatgtctcagacgaaactaactttggcattttcaatctggcgaagttctccaagaaaagtgctcttccctgtgatatatgcatgcgatgtgatacaatattgaaccgtatttttgtttgctcgagctgtaaggctactgtacacttagattgctaccagagtctggtgtatcccactggcccatggaaatgtgaactttgccatgagatgccctcagattctgttacctctggtgaacaatcagaccaaaatggtccgaaagcttgtttggtgcaatgtggtttatgccatggaacatctggtgcttttagaaagactgtgaagggtcaatgggttcatgctttctgtgctgagtggctgttggagacaacattcagaagagggcaacataatccagtcgacggaatggagaggcttcatcacaaggataaagatacatgctctatatgccaccgctgtgttggtgcatgcttgaagtgctgtacattagattgtcaaattacttttcatccttcatgtgctagagatgctggtctttacatgaatacaaaaagattgggtaatatgttacaacataaagcatactgttgtagacacagtattgaacagagaaaggcctatagtcaacaatatggtcctgatgaaatcaagggcatgaaacaaatgagggttgaactggaactattacgtttcctttgtgagaggattgttaagagagaaaaagtgaagaaagatttggttggatgtgcacatgacatacttgctgcaaggaggataactgccgtctcttctttgtggacttcatgttatacttctggacctggagcaagttcagaatctgccactacttctgttaataacaaatcatatggtggaacaattcaaaggtctgatgatgtcacagtgagattggaagatgtcacagtggacagtacagttaccaaaaaacatactgtcaggttttctctgcataacagggacactgataggaacactgctgacagttccacatcaacaatatcatacaaacggaagttggatgatggggaatcacttgcattcaagagtcatcccggaacaccagctactgccttgttggagtcacgggatgcagaaaagccaatagataaaaagctcagggatatgtatcaaaaggagcttgtcatggttacttctcaccaagctttgttgaagaacaagacccctccagagagatatgtttacactcgccgcagctccatgtccaaaaggaagcaatgtagtcagcatgtagttcaaagacctggtggatgacagcaggcgaagtcgcttcttgggatatctggataataatattcttggaagctcgatgcagaaaaggacaaagtaaatacagcaagcggggctggccattaatcatgacagccgcaggggctggcgcgtggccgcactggaatcggaaatttggtgcaaattgggctcttcgaagatttgaccaattgagcccatgtcaccttggagtccaacatgcgctgaattcattcactaatttagtcaagggcaggttttgtgaaatacgcccaattgccagtatggcgtcttcacattatgtcgaagaaggaaatcgattgagttatgtgtggtgaaagaaagtgggtagacaaatattactgactggtgaaagctaccaataggccatccgcacattaatgaccatgtttaggagttgttgctatgtactaacagaactgcatgttttgttgtgtggctccattctgacttgtgaaatgaactctcggtaagtcatagggcatttcatgtttgtacaggcatgtaggtttagctttctggtatgtagctaaattcaaagcatcatcttgtagccttatgtggttaaccagatctttgatctattagttaatttagtaaaccaagagctgccttgtgttcgtatgggttgagtcgggcttttactgtattgatatctattattagcgtgaaggctgtttattgccgatgttgagcttcataagcattatctttttttaacaaaacacagtgcttgttttgtgaatacttgtaacctcgaatgtgtaataaatgtagcacgtctattcaactcaatggctcaagtgtcatatatggtcaaccttgcatgtccattactgtcatta

SEQ ID NO: 62053 - DNA, 5135 bp, Zea Mays
gcgctttgatttttacagaagcgtctctctcctcagtcctctttccctctcgctcccggatctgaactcctccgaaaaaatcgtacccgagagaaaccctagcactggaggttttccgccgtggcgcctcgccggagacctccgctcgccgtggccgccgacgcgtcgccctcgtcgtccccccggaagtccggcgaagatgcgccgccgcccgccgggagcacgccggcggcggcggccggcgtcaccccgtgcgagcaagccaggaaggcactgtgtgtgcggtcgccgtttgatggggaggaggctgctggacgggacccctggctgccatcccgtgttgccagatgggcggcggtgggcgacgtgcggaagaatcataagaagagccagccccaacagcagcaaccggagccatcccctcccctggagcagaacccgagagtgcctgccgggcgcaagggcttttgggagaagttggagccctattttcgagagttcacagtggatgatttggaggaattattgacgaagcatcatttctgtgctagccagattgatccatgttttgtgatacctgttgtgggctctaaggagttaggggagaattcagatctatctcatgcttttgaagtagatgaaagtccagagttgagctcgaatttgggcaaccataacaaggatttggataggagcaaagatgatattcaggacagcttggattatattggaggcagtgtagagctgattactcaagatgagagtaataaagataattgtgatcaggacatgcaggaagtgattgtgcagcaagaggagcagccggttgaaatcgctttagatcaaagcaggactgatagcattgttttaccgggatccagagaagatcggtggcgttctctgagctggctcttaggagcaaggggacggtttgtgctcacttcagagcgtccaaacaagaagaggaagctcttaggtgcagatgctgggctagagcaacttgtacttctgccatcccctgaaggcgaggctggttcagtctgtgatgtttgttgtttgggagaaagtgacatggtgtctaacaggatgcttcattgcaagaactgtgagatatctgtgcaccagaagtgttatggtgtgcatgttgtgccagatcgtttctggttttgtgtttggtgtacccggaatattgggatgccacggaggttgacacggagcgatgcgtgcaggactgtgttaatgccctgtgtgctctgtccaaaggagaaaggtgctctgaaacctttcaaaagggaccctggtccatccatagatggaggaaaccaggaatttgtacatttattttgtagtctctggagaccagagttttatgttgaggacatggaatcaatggagcctgtcaccaatgtagtagatacccaagagaatcaatcaaaattggtgtgcagcctttgcaaggtcatgcatggtgcatgtgtccgctgcagccatggagcatgcaggacttcctttcatcctatatgtgcaagagagttcaagcttcagattgagatatgggggaagtttggtcatgataatgttgagatgcgagcattttgtgcaaagcattcttctgtcaaaagcatcagctccatacagaatgacaaaagtgtatctgaactggactccgctcaagttgagctgcatgatggaaagcctgttactgggaaggaacagcaagtgagatttacgcgcagtaacaaggacaaatttgtgaacagcacaattactactagttcttgtagcctaaacgaagcacatacaaatgaagtggctaccatttcacccgttcttggaaggactcaagaaacacaaagtgcagatatggctgctgatcaaccctcttcagatgggaatcttatgagcgattctggagatgtttccggaattcttagaaagctagtcgaccaaggaaagattagtcttgatgacattgaattggagccaagtcttcgttcagaatcagtggaagctgctttccagccggagacaactgcatactcccctggtttgaagttgaaaatgatcaagtggctgcagaactctgagtgtgcaccttctgttcaggttaagtcatttaaagagggttcattggcacaaggtacattgcctaggagtgaaagcaagaacttaaccactgctacatttcaatcaggacaggaggaagccatttcatcgattgaccatcattttctggaaaatgataatgctaataacggggatttggttcaaaatggctttcatagatgtcctgatcctgatgtaaatcagatttctggccgacatttgctcaacatggatggttactgttgctatattcatcctatcattgagaaaaggttgcaaggtttgtggagtaatagtttggagcaaactatacagaaaaatggttatcatgaagagttatcttggtctcttcatgacgaggactttggtggttcatcaacaaaacttgtgcaattaacaggcaaaactgccatggaagtctgtaaagcacaatcatcagatactctcaagctttcacctgatgacgaaatagaaggggaaatagtttatttacaatccaggctacttgatggtgttgtttctatgaagcagagatatgaagatttgatactcaaggttgtccagaatatttcttatgagttggattctttcaataaaagaaaatgggatcatatcattgtgaatcagtttcttcgtgatctgagagaagctaagaagcgcggaaactcagagaggagacacaaggaagctctagctattctggctgcaactgcaccttctgttacaccgacctcacgaaacacaacagtgaggaaagagacagaaaacaatgtgacacctgctaaacgagagaacatgccaagaagcattactggatcctcaagaattggccaactatcttcttcaccacaagcaaaggatttatcattttccaacagtgatgtctcagacgaaactaactttggcattttcaatctggcgaagttctccaagaaaagtgctcttccctgtgatatatgcatgcgatgtgatacaatattgaaccgtatttttgtttgctcgagctgtaaggctactgtacacttagattgctaccagagtctggtgtatcccactggcccatggaaatgtgaactttgccatgagatgccctcagattctgttacctctggtgaacaatcagaccaaaatggtccgaaagcttgtttggtgcaatgtggtttatgccatggaacatctggtgcttttagaaagactgtgaagggtcaatgggttcatgctttctgtgctgagtggctgttggagacaacattcagaagagggcaacataatccagtcgacggaatgaggcttcatcacaaggataaagatacatgctctatatgccaccgctgtgttggtgcatgcttgaagtgctgtacattagattgtcaaattacttttcatccttcatgtgctagagatgctggtctttacatgaatacaaaaagattgggtaatatgttacaacataaagcatactgttgtagacacagtattgaacagagaaaggcctatagtcaacaatatggtcctgatgaaatcaagggcatgaaacaaatgagggttgaactggaactattacgtttcctttgtgagaggattgttaagagagaaaaagtgaagaaagatttggttggatgtgcacatgacatacttgctgcaaggaggataactgccgtctcttctttgtggacttcatgttatacttctggacctggagcaagttcagaatctgccactacttctgttaataacaaatcatatggtggaacaattcaaaggtctgatgatgtcacagtgagattggaagatgtcacagtggacagtacagttaccaaaaaacatactgtcaggttttctctgcataacagggacactgataggaacactgctgacagttccacatcaacaatatcatacaaacggaagttggatgatggggaatcacttgcattcaagagtcatcccggaacaccagctactgccttgttggagtcacgggatgcagaaaagccaatagataaaaagctcagggatatgtatcaaaaggagcttgtcatggttacttctcaccaagctttgttgaagaacaagacccctccagagagatatgtttacactcgccgcagctccatgtccaaaaggaagcaatgtagtcagcatgtagttcaaagacctggtggatgacagcaggcgaagtcgcttcttgggatatctggataataatattcttggaagctcgatgcagaaaaggacaaagtaaatacagcaagcggggctggccattaatcatgacagccgcaggggctggcgcgtggccgcactggaatcggaaatttggtgcaaattgggctcttcgaagatttgaccaattgagcccatgtcaccttggagtccaacatgcgctgaattcattcactaatttagtcaagggcaggttttgtgaaatacgcccaattgccagtatggcgtcttcacattatgtcgaagaaggaaatcgattgagttatgtgtggtgaaagaaagtgggtagacaaatattactgactggtgaaagctaccaataggccatccgcacattaatgaccatgtttaggagttgttgctatgtactaacagaactgcatgttttgttgtgtggctccattctgacttgtgaaatgaactctcggtaagtcatagggcatttcatgtttgtacaggcatgtaggtttagctttctggtatgtagctaaattcaaagcatcatcttgtagccttatgtggttaaccagatctttgatctattagttaatttagtaaaccaagagctgccttgtgttcgtatgggttgagtcgggcttttactgtattgatatctattattagcgtgaaggctgtttattgccgatgttgagcttcataagcattatctttttttaacaaaacacagtgcttgttttgtgaatacttgtaacctcgaatgtgtaataaatgtagcacgtctattcaactcaatggctcaagtgtcatatatggtcaaccttgcatgtccattactgtcatta

SEQ ID NO: 62054 - DNA, 4912 bp, Zea Mays
gcgctttgatttttacagaagcgtctctctcctcagtcctctttccctctcgctcccggatctgaactcctccgaaaaaatcgtacccgagagaaaccctagcactggaggttttccgccgtggcgcctcgccggagacctccgctcgccgtggccgccgacgcgtcgccctcgtcgtccccccggaagtccggcgaagatgcgccgccgcccgccgggagcacgccggcggcggcggccggcgtcaccccgtgcgagcaagccaggaaggcactgtgtgtgcggtcgccgtttgatggggaggaggctgctggacgggacccctggctgccatcccgtgttgccagatgggcggcggtgggcgacgtgcggaagaatcataagaagagccagccccaacagcagcaaccggagccatcccctcccctggagcagaacccgagagtgcctgccgggcgcaagggcttttgggagaagttggagccctattttcgagagttcacagtggatgatttggaggaattattgacgaagcatcatttctgtgctagccagattgatccatgttttgtgatacctgttgtgggctctaaggagttaggggagaattcagatctatctcatgcttttgaagtagatgaaagtccagagttgagctcgaatttgggcaaccataacaaggatttggataggagcaaagatgatattcaggacagcttggattatattggaggcagtgtagagctgattactcaagatgagagtaataaagataattgtgatcaggacatgcaggaagtgattgtgcagcaagaggagcagccggttgaaatcgctttagatcaaagcaggactgatagcattgttttaccgggatccagagaagatcggtggcgttctctgagctggctcttaggagcaaggggacggtttgtgctcacttcagagcgtccaaacaagaagaggaagctcttaggtgcagatgctgggctagagcaacttgtacttctgccatcccctgaaggcgaggctggttcagtctgtgatgagaaaggtgctctgaaacctttcaaaagggaccctggtccatccatagatggaggaaaccaggaatttgtacatttattttgtagtctctggagaccagagttttatgttgaggacatggaatcaatggagcctgtcaccaatgtagtagatacccaagagaatcaatcaaaattggtgtgcagcctttgcaaggtcatgcatggtgcatgtgtccgctgcagccatggacttcctttcatcctatatgtgcaagagagttcaagcttcagattgagatatgggggaagtttggtcatgataatgttgagatgcgagcattttgtgcaaagcattcttctgtcaaaagcatcagctccatacagaatgacaaaagtgtatctgaactggactccgctcaagttgagctgcatgatggaaagcctgttactgggaaggaacagcaagtgagatttacgcgcagtaacaaggacaaatttgtgaacagcacaattactactagttcttgtagcctaaacgaagcacatacaaatgaagtggctaccatttcacccgttcttggaaggactcaagaaacacaaagtgcagatatggctgctgatcaaccctcttcagatgggaatcttatgagcgattctggagatgtttccggaattcttagaaagctagtcgaccaaggaaagattagtcttgatgacattgaattggagccaagtcttcgttcagaatcagtggaagctgctttccagccggagacaactgcatactcccctggtttgaagttgaaaatgatcaagtggctgcagaactctgagtgtgcaccttctgttcaggttaagtcatttaaagagggttcattggcacaaggtacattgcctaggagtgaaagcaagaacttaaccactgctacatttcaatcaggacaggaggaagccatttcatcgattgaccatcattttctggaaaatgataatgctaataacggggatttggttcaaaatggctttcatagatgtcctgatcctgatgtaaatcagatttctggccgacatttgctcaacatggatggttactgttgctatattcatcctatcattgagaaaaggttgcaaggtttgtggagtaatagtttggagcaaactatacagaaaaatggttatcatgaagagttatcttggtctcttcatgacgaggactttggtggttcatcaacaaaacttgtgcaattaacaggcaaaactgccatggaagtctgtaaagcacaatcatcagatactctcaagctttcacctgatgacgaaatagaaggggaaatagtttatttacaatccaggctacttgatggtgttgtttctatgaagcagagatatgaagatttgatactcaaggttgtccagaatatttcttatgagttggattctttcaataaaagaaaatgggatcatatcattgtgaatcagtttcttcgtgatctgagagaagctaagaagcgcggaaactcagagaggagacacaaggaagctctagctattctggctgcaactgcaccttctgttacaccgacctcacgaaacacaacagtgaggaaagagacagaaaacaatgtgacacctgctaaacgagagaacatgccaagaagcattactggatcctcaagaattggccaactatcttcttcaccacaagcaaaggatttatcattttccaacagtgatgtctcagacgaaactaactttggcattttcaatctggcgaagttctccaagaaaagtgctcttccctgtgatatatgcatgcgatgtgatacaatattgaaccgtatttttgtttgctcgagctgtaaggctactgtacacttagattgctaccagagtctggtgtatcccactggcccatggaaatgtgaactttgccatgagatgccctcagattctgttacctctggtgaacaatcagaccaaaatggtccgaaagcttgtttggtgcaatgtggtttatgccatggaacatctggtgcttttagaaagactgtgaagggtcaatgggttcatgctttctgtgctgagtggctgttggagacaacattcagaagagggcaacataatccagtcgacggaatggagaggcttcatcacaaggataaagatacatgctctatatgccaccgctgtgttggtgcatgcttgaagtgctgtacattagattgtcaaattacttttcatccttcatgtgctagagatgctggtctttacatgaatacaaaaagattgggtaatatgttacaacataaagcatactgttgtagacacagtattgaacagagaaaggcctatagtcaacaatatggtcctgatgaaatcaagggcatgaaacaaatgagggttgaactggaactattacgtttcctttgtgagaggattgttaagagagaaaaagtgaagaaagatttggttggatgtgcacatgacatacttgctgcaaggaggataactgccgtctcttctttgtggacttcatgttatacttctggacctggagcaagttcagaatctgccactacttctgttaataacaaatcatatggtggaacaattcaaaggtctgatgatgtcacagtgagattggaagatgtcacagtggacagtacagttaccaaaaaacatactgtcaggttttctctgcataacagggacactgataggaacactgctgacagttccacatcaacaatatcatacaaacggaagttggatgatggggaatcacttgcattcaagagtcatcccggaacaccagctactgccttgttggagtcacgggatgcagaaaagccaatagataaaaagctcagggatatgtatcaaaaggagcttgtcatggttacttctcaccaagctttgttgaagaacaagacccctccagagagatatgtttacactcgccgcagctccatgtccaaaaggaagcaatgtagtcagcatgtagttcaaagacctggtggatgacagcaggcgaagtcgcttcttgggatatctggataataatattcttggaagctcgatgcagaaaaggacaaagtaaatacagcaagcggggctggccattaatcatgacagccgcaggggctggcgcgtggccgcactggaatcggaaatttggtgcaaattgggctcttcgaagatttgaccaattgagcccatgtcaccttggagtccaacatgcgctgaattcattcactaatttagtcaagggcaggttttgtgaaatacgcccaattgccagtatggcgtcttcacattatgtcgaagaaggaaatcgattgagttatgtgtggtgaaagaaagtgggtagacaaatattactgactggtgaaagctaccaataggccatccgcacattaatgaccatgtttaggagttgttgctatgtactaacagaactgcatgttttgttgtgtggctccattctgacttgtgaaatgaactctcggtaagtcatagggcatttcatgtttgtacaggcatgtaggtttagctttctggtatgtagctaaattcaaagcatcatcttgtagccttatgtggttaaccagatctttgatctattagttaatttagtaaaccaagagctgccttgtgttcgtatgggttgagtcgggcttttactgtattgatatctattattagcgtgaaggctgtttattgccgatgttgagcttcataagcattatctttttttaacaaaacacagtgcttgttttgtgaatacttgtaacctcgaatgtgtaataaatgtagcacgtctattcaactcaatggctcaagtgtcatatatggtcaaccttgcatgtccattactgtcatta

SEQ ID NO: 62055 - DNA, 4922 bp, Zea Mays
gcgctttgatttttacagaagcgtctctctcctcagtcctctttccctctcgctcccggatctgaactcctccgaaaaaatcgtacccgagagaaaccctagcactggaggttttccgccgtggcgcctcgccggagacctccgctcgccgtggccgccgacgcgtcgccctcgtcgtccccccggaagtccggcgaagatgcgccgccgcccgccgggagcacgccggcggcggcggccggcgtcaccccgtgcgagcaagccaggaaggcactgtgtgtgcggtcgccgtttgatggggaggaggctgctggacgggacccctggctgccatcccgtgttgccagatgggcggcggtgggcgacgtgcggaagaatcataagaagagccagccccaacagcagcaaccggagccatcccctcccctggagcagaacccgagagtgcctgccgggcgcaagggcttttgggagaagttggagccctattttcgagagttcacagtggatgatttggaggaattattgacgaagcatcatttctgtgctagccagattgatccatgttttgtgatacctgttgtgggctctaaggagttaggggagaattcagatctatctcatgcttttgaagtagatgaaagtccagagttgagctcgaatttgggcaaccataacaaggatttggataggagcaaagatgatattcaggacagcttggattatattggaggcagtgtagagctgattactcaagatgagagtaataaagataattgtgatcaggacatgcaggaagtgattgtgcagcaagaggagcagccggttgaaatcgctttagatcaaagcaggactgatagcattgttttaccgggatccagagaagatcggtggcgttctctgagctggctcttaggagcaaggggacggtttgtgctcacttcagagcgtccaaacaagaagaggaagctcttaggtgcagatgctgggctagagcaacttgtacttctgccatcccctgaaggcgaggctggttcagtctgtgatgagaaaggtgctctgaaacctttcaaaagggaccctggtccatccatagatggaggaaaccaggaatttgtacatttattttgtagtctctggagaccagagttttatgttgaggacatggaatcaatggagcctgtcaccaatgtagtagatacccaagagaatcaatcaaaattggtgtgcagcctttgcaaggtcatgcatggtgcatgtgtccgctgcagccatggagcatgcaggacttcctttcatcctatatgtgcaagagagttcaagcttcagattgagatatgggggaagtttggtcatgataatgttgagatgcgagcattttgtgcaaagcattcttctgtcaaaagcatcagctccatacagaatgacaaaagtgtatctgaactggactccgctcaagttgagctgcatgatggaaagcctgttactgggaaggaacagcaagtgagatttacgcgcagtaacaaggacaaatttgtgaacagcacaattactactagttcttgtagcctaaacgaagcacatacaaatgaagtggctaccatttcacccgttcttggaaggactcaagaaacacaaagtgcagatatggctgctgatcaaccctcttcagatgggaatcttatgagcgattctggagatgtttccggaattcttagaaagctagtcgaccaaggaaagattagtcttgatgacattgaattggagccaagtcttcgttcagaatcagtggaagctgctttccagccggagacaactgcatactcccctggtttgaagttgaaaatgatcaagtggctgcagaactctgagtgtgcaccttctgttcaggttaagtcatttaaagagggttcattggcacaaggtacattgcctaggagtgaaagcaagaacttaaccactgctacatttcaatcaggacaggaggaagccatttcatcgattgaccatcattttctggaaaatgataatgctaataacggggatttggttcaaaatggctttcatagatgtcctgatcctgatgtaaatcagatttctggccgacatttgctcaacatggatggttactgttgctatattcatcctatcattgagaaaaggttgcaaggtttgtggagtaatagtttggagcaaactatacagaaaaatggttatcatgaagagttatcttggtctcttcatgacgaggactttggtggttcatcaacaaaacttgtgcaattaacaggcaaaactgccatggaagtctgtaaagcacaatcatcagatactctcaagctttcacctgatgacgaaatagaaggggaaatagtttatttacaatccaggctacttgatggtgttgtttctatgaagcagagatatgaagatttgatactcaaggttgtccagaatatttcttatgagttggattctttcaataaaagaaaatgggatcatatcattgtgaatcagtttcttcgtgatctgagagaagctaagaagcgcggaaactcagagaggagacacaaggaagctctagctattctggctgcaactgcaccttctgttacaccgacctcacgaaacacaacagtgaggaaagagacagaaaacaatgtgacacctgctaaacgagagaacatgccaagaagcattactggatcctcaagaattggccaactatcttcttcaccacaagcaaaggatttatcattttccaacagtgatgtctcagacgaaactaactttggcattttcaatctggcgaagttctccaagaaaagtgctcttccctgtgatatatgcatgcgatgtgatacaatattgaaccgtatttttgtttgctcgagctgtaaggctactgtacacttagattgctaccagagtctggtgtatcccactggcccatggaaatgtgaactttgccatgagatgccctcagattctgttacctctggtgaacaatcagaccaaaatggtccgaaagcttgtttggtgcaatgtggtttatgccatggaacatctggtgcttttagaaagactgtgaagggtcaatgggttcatgctttctgtgctgagtggctgttggagacaacattcagaagagggcaacataatccagtcgacggaatggagaggcttcatcacaaggataaagatacatgctctatatgccaccgctgtgttggtgcatgcttgaagtgctgtacattagattgtcaaattacttttcatccttcatgtgctagagatgctggtctttacatgaatacaaaaagattgggtaatatgttacaacataaagcatactgttgtagacacagtattgaacagagaaaggcctatagtcaacaatatggtcctgatgaaatcaagggcatgaaacaaatgagggttgaactggaactattacgtttcctttgtgagaggattgttaagagagaaaaagtgaagaaagatttggttggatgtgcacatgacatacttgctgcaaggaggataactgccgtctcttctttgtggacttcatgttatacttctggacctggagcaagttcagaatctgccactacttctgttaataacaaatcatatggtggaacaattcaaaggtctgatgatgtcacagtgagattggaagatgtcacagtggacagtacagttaccaaaaaacatactgtcaggttttctctgcataacagggacactgataggaacactgctgacagttccacatcaacaatatcatacaaacggaagttggatgatggggaatcacttgcattcaagagtcatcccggaacaccagctactgccttgttggagtcacgggatgcagaaaagccaatagataaaaagctcagggatatgtatcaaaaggagcttgtcatggttacttctcaccaagctttgttgaagaacaagacccctccagagagatatgtttacactcgccgcagctccatgtccaaaaggaagcaatgtagtcagcatgtagttcaaagacctggtggatgacagcaggcgaagtcgcttcttgggatatctggataataatattcttggaagctcgatgcagaaaaggacaaagtaaatacagcaagcggggctggccattaatcatgacagccgcaggggctggcgcgtggccgcactggaatcggaaatttggtgcaaattgggctcttcgaagatttgaccaattgagcccatgtcaccttggagtccaacatgcgctgaattcattcactaatttagtcaagggcaggttttgtgaaatacgcccaattgccagtatggcgtcttcacattatgtcgaagaaggaaatcgattgagttatgtgtggtgaaagaaagtgggtagacaaatattactgactggtgaaagctaccaataggccatccgcacattaatgaccatgtttaggagttgttgctatgtactaacagaactgcatgttttgttgtgtggctccattctgacttgtgaaatgaactctcggtaagtcatagggcatttcatgtttgtacaggcatgtaggtttagctttctggtatgtagctaaattcaaagcatcatcttgtagccttatgtggttaaccagatctttgatctattagttaatttagtaaaccaagagctgccttgtgttcgtatgggttgagtcgggcttttactgtattgatatctattattagcgtgaaggctgtttattgccgatgttgagcttcataagcattatctttttttaacaaaacacagtgcttgttttgtgaatacttgtaacctcgaatgtgtaataaatgtagcacgtctattcaactcaatggctcaagtgtcatatatggtcaaccttgcatgtccattactgtcatta

SEQ ID NO: 62056 - DNA, 5133 bp, Zea Mays
gcgctttgatttttacagaagcgtctctctcctcagtcctctttccctctcgctcccggatctgaactcctccgaaaaaatcgtacccgagagaaaccctagcactggaggttttccgccgtggcgcctcgccggagacctccgctcgccgtggccgccgacgcgtcgccctcgtcgtccccccggaagtccggcgaagatgcgccgccgcccgccgggagcacgccggcggcggcggccggcgtcaccccgtgcgagcaagccaggaaggcactgtgtgtgcggtcgccgtttgatggggaggaggctgctggacgggacccctggctgccatcccgtgttgccagatgggcggcggtgggcgacgtgcggaagaatcataagaagagccagccccaacagcagcaaccggagccatcccctcccctggagcagaacccgagagtgcctgccgggcgcaagggcttttgggagaagttggagccctattttcgagagttcacagtggatgatttggaggaattattgacgaagcatcatttctgtgctagccagattgatccatgttttgtgatacctgttgtgggctctaaggagttaggggagaattcagatctatctcatgcttttgaagtagatgaaagtccagagttgagctcgaatttgggcaaccataacaaggatttggataggagcaaagatgatattcaggacagcttggattatattggaggcagtgtagagctgattactcaagatgagagtaataaagataattgtgatcaggacatgcaggaagtgattgtgcagcaagaggagcagccggttgaaatcgctttagatcaaagcaggactgatagcattgttttaccgggatccagagaagatcggtggcgttctctgagctggctcttaggagcaaggggacggtttgtgctcacttcagagcgtccaaacaagaagaggaagctcttaggtgcagatgctgggctagagcaacttgtacttctgccatcccctgaaggcgaggctggttcagtctgtgatgtttgttgtttgggagaaagtgacatggtgtctaacaggatgcttcattgcaagaactgtgagatatctgtgcaccagaagtgttatggtgtgcatgttgtgccagatcgtttctggttttgtgtttggtgtacccggaatattgggatgccacggaggttgacacggagcgatgcgtgcaggactgtgttaatgccctgtgtgctctgtccaaaggagaaaggtgctctgaaacctttcaaaagggaccctggtccatccatagatggaggaaaccaggaatttgtacatttattttgtagtctctggagaccagagttttatgttgaggacatggaatcaatggagcctgtcaccaatgtagtagatacccaagagaatcaatcaaaattggtgtgcagcctttgcaaggtcatgcatggtgcatgtgtccgctgcagccatggagcatgcaggacttcctttcatcctatatgtgcaagagagttcaagcttcagattgagatatgggggaagtttggtcatgataatgttgagatgcgagcattttgtgcaaagcattcttctgtcaaaagcatcagctccatacagaatgacaaaagtgtatctgaactggactccgctcaagttgagctgcatgatggaaagcctgttactgggaaggaacagcaagtgagatttacgcgcagtaacaaggacaaatttgtgaacagcacaattactactagttcttgtagcctaaacgaagcacatacaaatgaagtggctaccatttcacccgttcttggaaggactcaagaaacacaaagtgcagatatggctgctgatcaaccctcttcagatgggaatcttatgagcgattctggagatgtttccggaattcttagaaagctagtcgaccaaggaaagattagtcttgatgacattgaattggagccaagtcttcgttcagaatcagtggaagctgctttccagccggagacaactgcatactcccctggtttgaagttgaaaatgatcaagtggctgcagaactctgagtgtgcaccttctgttcaggttaagtcatttaaagagggttcattggcacaaggtacattgcctaggagtgaaagcaagaacttaaccactgctacatttcaatcaggacaggaggaagccatttcatcgattgaccatcattttctggaaaatgataatgctaataacggggatttggttcaaaatggctttcatagatgtcctgatcctgatgtaaatcagatttctggccgacatttgctcaacatggatggttactgttgctatattcatcctatcattgagaaaaggttgcaaggtttgtggagtaatagtttggagcaaactatacagaaaaatggttatcatgaagagttatcttggtctcttcatgacgaggactttggtggttcatcaacaaaacttgtgcaattaacaggcaaaactgccatggaagtctgtaaagcacaatcatcagatactctcaagctttcacctgatgacgaaatagaaggggaaatagtttatttacaatccaggctacttgatggtgttgtttctatgaagcagagatatgaagatttgatactcaaggttgtccagaatatttcttatgagttggattctttcaataaaagaaaatgggatcatatcattgtgaatcagtttcttcgtgatctgagagaagctaagaagcgcggaaactcagagaggagacacaaggaagctctagctattctggctgcaactgcaccttctgttacaccgacctcacgaaacacaacagtgaggaaagagacagaaaacaatgtgacacctgctaaacgagagaacatgccaagaagcattactggatcctcaagaattggccaactatcttcttcaccacaagcaaaggatttatcattttccaacagtgatgtctcagacgaaactaactttggcattttcaatctggcgaagttctccaagaaaagtgctcttccctgtgatatatgcatgcgatgtgatacaatattgaaccgtatttttgtttgctcgagctgtaaggctactgtacacttagattgctaccagagtctggtgtatcccactggcccatggaaatgtgaactttgccatgagatgccctcagattctgttacctctggtgaacaatcagaccaaaatggtccgaaagcttgtttggtgcaatgtggtttatgccatggaacatctggtgcttttagaaagactgtgaagggtcaatgggttcatgctttctgtgctgagtggctgttggagacaacattcagaagagggcaacataatccagtcgacggaatggagaggcttcatcacaaggataaagatacatgctctatatgccaccgctgtgttggtgcatgcttgaagtgctgtacattagattgtcaaattacttttcatccttcatgtgctagagatgctggtctttacatgaatacaaaaagattgggtaatatgttacaacataaagcatactgttgtagacacagtattgaacagagaaaggcctatagtcaacaatatggtcctgatgaaatcaagggcatgaaacaaatgagggttgaactggaactattacgtttcctttgtgagaggattgttaagagagaaaaagtgaagaaagatttggttggatgtgcacatgacatacttgctgcaaggaggataactgccgtctcttctttgtggacttcatgttatacttctggacctggagcaagttcagaatctgccactacttctgttaataacaaatcatatggtggaacaattcaaaggtctgatgatgtcacagtgagattggaagatgtcacagtggacagtacagttaccaaaaaacatactgtcaggttttctctgcataacagggacactgataggaacactgctgacagttccacatcaacaatatcatacaaacggaagttggatgatggggaatcacttgcattcaagagtcatcccggaacaccagctactgccttgttggagtcacgggatgcagaaaagccaatagataaaaagggatatgtatcaaaaggagcttgtcatggttacttctcaccaagctttgttgaagaacaagacccctccagagagatatgtttacactcgccgcagctccatgtccaaaaggaagcaatgtagtcagcatgtagttcaaagacctggtggatgacagcaggcgaagtcgcttcttgggatatctggataataatattcttggaagctcgatgcagaaaaggacaaagtaaatacagcaagcggggctggccattaatcatgacagccgcaggggctggcgcgtggccgcactggaatcggaaatttggtgcaaattgggctcttcgaagatttgaccaattgagcccatgtcaccttggagtccaacatgcgctgaattcattcactaatttagtcaagggcaggttttgtgaaatacgcccaattgccagtatggcgtcttcacattatgtcgaagaaggaaatcgattgagttatgtgtggtgaaagaaagtgggtagacaaatattactgactggtgaaagctaccaataggccatccgcacattaatgaccatgtttaggagttgttgctatgtactaacagaactgcatgttttgttgtgtggctccattctgacttgtgaaatgaactctcggtaagtcatagggcatttcatgtttgtacaggcatgtaggtttagctttctggtatgtagctaaattcaaagcatcatcttgtagccttatgtggttaaccagatctttgatctattagttaatttagtaaaccaagagctgccttgtgttcgtatgggttgagtcgggcttttactgtattgatatctattattagcgtgaaggctgtttattgccgatgttgagcttcataagcattatctttttttaacaaaacacagtgcttgttttgtgaatacttgtaacctcgaatgtgtaataaatgtagcacgtctattcaactcaatggctcaagtgtcatatatggtcaaccttgcatgtccattactgtcatta

SEQ ID NO: 62057 - DNA, 5078 bp, Zea Mays
gcgctttgatttttacagaagcgtctctctcctcagtcctctttccctctcgctcccggatctgaactcctccgaaaaaatcgtacccgagagaaaccctagcactggaggttttccgccgtggcgcctcgccggagacctccgctcgccgtggccgccgacgcgtcgccctcgtcgtccccccggaagtccggcgaagatgcgccgccgcccgccgggagcacgccggcggcggcggccggcgtcaccccgtgcgagcaagccaggaaggcactgtgtgtgcggtcgccgtttgatggggaggaggctgctggacgggacccctggctgccatcccgtgttgccagatgggcggcggtgggcgacgtgcggaagaatcataagaagagccagccccaacagcagcaaccggagccatcccctcccctggagcagaacccgagagtgcctgccgggcgcaagggcttttgggagaagttggagccctattttcgagagttcacagtggatgatttggaggaattattgacgaagcatcatttctgtgctagccagattgatccatgttttgtgatacctgttgtgggctctaaggagttaggggagaattcagatctatctcatgcttttgaagtagatgaaagtccagagttgagctcgaatttgggcaaccataacaaggatttggataggagcaaagatgatattcaggacagcttggattatattggaggcagtgtagagctgattactcaagatgagagtaataaagataattgtgatcaggacatgcaggaagtgattgtgcagcaagaggagcagccggttgaaatcgctttagatcaaagcaggactgatagcattgttttaccgggatccagagaagatcggtggcgttctctgagctggctcttaggagcaaggggacggtttgtgctcacttcagagcgtccaaacaagaagaggaagctcttaggtgcagatgctgggctagagcaacttgtacttctgccatcccctgaaggcgaggctggttcagtctgtgatgtttgttgtttgggagaaagtgacatggtgtctaacaggatgcttcattgcaagaactgtgagatatctgtgcaccagaagtgttatggtgtgcatgttgtgccagatcgtttctggttttgtgtttggtgtacccggaatattgggatgccacggaggttgacacggagcgatgcgtgcaggactgtgttaatgccctgtgtgctctgtccaaaggagaaaggtgctctgaaacctttcaaaagggaccctggtccatccatagatggaggaaaccaggaatttgtacatttattttgtagtctctggagaccagagttttatgttgaggacatggaatcaatggagcctgtcaccaatgtagtagatacccaagagaatcaatcaaaattggtgtgcagcctttgcaaggtcatgcatggtgcatgtgtccgctgcagccatggagcatgcaggacttcctttcatcctatatgtgcaagagagttcaagcttcagattgagatatgggggaagtttggtcatgataatgttgagatgcgagcattttgtgcaaagcattcttctgtcaaaagcatcagctccatacagaatgacaaaagtgtatctgaactggactccgctcaagttgagctgcatgatggaaagcctgttactgggaaggaacagcaagtgagatttacgcgcagtaacaaggacaaatttgtgaacagcacaattactactagttcttgtagcctaaacgaagcacatacaaatgaagtggctaccatttcacccgttcttggaaggactcaagaaacacaaagtgcagatatggctgctgatcaaccctcttcagatgggaatcttatgagcgattctggagatgtttccggaattcttagaaagctagtcgaccaaggaaagattagtcttgatgacattgaattggagccaagtcttcgttcagaatcagtggaagctgctttccagccggagacaactgcatactcccctggtttgaagttgaaaatgatcaagtggctgcagaactctgagtgtgcaccttctgttcaggttaagtcatttaaagagggttcattggcacaaggtacattgcctaggagtgaaagcaagaacttaaccactgctacatttcaatcaggacaggaggaagccatttcatcgattgaccatcattttctggaaaatgataatgctaataacggggatttggttcaaaatggctttcatagatgtcctgatcctgatgtaaatcagatttctggccgacatttgctcaacatggatggttactgttgctatattcatcctatcattgagaaaaggttgcaaggtttgtggagtaatagtttggagcaaactatacagaaaaatggttatcatgaagagttatcttggtctcttcatgacgaggactttggtggttcatcaacaaaacttgtgcaattaacaggcaaaactgccatggaagtctgtaaagcacaatcatcagatactctcaagctttcacctgatgacgaaatagaaggggaaatagtttatttacaatccaggctacttgatggtgttgtttctatgaagcagagatatgaagatttgatactcaaggttgtccagaatatttcttatgagttggattctttcaataaaagaaaatgggatcatatcattgtgaatcagtttcttcgtgatctgagagaagctaagaagcgcggaaactcagagaggagacacaaggaagctctagctattctggctgcaactgcaccttctgttacaccgacctcacgaaacacaacagtgaggaaagagacagaaaacaatgtgacacctgctaaacgagagaacatgccaagaagcattactggatcctcaagaattggccaactatcttcttcaccacaagcaaaggatttatcattttccaacagtgatgtctcagacgaaactaactttggcattttcaatctggcgaagttctccaagaaaagtgctcttccctgtgatatatgcatgcgatgtgatacaatattgaaccgtatttttgtttgctcgagctgtaaggctactgtacacttagattgctaccagagtctggtgtatcccactggcccatggaaatgtgaactttgccatgagatgccctcagattctgttacctctggtgaacaatcagaccaaaatggtccgaaagcttgtttggtgcaatgtggtttatgccatggaacatctggtgcttttagaaagactgtgaagggtcaatgggttcatgctttctgtgctgagtggctgttggagacaacattcagaagagggcaacataatccagtcgacggaatggagaggcttcatcacaaggataaagatacatgctctatatgccaccgctgtgttggtgcatgcttgaagtgctgtacattagattgtcaaattacttttcatccttcatgtgctagagatgctggtctttacatgaatacaaaaagattgggtaatatgttacaacataaagcatactgttgtagacacagtattgaacagagaaaggcctatagtcaacaatatggtcctgatgaaatcaagggcatgaaacaaatgagggttgaactggaactattacgtttcctttgtgagaggattgttaagagagaaaaagtgaagaaagatttggttggatgtgcacatgacatacttgctgcaaggaggataactgccgtctcttctttgtggacttcatgttatacttctggacctggagcaagttcagaatctgccactacttctgttaataacaaatcatatggtggaacaattcaaaggtctgatgatgtcacagtgagattggaagatgtcacagtggacagtacagttaccaaaaaacatactgtcaggttttctctgcataacagggacactgataggaacactgctgacagttccacatcaacaatatcatacaaacggaagttggatgatggggaatcacttgcattcaagagtcatcccggaacaccagctactgccttgttggagtcacgggatgcagaaaagccaatagataaaaagaacaagacccctccagagagatatgtttacactcgccgcagctccatgtccaaaaggaagcaatgtagtcagcatgtagttcaaagacctggtggatgacagcaggcgaagtcgcttcttgggatatctggataataatattcttggaagctcgatgcagaaaaggacaaagtaaatacagcaagcggggctggccattaatcatgacagccgcaggggctggcgcgtggccgcactggaatcggaaatttggtgcaaattgggctcttcgaagatttgaccaattgagcccatgtcaccttggagtccaacatgcgctgaattcattcactaatttagtcaagggcaggttttgtgaaatacgcccaattgccagtatggcgtcttcacattatgtcgaagaaggaaatcgattgagttatgtgtggtgaaagaaagtgggtagacaaatattactgactggtgaaagctaccaataggccatccgcacattaatgaccatgtttaggagttgttgctatgtactaacagaactgcatgttttgttgtgtggctccattctgacttgtgaaatgaactctcggtaagtcatagggcatttcatgtttgtacaggcatgtaggtttagctttctggtatgtagctaaattcaaagcatcatcttgtagccttatgtggttaaccagatctttgatctattagttaatttagtaaaccaagagctgccttgtgttcgtatgggttgagtcgggcttttactgtattgatatctattattagcgtgaaggctgtttattgccgatgttgagcttcataagcattatctttttttaacaaaacacagtgcttgttttgtgaatacttgtaacctcgaatgtgtaataaatgtagcacgtctattcaactcaatggctcaagtgtcatatatggtcaaccttgcatgtccattactgtcatta

SEQ ID NO: 62058 - DNA, 1676 bp, Zea Mays
ctaccgaggtgaatgactagggatccactacaaggcctttacaaagttccactagcttccgaaaacccgctacggtttatgggaagagcacttgcaagaatcccccgtctgaccaccatcgcagcaaaatcaacccgagaacctccttgcatgcaactcccctactgcccttgcccctttcgggtaaggtagtcttccactagctttcctaattagttagccaaagggtcccattcctcccttggtggcacgtgtttctcaagttaaactccatgttccaattaacaataatataatgatcttgacatgaacataaataacataacagagtaactggaacatggatataacgaaatattaacccaaaaccatataaagcaatagacccaatgatttaggggtaaacaaggtaaaagataatcagactagggtgacctattgggtcccatcaaaattaaacatatgcatgaataagtgatattaaagaacattattgggtaataaatgtggtcaagggcacaacttgcatgggacttgagattctaggtaccaggatgatcttgagatgactcgtaaccttgctgctagtcgtagcaatacgaacaaacatggtataggcaaaattaacatcacaccaaacgtaagaacatactgaataataataatctacgcgtcgctacgagatcgtgggatcgagaaccgctaaattcggggttacagttatgaagttatggttttccgaagatccatgtggttaaatatataatagactaagtgcaacattttaacctatatctcttggcaaaacaaagttaccagataataataattattattgtgagactaatgcaactagaatggatcaaaacggagttacggttattgagttatgaatttctgaagttatttagcacctagaatagattaattcaaataaacagttttaattcagtttcatggctaaacaaaggcactaggtgatagacaatattattacaaaattatagaaactgaaatggatcaatttgaacttaatatgaattttctatgaattatacaagtttctggaattatttttgtattagaaatcactttatataattaattttctatttccattgttctctggactggacgcacaaacatcaaaacatacaggggctatctcgcaaaagatcataagactcaggattcccccgcactgggtcgatgggttaattgtggcaaagggaaggggctcttaagtaagaatgcccagcgaagggggtaagctctgatcacagccgtccaatcaataacagagcgccaggattatatttattttaaaacgaaccggtatacgatccgggctgcccatcatgcgatccacggccctgatatcacggcgccaagatcagtctctggccgtctgatcttatacctacggctcagatcttaagcccgaagggttataaccccgatctaatctcccgcgtccgttcacgatcaaatagcagggagccattcttccttacatccacgatggagccacgcgaccaacacggcggtgcaccaagctcacacggcggcgccattgccagaccgcgcctttcactgatccgggcccgaaaccctaatctgagcaaaccaagaagatgattgcagtttatccgaacaacgacgaagtttgggacgag

SEQ ID NO: 62059 - DNA, 1927 bp, Zea Mays
ctaccgaggtgaatgactagggatccactacaaggcctttacaaagttccactagcttccgaaaacccgctacggtttatgggaagagcacttgcaagaatcccccgtctgaccaccatcgcagcaaaatcaacccgagaacctccttgcatgcaactcccctactgcccttgcccctttcgggtaaggtagtcttccactagctttcctaattagttagccaaagggtcccattcctcccttggtggcacgtgtttctcaagttaaactccatgttccaattaacaataatataatgatcttgacatgaacataaataacataacagagtaactggaacatggatataacgaaatattaacccaaaaccatataaagcaatagacccaatgatttaggggtaaacaaggtaaaagataatcagactagggtgacctattgggtcccatcaaaattaaacatatgcatgaataagtgatattaaagaacattattgggtaataaatgtggtcaagggcacaacttgcatgggacttgagattctaggtaccaggatgatcttgagatgactcgtaaccttgctgctagtcgtagcaatacgaacaaacatggtataggcaaaattaacatcacaccaaacgtaagaacatactgaataataataatctacgcgtcgctacgagatcgtgggatcgagaaccgctaaattcggggttacagttatgaagttatggttttccgaagatccatgtggttaaatatataatagactaagtgcaacattttaacctatatctcttggcaaaacaaagttaccagataataataattattattgtgagactaatgcaactagaatggatcaaaacggagttacggttattgagttatgaatttctgaagttatttagcacctagaatagattaattcaaataaacagttttaattcagtttcatggctaaacaaaggcactaggtgatagacaatattattacaaaattatagaaactgaaatggatcaatttgaacttaatatgaattttctatgaattatacaagtttctggaattatttttgtattagaaatcactttatataattaattttctatttccattgttctctggactggacgcacaaacatcaaaacatacaggggctatctcgcaaaagatcataagactcaggattcccccgcactgggtcgatgggttaattgtggcaaagggaaggggctcttaagtaagaatgcccagcgaagggggtaagctctgatcacagccgtccaatcaataacagagcgccaggattatatttattttaaaacgaaccggtatacgatccgggctgcccatcatgcgatccacggccctgatatcacggcgccaagatcagtctctggccgtctgatcttatacctacggctcagatcttaagcccgaagggttataaccccgatctaatctcccgcgtccgttcacgatcaaatagcagggagccattcttccttacatccacgatggagccacgcgaccaacacggcggtgcaccaagctcacacggcggcgccattgccagaccgcgcctttcactgatccgggcccgaaaccctaatctgaggtatgctatgcgcagataaaacataggggaattagatgagagccccataccggtttctacgctgcacagtgttttgcccacgatacaggtggctccgcggttccggtgagcaatcaccaccgccccgactgttgatccccgccatcgagtccacgaataaccccaccaacctcccgcgatgcaccctgacccaagaggagattcctaggcacaaggtcaccggcgtcggatatgagtctcttcacctatggcggcgcacgatggtcacggggcatgtccctacctttatatgtgttggggagggc

SEQ ID NO: 62060 - DNA, 2561 bp, Zea Mays
caccgatttgcacgtgctgcatccaacgaacctggtttgatgcccttgtcggcatcggggggcttcgcctacccgcatcacccaccctctccccgcttccctatccctcacgcagtcaggagatccccaattccccattcaccaatccccagtattgtagtagggggaaaaacgagagaaaagaaacagcagtagcggaggcaagacgaaatggtggccgccgtcgcgtcgccttcgtcggcggcaccctccgccggccgtccccatcgccacctacatcgccgaccacttctccggcctccactcgcgccacgatgccctcctctccgtccatctccgcagcctcaagtcccatggccaacttcgcctcgtctctggcaactacttcgtctccaccgccgctcagcggcaggggcgaggctccaacatcccgcccaaccccaaccctgctccggggcagaagcgtggtcgggggcggcctcgcaagtacgcagattcagccccttccgcttcgatcccggcgtttcaggacgccaagcgagggcgtggacgcccacgcaaacgcaagagcgcccaggacccggtggcttcctccccctccccttcgccgctacagggagcaagtgttccgccgcctccatctggggtcaagagggggcgtggacgccctcggaaggacgcccttgtccctccgccttcctcttcttcgccactgctgggagggattgatccaccgcctccatctgggatcaagacgggccgtgcacgtcctcggaaggcccttgtccctgtgcgttcctccttttccgagctgctgggagctgttgttctaccacctccgtctggggtcaagcgtggccgcggacgcccgcgcaagagtgcctaccccgctgtggcgccgttggtgggagctgagaagggacctgctggtggacaaccacagaggaataccactcctctctcaccgacacctgctaccatgtcccacagtggtaagagtgagactgtccggctgcccaaggttgctgttgatatcagtgctttgcgtggttcctccatgaacatatctgcttctagtaacagtttggttggtgcgaagcggggaagagggcgcccacctaaggttgtggttgctgggaaagagaagatgcaacctgaatctgtgcagtccgtggatgcttcattgactaagagagggcgtgggaggcccagaaaggagaaggcattggaaagtggccgcatgaaagcctcgcagatgactgagggtcaacgtgaagctctgactgcagaccaagctggggctgtccaaaatgaagtagaagatagggatttgcaatccttgggtactcctttgacagagaagagaggccgcggtcgtcctagaaagaggccgttggaaatcgaaactgcaaaagcaggggctgctaagcgtgggaggccaagaaaggagaagacatctgaaactggggacttgaaagttgcacagatgactgagggtcggcatgaagctctgcctgcacaagctgtagaccaaactgggcctgtgcaaaatgaagttgaagctatgattttgcaatcccttgctactactcctttgatggagaagaggagtcgtgggcgacctagaaagaggccattggaaactgaaactgcagaaacccaagttgctgcatcggtggagaagcgagggcgtgggaggccaagaaagaagaatccatcggcagggtggtctgcaggaaccagggatactgcattaaaggggattaagagagggcctgggaggccaaggaaggccaggccttttgaaactgagtctgtgaaaactgcacttgaggtgtctagggacttgacagaagatgggcctcaaaaggatggggatcttgtgtcagggaagaaagcagatactcatggtgtggtttggtagtgtcaactgaggaggtagccattgctcccatggatgctgggtgcgcagacgccaagggttgatctgatggatgtgggcaccaagagtcactagtgctctgatggtgcgaacaagaacaaaaaagaaataatgatagtacctgaaaggctaaacagaacatgcagctaataagtgtgttcatggatataattaatagccatactgcaagtattgctatatgtttgcaccagtttgattactcgtatgtttttgagcagttccattggaaactgcgtttgatgggtttcacttttgggggttggatttaaatatctaacccacatcctctttctttgtcaaggactataacatttttgtaattttgttgcttgtactggaaactagccatcataaggttcattttgttttccagtttcaacatcttttagtgatatgttcacataatatctctgttttgtgctttatttggtgtgtctattgggtgtttggttggaggaatgggacgagttggtccactattgcttcattcagtcattcctcatactaataagcacagagtattcagtataaaaacaaggatttgtgtcatctgagtaaattttgtagaatggtattatgatgtaccaaaccattgagg

SEQ ID NO: 62061 - DNA, 1643 bp, Zea Mays
gaaaacccacgaagaaaccgtacccatatcagctccggagtggagagtgctgcagcctacgccactgcccactggactcgccttccccttccgcctcggctccccatctgctctccgatttctcgatatacacaccgaaattcgaatcgcccgcctgccgagccctcgcccccacaacgccgatgccttccaagcggcctaccccgcacgccatggacgaagccgcctccgcctccgctgccgccgcgcgcctccgcgcctccaccccgcgctccaagaaacgcacctcccgctccaagtcccgcggccgctccccgaaccctaaccctagctcccgtcgcgagcgcgccgcggaccacggctccgccgcgccctcgcgcaagagcgaccgcaagccgaaccgctccttcccggattctgccacgctcgccacggccatggcctcggtccccgccgcctcggccccgtcgtccggcggggggcgtggtagtgcgggcgccgtccagaagctctggagcgaggtcgatgaggtcgcgctgctcacgggcgctgccgccttcaaggaccgcactggcatcgcgccgcgcctcccggacatgggcgaactgttcgagtccatcaggggctccctcgcgccgcacctcgatcaggccaaggtgtactacaagctcaagcgtctcaagagcaagttccagcactccgtgctgggcgactccagtaccgcgcacgagcaccggctgcgcgacctgggcgcagccctctggggcgccgagctcacgcgccctgaagagaacgccgtcgtgacggctgaggagaccaccgatcccgatgagggattcattgacgaagatagggaggggtccgtgaagcttcctatggttaaggaggtgcttggagagtactggaggttgaacgggcagaccatgtcaggtgtgtcactggagaagggattggtgctacttgggtcgcagcaagctagtgtggttgaggttaaatggaggcgacagcttgaggcagatatgcgcatgcagatgcgccgacatgatctggaaaaggaggtctatggcctactcatcgatgccatcaaaggcctagggccttagcttgggtctgggacttcgtcaacgagcatgaaagggtggtgtcactgatggtgcagatgacacatgtatcctaatagttttatgtgcacaactatagttcaagttgtgtagatgcggttgatggagtacatagctggatacataggtgggatgttattttgtaggctgatcaacccgacccgacctcgtggttgctaactgacagacctaacacggcgtgaaggggattgtgggggtttgcacgattcagtcgtgtcaatttatgtctagttgttgaactattcaatgtgattgtcaaactcgcttaggtctggagatgtttatttaactaatctatctgagaagaaagctttgcctatgatcagacagctttcacatcaacgctacacttcctgtaaatcattcgccaagatgacgctgtgtttcaggtgtagaatccagtttcctgtagttcagtttctcttcttgattacgctactagattctgtctggacatgtatatatgtatgatttggtcggagctgttcgctctccacttgt

SEQ ID NO: 62062 - DNA, 1282 bp, Zea Mays
aaaaaaaatcgtgccaaagatttccccattgggctatctcgcgcctttactcctctccccgccgccgtcacaaacacacataggtccgacttccctgcctccaggtccaacttcccctctgccaagtacagctactccgtcgctaggtacagcttcctcgccacggctgctccgccaccagtggcggtcgctgggcagccggaccttgctcggcagtggcggtcagcagatcacgttcttgctaggcacttgctgcaagctgtgtgcatggctggtggatagacttggcctggcggtggggcaccatgcaatagccagagaagacgaggaaggaaacgaaaaggaatacaaggatctggcccacaaaactgatttcaaatttgatttactatctatatatatgtggaacagttggagatcataattttttacgctcaaacctcagttaccaactcccaacactattttttaagaactaccggagttgctctaagatgccaaaaattctagttgattatactaccgttcaccgtataatattcttttttagtataatctcatatattttgtgccatatgacttatgagttatgagacattattgcccccacgcaagcaggtccaccaccggggcggcgccgtcgtgttgatcaggacggacccatcattcgtctccctctggtacccgcggcaggccggcaaccccaagagtcgcaggagtgcccaagccggtggacaccgtggcctagtccagcacgcccgtggcctgtgaggcaaacgacgcggcccttgccagcgcggctgatggcgcggcaagtgccagcccggcacacggcgaggcgggggccagctcgggaggcgacgtggtggggctaagacaggcgcacggcacggcgcggcaaggctcagtgcgttcgtggcaatggcaggggcctccatgaccggggcgtgcacccccgcggaacagctcggcgcgcgaggtgtgggcaggccctgtccggcgctgtggaggctgtggccggcgtgctcgtggtggccggcgcgcccgtgtccagtccgacggcggacggttcttcagtccccatgggccatggcggcgcgagaacagagagacgacgaacgtagacgagaacatgcgagattcatgcacaagggtaatggtgtcttctcatgttcaaactacacgtaacataattaaaggaatattatacggtgaatggtaatataatcaattagaagatctttgtaatcccatttatatgaattaaatgtttgagatggta

SEQ ID NO: 62063 - DNA, 1326 bp, Zea Mays
tgtttgactgtatgactgctagctcgatgtgatccattggttattctttgactgtttgtagatgtggtgcaacttaaaaccacttccaggagctaatcgactgataaaacatttaaagactaacggggtgcctactgctttggcttcaaactcaccaagatgtaacatagaagccaaaattttcttccaacaagggtggaaagagtctttctctgcaattgttggtggagatgaagtagagaaggggaagccatccccgaatatatttttggaagctgcaaagagaatgaactgtgctccttcaaattgcttagtaatagaggattccttgtgttacaggtggaaaagctgcagaaatgcatgtcatagctgtaccttcaatacccaaaaagactgctgagttcagttctgctgatgaggtgatcaattccctccttgatgtgaggcctgaaaagtgggggttgccaccatttaatgattggattgaaggtaccttaccaatagaaccatggtttattggtgggcctgtgatcaaaggatttggccgtggttctaaagtactaggaataccaacagcaaatttacccgcggagaatttttccgacgtagtgtcagaacatacatcaggggtatactttggctgggcaggactttcaacgcgtggtatatataagatggttatgagcattggctggaacccatatttcgacaataccgagaagacagtagaaccttggctgcttcataatttcggcgaggacttctatggcgaggaggtgcgccttgccatcgttggctacataagacctgaggccaactttccttcgctcgagagcttgatagagagaattcacgaggatggaagagtagcagagaaggcactagacctgccaatgtatgccaagtacaaagactcgccttatctgagaaacccttcgaagcacgggagtagtactaccggtgggacccagtctgagatggattccaagtgacaacccccctacagggccactagataatatgttacttattttctctatggtaaatgcgtcggtgttgatgcagaaacaattggactctctgtgagctaactcgcttcttaattttcggaagtagatagtattcctcgaagtggtgtttttactttgtaatatagaaaaaaataaagtggggttgttgaaacttgagagtcaaattccgagacgttatgcacgttttgatttctgaattaatcgattggtatcacttgtactgtttttatacgatgatgcttgaaccattcatttgtcattttaatttgatatacttgaagtcaacaatatgctt

SEQ ID NO: 62064 - DNA, 1395 bp, Zea Mays
tattttttttccagaagtcacactgaaatgctatatgtagaggcctagagggggttgttaaatgtgtttgactgtatgactgctagctcgatgtgatccattggttattctttgactgtttgtagatgtggtgcaacttaaaaccacttccaggagctaatcgactgataaaacatttaaagactaacggggtgcctactgctttggcttcaaactcaccaagatgtaacatagaagccaaaattttcttccaacaagggtggaaagagtctttctctgcaattgttggtggagatgaagtagagaaggggaagccatccccgaatatatttttggaagctgcaaagagaatgaactgtgctccttcaaattgcttagtaatagaggattccttgccaggtgttacaggtggaaaagctgcagaaatgcatgtcatagctgtaccttcaatacccaaaaagactgctgagttcagttctgctgatgaggtgatcaattccctccttgatgtgaggcctgaaaagtgggggttgccaccatttaatgattggattgaaggtaccttaccaatagaaccatggtttattggtgggcctgtgatcaaaggatttggccgtggttctaaagtactaggaataccaacagcaaatttacccgcggagaatttttccgacgtagtgtcagaacatacatcaggggtatactttggctgggcaggactttcaacgcgtggtatatataagatggttatgagcattggctggaacccatatttcgacaataccgagaagacagtagaaccttggctgcttcataatttcggcgaggacttctatggcgaggaggtgcgccttgccatcgttggctacataagacctgaggccaactttccttcgctcgagagcttgatagagagaattcacgaggatggaagagtagcagagaaggcactagacctgccaatgtatgccaagtacaaagactcgccttatctgagaaacccttcgaagcacgggagtagtactaccggtgggacccagtctgagatggattccaagtgacaacccccctacagggccactagataatatgttacttattttctctatggtaaatgcgtcggtgttgatgcagaaacaattggactctctgtgagctaactcgcttcttaattttcggaagtagatagtattcctcgaagtggtgtttttactttgtaatatagaaaaaaataaagtggggttgttgaaacttgagagtcaaattccgagacgttatgcacgttttgatttctgaattaatcgattggtatcacttgtactgtttttatacgatgatgcttgaaccattcatttgtcattttaatttgatatacttgaagtcaacaatatgctt

SEQ ID NO: 62065 - DNA, 2539 bp, Zea Mays
aatgccgttgtatggggagcacgcctcggtggttgcaagatccatcggaatgctgaccttgctgaatatgtgctgaagcagctcacccgactggagccatggaattctgggaactatgtcatgctttctaacatttactcgaacagtggaagatgggaagatgctgcaaagcttaggttggaaatgaaggcaaaggggattgagaaggtcgctgcctctagctgggttgagcttgatgataaggtccacaagttctatgttggggacgattcacatcctctttcagataagatctatgcaaagcttgatgaattgggccacggcataccttgtagattgagcccatagcagcccatatatgaagaaaaaacaaaagaaaaagagcccaacacgtaacaagcaacatctcgcattgattttgaagcgttgtgtctcccaaatatcttgcctttttgttgcattggactcttctgtggttagaatggcagcacccaagcccatttctcgtcttatttctcacgtcattcttgatttggatggcaccctcttaaacacagattctgttgtaagtaaggtagtaaaaccatttattctaaagaatggaaaaacgtgggatagcaagaaagctcacaagctagttgggaagacaccttatgaagctgcagctgttgttttagaagactatggactcccttactctacagaagagttcctctcgatgattactccgatgttcagtgagcagtaatgcaatggaacttctatgcacttgtattttttttccagaagtcacactgaaatgctatatgtagaggcctagagggggttgttaaatgtgtttgactgtatgactgctagctcgatgtgatccattggttattctttgactgtttgtagatgtggtgcaacttaaaaccacttccaggagctaatcgactgataaaacatttaaagactaacggggtgcctactgctttggcttcaaactcaccaagatgtaacatagaagccaaaattttcttccaacaagggtggaaagagtctttctctgcaattgttggtggagatgaagtagagaaggggaagccatccccgaatatatttttggaagctgcaaagagaatgaactgtgctccttcaaattgcttagtaatagaggattccttgtgttacaggtggaaaagctgcagaaatgcatgtcatagctgtaccttcaatacccaaaaagactgctgagttcagttctgctgatgaggtgatcaattccctccttgatgtgaggcctgaaaagtgggggttgccaccatttaatgattggattgaaggtaccttaccaatagaaccatggtttattggtgggcctgtgatcaaaggatttggccgtggttctaaagtactaggaataccaacaggtatgacttgctagaagcatagaagctaaatgtcaaaagatttgtttaaaatatctcctttttttgaaagtgccggtctggattatttagtcaacctcttgtatatacgcataactgtaccttactgttatattcaccaaagcgatatataactgctgctctctcatgtacaaggttgggtgatgcaccataattttgtttcctatatagttattgcatcgagtgttccccccctccaattagtctactcatatacattatgctatagtatgacccatagtataccaccattatgtatgagttcatatttgtttcttctatgctactacacgtggtttttcgtctggagcattgatggctttgcttctgtactacagcaaatttacccgcggagaatttttccgacgtagtgtcagaacatacatcaggggtatactttggctgggcaggactttcaacgcgtggtatatataagatggttatgagcattggctggaacccatatttcgacaataccgagaagacagtagaaccttggctgcttcataatttcggcgaggacttctatggcgaggaggtgcgccttgccatcgttggctacataagacctgaggccaactttccttcgctcgagagcttgatagagagaattcacgaggatggaagagtagcagagaaggcactagacctgccaatgtatgccaagtacaaagactcgccttatctgagaaacccttcgaagcacgggagtagtactaccggtgggacccagtctgagatggattccaagtgacaacccccctacagggccactagataatatgttacttattttctctatggtaaatgcgtcggtgttgatgcagaaacaattggactctctgtgagctaactcgcttcttaattttcggaagtagatagtattcctcgaagtggtgtttttactttgtaatatagaaaaaaataaagtggggttgttgaaacttgagagtcaaattccgagacgttatgcacgttttgatttctgaattaatcgattggtatcacttgtactgtttttatacgatgatgcttgaaccattcatttgtcattttaatttgatatacttgaagtcaacaatatgctt

SEQ ID NO: 62066 - DNA, 2620 bp, Zea Mays
cagagggtacgcctccaacgaacatcctcgggaggctctagaccttttcttcgcgatggaggtggagggagcgaagccggattgttacacggcggtcggggcgctctcagcgtgcacgaggttaggtgcattggatttgggatgacaggcggttgaaatagtgcactaggatgaggtccttgacaacccagtcctgggcactgcactgatcaatatgtatgctaagtgttggagcacaagagaggcatggatggtgttccagcagatgttggagagggacatcattgtttggaatgcgatgatcatggggcttggcatgattggccacgagaagattgcatttgtgcttgttggccagatgaagaactcgggtgtgaagctgaatgataataccttcattggattgctctgcagctgcacacatactagccttgtgaatgatgggcggcggtattttcataacatgactcatgtatacagtataagccctaggattgagcattatggttgtatggttgacctgttgagtcgtgcgggattgctggaggaggctcatcagctgattggtgacatgccaatgctggcaaatgccgttgtatggggagcacgcctcggtggttgcaagatccatcggaatgctgaccttgctgaatatgtgctgaagcagctcacccgactggagccatggaattctgggaactatgtcatgctttctaacatttactcgaacagtggaagatgggaagatgctgcaaagcttaggttggaaatgaaggcaaaggggattgagaaggtcgctgcctctagctgggttgagcttgatgataaggtccacaagttctatgttggggacgattcacatcctctttcagataagatctatgcaaagcttgatgaattgggccacggcataccttgtagattgagcccatagcagcccatatatgaagaaaaaacaaaagaaaaagagcccaacacgtaacaagcaacatctcgcattgattttgaagcgttgtgtctcccaaatatcttgcctttttgttgcattggactcttctgtggttagaatggcagcacccaagcccatttctcgtcttatttctcacgtcattcttgatttggatggcaccctcttaaacacagattctgttgtaagtaaggtagtaaaaccatttattctaaagaatggaaaaacgtgggatagcaagaaagctcacaagctagttgggaagacaccttatgaagctgcagctgttgttttagaagactatggactcccttactctacagaagagttcctctcgatgattactccgatgttcagtgagcagtaatgcaatggaacttctatgcacttgtggtgcaacttaaaaccacttccaggagctaatcgactgataaaacatttaaagactaacggggtgcctactgctttggcttcaaactcaccaagatgtaacatagaagccaaaattttcttccaacaagggtggaaagagtctttctctgcaattgttggtggagatgaagtagagaaggggaagccatccccgaatatatttttggaagctgcaaagagaatgaactgtgctccttcaaattgcttagtaatagaggattccttgtgttacaggtggaaaagctgcagaaatgcatgtcatagctgtaccttcaatacccaaaaagactgctgagttcagttctgctgatgaggtgatcaattccctccttgatgtgaggcctgaaaagtgggggttgccaccatttaatgattggattgaaggtaccttaccaatagaaccatggtttattggtgggcctgtgatcaaaggatttggccgtggttctaaagtactaggaataccaacagcaaatttacccgcggagaatttttccgacgtagtgtcagaacatacatcaggggtatactttggctgggcaggactttcaacgcgtggtatatataagatggttatgagcattggctggaacccatatttcgacaataccgagaagacagtagaaccttggctgcttcataatttcggcgaggacttctatggcgaggaggtgcgccttgccatcgttggctacataagacctgaggccaactttccttcgctcgagagcttgatagagagaattcacgaggatggaagagtagcagagaaggcactagacctgccaatgtatgccaagtacaaagactcgccttatctgagaaacccttcgaagcacgggagtagtactaccggtgggacccagtctgagatggattccaagtgacaacccccctacagggccactagataatatgttacttattttctctatggtaaatgcgtcggtgttgatgcagaaacaattggactctctgtgagctaactcgcttcttaattttcggaagtagatagtattcctcgaagtggtgtttttactttgtaatatagaaaaaaataaagtggggttgttgaaacttgagagtcaaattccgagacgttatgcacgttttgatttctgaattaatcgattggtatcacttgtactgtttttatacgatgatgcttgaaccattcatttgtcattttaatttgatatacttgaagtcaacaatatgctt

SEQ ID NO: 62067 - DNA, 1994 bp, Zea Mays
tctccatccttcccttcgttcgtgctcttcttcttgttattccgtttatcggtctggcgcagaaagaaacaagagatgcgatctagtctgctaccggagtccccgtacgtacccagtgctccgcggcttcggcaggggtgctgctggctgcagacgctgatctgtatccaccggccaccgccgttcgtgtttctccatgtaaacggtggaggattttgtgtctgttggctgctgcttccaatgcgctccacgagagacgagaccctctctgccagttcccttgtgtttcaaaacagagctcgagttcaaattgcttatttagtttcctttttctcttcttacttattgacaacttgttcacagggttcatcagcagaagctgcttgctccgccgccgccgccctcttcctcctctactggttgtgtctcccaaatatcttgcctttttgttgcattggactcttctgtggttagaatggcagcacccaagcccatttctcgtcttatttctcacgtcattcttgatttggatggcaccctcttaaacacagattctgttgtaagtaaggtagtaaaaccatttattctaaagaatggaaaaacgtgggatagcaagaaagctcacaagctagttgggaagacaccttatgaagctgcagctgttgttttagaagactatggactcccttactctacagaagagttcctctcgatgattactccgatgttcagtggtgcaacttaaaaccacttccaggagctaatcgactgataaaacatttaaagactaacggggtgcctactgctttggcttcaaactcaccaagatgtaacatagaagccaaaattttcttccaacaagggtggaaagagtctttctctgcaattgttggtggagatgaagtagagaaggggaagccatccccgaatatatttttggaagctgcaaagagaatgaactgtgctccttcaaattgcttagtaatagaggattccttgtgttacaggtggaaaagctgcagaaatgcatgtcatagctgtaccttcaatacccaaaaagactgctgagttcagttctgctgatgaggtgatcaattccctccttgatgtgaggcctgaaaagtgggggttgccaccatttaatgattggattgaaggtaccttaccaatagaaccatggtttattggtgggcctgtgatcaaaggatttggccgtggttctaaagtactaggaataccaacagcaaatttacccgcggagaatttttccgacgtagtgtcagaacatacatcaggggtatactttggctgggcaggactttcaacgcgtggtatatataagatggttatgagcattggctggaacccatatttcgacaataccgagaagacagtagaaccttggctgcttcataatttcggcgaggacttctatggcgaggaggtgcgccttgccatcgttggctacataagacctgaggccaactttccttcgctcgagagcttgatagagagaattcacgaggatggaagagtagcagagaaggcactagacctgccaatgtatgccaagtacaaagactcgccttatctgagaaacccttcgaagcacgggagtagtactaccggtgggacccagtctgagatggattccaagtgacaacccccctacagggccactagataatatgttacttattttctctatggtaaatgcgtcggtgttgatgcagaaacaattggactctctgtgagctaactcgcttcttaattttcggaagtagatagtattcctcgaagtggtgtttttactttgtaatatagaaaaaaataaagtggggttgttgaaacttgagagtcaaattccgagacgttatgcacgttttgatttctgaattaatcgattggtatcacttgtactgtttttatacgatgatgcttgaaccattcatttgtcattttaatttgatatacttgaagtcaacaatatgctt

SEQ ID NO: 62068 - DNA, 2001 bp, Zea Mays
tctccatccttcccttcgttcgtgctcttcttcttgttattccgtttatcggtctggcgcagaaagaaacaagagatgcgatctagtctgctaccggagtccccgtacgtacccagtgctccgcggcttcggcaggggtgctgctggctgcagacgctgatctgtatccaccggccaccgccgttcgtgtttctccatgtaaacggtggaggattttgtgtctgttggctgctgcttccaatgcgctccacgagagacgagaccctctctgccagttcccttgtgtttcaaaacagagctcgagttcaaattgcttatttagtttcctttttctcttcttacttattgacaacttgttcacagggttcatcagcagaagctgcttgctccgccgccgccgccctcttcctcctctactggttgtgtctcccaaatatcttgcctttttgttgcattggactcttctgtggttagaatggcagcacccaagcccatttctcgtcttatttctcacgtcattcttgatttggatggcaccctcttaaacacagattctgttgtaagtaaggtagtaaaaccatttattctaaagaatggaaaaacgtgggatagcaagaaagctcacaagctagttgggaagacaccttatgaagctgcagctgttgttttagaagactatggactcccttactctacagaagagttcctctcgatgattactccgatgttcagtgagcagtggtgcaacttaaaaccacttccaggagctaatcgactgataaaacatttaaagactaacggggtgcctactgctttggcttcaaactcaccaagatgtaacatagaagccaaaattttcttccaacaagggtggaaagagtctttctctgcaattgttggtggagatgaagtagagaaggggaagccatccccgaatatatttttggaagctgcaaagagaatgaactgtgctccttcaaattgcttagtaatagaggattccttgtgttacaggtggaaaagctgcagaaatgcatgtcatagctgtaccttcaatacccaaaaagactgctgagttcagttctgctgatgaggtgatcaattccctccttgatgtgaggcctgaaaagtgggggttgccaccatttaatgattggattgaaggtaccttaccaatagaaccatggtttattggtgggcctgtgatcaaaggatttggccgtggttctaaagtactaggaataccaacagcaaatttacccgcggagaatttttccgacgtagtgtcagaacatacatcaggggtatactttggctgggcaggactttcaacgcgtggtatatataagatggttatgagcattggctggaacccatatttcgacaataccgagaagacagtagaaccttggctgcttcataatttcggcgaggacttctatggcgaggaggtgcgccttgccatcgttggctacataagacctgaggccaactttccttcgctcgagagcttgatagagagaattcacgaggatggaagagtagcagagaaggcactagacctgccaatgtatgccaagtacaaagactcgccttatctgagaaacccttcgaagcacgggagtagtactaccggtgggacccagtctgagatggattccaagtgacaacccccctacagggccactagataatatgttacttattttctctatggtaaatgcgtcggtgttgatgcagaaacaattggactctctgtgagctaactcgcttcttaattttcggaagtagatagtattcctcgaagtggtgtttttactttgtaatatagaaaaaaataaagtggggttgttgaaacttgagagtcaaattccgagacgttatgcacgttttgatttctgaattaatcgattggtatcacttgtactgtttttatacgatgatgcttgaaccattcatttgtcattttaatttgatatacttgaagtcaacaatatgctt

SEQ ID NO: 62069 - DNA, 3143 bp, Zea Mays
gccgcatccgtccgggcctcctcgtctccccagccccgctgccgccgggttcatcagcagaagctgcttgctccgccgccgccgccctcttcctcctctactgattttgcttcggggttcggctaaatttcaggcgtgcccatgaagccattggggtcgtcaggagggcgttcgtgagcggcatgcgccccgacagcttcaaggcggtgcaggtgctcacagcgtgcgcccgcgtcgcggatctagagaccggggaggccgtgtggagggcggcacaacaggaggagggggtcacggagagcgtgttcgtggcgaccacggcgttggacctgtacgtcaagtgcggggagatggagaaggctagggcagtgtttgacgagatgaagaacaaggatgcggtggcctggagcgcgatagtcagagggtacgcctccaacgaacatcctcgggaggctctagaccttttcttcgcgatggaggtggagggagcgaagccggattgttacacggcggtcggggcgctctcagcgtgcacgaggttaggtgcattggatttgggatgacaggcggttgaaatagtgcactaggatgaggtccttgacaacccagtcctgggcactgcactgatcaatatgtatgctaagtgttggagcacaagagaggcatggatggtgttccagcagatgttggagagggacatcattgtttggaatgcgatgatcatggggcttggcatgattggccacgagaagattgcatttgtgcttgttggccagatgaagaactcgggtgtgaagctgaatgataataccttcattggattgctctgcagctgcacacatactagccttgtgaatgatgggcggcggtattttcataacatgactcatgtatacagtataagccctaggattgagcattatggttgtatggttgacctgttgagtcgtgcgggattgctggaggaggctcatcagctgattggtgacatgccaatgctggcaaatgccgttgtatggggagcacgcctcggtggttgcaagatccatcggaatgctgaccttgctgaatatgtgctgaagcagctcacccgactggagccatggaattctgggaactatgtcatgctttctaacatttactcgaacagtggaagatgggaagatgctgcaaagcttaggttggaaatgaaggcaaaggggattgagaaggtcgctgcctctagctgggttgagcttgatgataaggtccacaagttctatgttggggacgattcacatcctctttcagataagatctatgcaaagcttgatgaattgggccacggcataccttgtagattgagcccatagcagcccatatatgaagaaaaaacaaaagaaaaagagcccaacacgtaacaagcaacatctcgcattgattttgaagcgtgagaatctggtctgcttattctgttcgctgtgtttctttcgtccactcagctttccgcagccgccgttttacgttagccaattctgctgtcagcttgccgctgtccgctcgtcctttgagctttggttgtgtctcccaaatatcttgcctttttgttgcattggactcttctgtggttagaatggcagcacccaagcccatttctcgtcttatttctcacgtcattcttgatttggatggcaccctcttaaacacagattctgttgtaagtaaggtagtaaaaccatttattctaaagaatggaaaaacgtgggatagcaagaaagctcacaagctagttgggaagacaccttatgaagctgcagctgttgttttagaagactatggactcccttactctacagaagagttcctctcgatgattactccgatgttcagtgagcagtggtgcaacttaaaaccacttccaggagctaatcgactgataaaacatttaaagactaacggggtgcctactgctttggcttcaaactcaccaagatgtaacatagaagccaaaattttcttccaacaagggtggaaagagtctttctctgcaattgttggtggagatgaagtagagaaggggaagccatccccgaatatatttttggaagctgcaaagagaatgaactgtgctccttcaaattgcttagtaatagaggattccttgccaggtgttacaggtggaaaagctgcagaaatgcatgtcatagctgtaccttcaatacccaaaaagactgctgagttcagttctgctgatgaggtgatcaattccctccttgatgtgaggcctgaaaagtgggggttgccaccatttaatgattggattgaaggtaccttaccaatagaaccatggtttattggtgggcctgtgatcaaaggatttggccgtggttctaaagtactaggaataccaacagcaaatttacccgcggagaatttttccgacgtagtgtcagaacatacatcaggggtatactttggctgggcaggactttcaacgcgtggtatatataagatggttatgagcattggctggaacccatatttcgacaataccgagaagacagtagaaccttggctgcttcataatttcggcgaggacttctatggcgaggaggtgcgccttgccatcgttggctacataagacctgaggccaactttccttcgctcgagagcttgatagagagaattcacgaggatggaagagtagcagagaaggcactagacctgccaatgtatgccaagtacaaagactcgccttatctgagaaacccttcgaagcacgggagtagtactaccggtgggacccagtctgagatggattccaagtgacaacccccctacagggccactagataatatgttacttattttctctatggtaaatgcgtcggtgttgatgcagaaacaattggactctctgtgagctaactcgcttcttaattttcggaagtagatagtattcctcgaagtggtgtttttactttgtaatatagaaaaaaataaagtggggttgttgaaacttgagagtcaaattccgagacgttatgcacgttttgatttctgaattaatcgattggtatcacttgtactgtttttatacgatgatgcttgaaccattcatttgtcattttaatttgatatacttgaagtcaacaatatgctt

SEQ ID NO: 62070 - DNA, 2084 bp, Zea Mays
ccgtcccgtcccgcgcgcggccgccgcatccgtccgggcctcctcgtctccccagccccgctgccgccgggttcatcagcagaagctgcttgctccgccgccgccgccctcttcctcctctactggttgtgtctcccaaatatcttgcctttttgttgcattggactcttctgtggttagaatggcagcacccaagcccatttctcgtcttatttctcacgtcattcttgatttggatggcaccctcttaaacacagattctgttgtaagtaaggtagtaaaaccatttattctaaagaatggaaaaacgtgggatagcaagaaagctcacaagctagttgggaagacaccttatgaagctgcagctgttgttttagaagactatggactcccttactctacagaagagttcctctcgatgattactccgatgttcagtgagcagtggtgcaacttaaaaccacttccaggagctaatcgactgataaaacatttaaagactaacggggtgcctactgctttggcttcaaactcaccaagatgtaacatagaagccaaaattttcttccaacaagggtggaaagagtctttctctgcaattgttggtggagatgaagtagagaaggggaagccatccccgaatatatttttggaagctgcaaagagaatgaactgtgctccttcaaattgcttagtaatagaggattccttgtgttacaggtggaaaagctgcagaaatgcatgtcatagctgtaccttcaatacccaaaaagactgctgagttcagttctgctgatgaggtgatcaattccctccttgatgtgaggcctgaaaagtgggggttgccaccatttaatgattggattgaaggtaccttaccaatagaaccatggtttattggtgggcctgtgatcaaaggatttggccgtggttctaaagtactaggaataccaacaggtatgacttgctagaagcatagaagctaaatgtcaaaagatttgtttaaaatatctcctttttttgaaagtgccggtctggattatttagtcaacctcttgtatatacgcataactgtaccttactgttatattcaccaaagcgatatataactgctgctctctcatgtacaaggttgggtgatgcaccataattttgtttcctatatagttattgcatcgagtgttccccccctccaattagtctactcatatacattatgctatagtatgacccatagtataccaccattatgtatgagttcatatttgtttcttctatgctactacacgtggtttttcgtctggagcattgatggctttgcttctgtactacagcaaatttacccgcggagaatttttccgacgtagtgtcagaacatacatcaggggtatactttggctgggcaggactttcaacgcgtggtatatataagatggttatgagcattggctggaacccatatttcgacaataccgagaagacagtagaaccttggctgcttcataatttcggcgaggacttctatggcgaggaggtgcgccttgccatcgttggctacataagacctgaggccaactttccttcgctcgagagcttgatagagagaattcacgaggatggaagagtagcagagaaggcactagacctgccaatgtatgccaagtacaaagactcgccttatctgagaaacccttcgaagcacgggagtagtactaccggtgggacccagtctgagatggattccaagtgacaacccccctacagggccactagataatatgttacttattttctctatggtaaatgcgtcggtgttgatgcagaaacaattggactctctgtgagctaactcgcttcttaattttcggaagtagatagtattcctcgaagtggtgtttttactttgtaatatagaaaaaaataaagtggggttgttgaaacttgagagtcaaattccgagacgttatgcacgttttgatttctgaattaatcgattggtatcacttgtactgtttttatacgatgatgcttgaaccattcatttgtcattttaatttgatatacttgaagtcaacaatatgctt

SEQ ID NO: 62071 - DNA, 1708 bp, Zea Mays
gtcccgtcccgtcccgcgcgcggccgccgcatccgtccgggcctcctcgtctccccagccccgctgccgccgggttcatcagcagaagctgcttgctccgccgccgccgccctcttcctcctctactggttgtgtctcccaaatatcttgcctttttgttgcattggactcttctgtggttagaatggcagcacccaagcccatttctcgtcttatttctcacgtcattcttgatttggatggcaccctcttaaacacagattctgttgtaagtaaggtagtaaaaccatttattctaaagaatggaaaaacgtgggatagcaagaaagctcacaagctagttgggaagacaccttatgaagctgcagctgttgttttagaagactatggactcccttactctacagaagagttcctctcgatgattactccgatgttcagtggtgcaacttaaaaccacttccaggagctaatcgactgataaaacatttaaagactaacggggtgcctactgctttggcttcaaactcaccaagatgtaacatagaagccaaaattttcttccaacaagggtggaaagagtctttctctgcaattgttggtggagatgaagtagagaaggggaagccatccccgaatatatttttggaagctgcaaagagaatgaactgtgctccttcaaattgcttagtaatagaggattccttgccaggtgttacaggtggaaaagctgcagaaatgcatgtcatagctgtaccttcaatacccaaaaagactgctgagttcagttctgctgatgaggtgatcaattccctccttgatgtgaggcctgaaaagtgggggttgccaccatttaatgattggattgaaggtaccttaccaatagaaccatggtttattggtgggcctgtgatcaaaggatttggccgtggttctaaagtactaggaataccaacagcaaatttacccgcggagaatttttccgacgtagtgtcagaacatacatcaggggtatactttggctgggcaggactttcaacgcgtggtatatataagatggttatgagcattggctggaacccatatttcgacaataccgagaagacagtagaaccttggctgcttcataatttcggcgaggacttctatggcgaggaggtgcgccttgccatcgttggctacataagacctgaggccaactttccttcgctcgagagcttgatagagagaattcacgaggatggaagagtagcagagaaggcactagacctgccaatgtatgccaagtacaaagactcgccttatctgagaaacccttcgaagcacgggagtagtactaccggtgggacccagtctgagatggattccaagtgacaacccccctacagggccactagataatatgttacttattttctctatggtaaatgcgtcggtgttgatgcagaaacaattggactctctgtgagctaactcgcttcttaattttcggaagtagatagtattcctcgaagtggtgtttttactttgtaatatagaaaaaaataaagtggggttgttgaaacttgagagtcaaattccgagacgttatgcacgttttgatttctgaattaatcgattggtatcacttgtactgtttttatacgatgatgcttgaaccattcatttgtcattttaatttgatatacttgaagtcaacaatatgctt

SEQ ID NO: 62072 - DNA, 1405 bp, Zea Mays
ctcatccctgtcccgtcccgtcccgcgcgcggccgccgcatccgtccgggcctcctcgtctccccagccccgctgccgccgggttcatcagcagaagctgcttgctccgccgccgccgccctcttcctcctctactggtggtgcaacttaaaaccacttccaggagctaatcgactgataaaacatttaaagactaacggggtgcctactgctttggcttcaaactcaccaagatgtaacatagaagccaaaattttcttccaacaagggtggaaagagtctttctctgcaattgttggtggagatgaagtagagaaggggaagccatccccgaatatatttttggaagctgcaaagagaatgaactgtgctccttcaaattgcttagtaatagaggattccttgccaggtgttacaggtggaaaagctgcagaaatgcatgtcatagctgtaccttcaatacccaaaaagactgctgagttcagttctgctgatgaggtgatcaattccctccttgatgtgaggcctgaaaagtgggggttgccaccatttaatgattggattgaaggtaccttaccaatagaaccatggtttattggtgggcctgtgatcaaaggatttggccgtggttctaaagtactaggaataccaacagcaaatttacccgcggagaatttttccgacgtagtgtcagaacatacatcaggggtatactttggctgggcaggactttcaacgcgtggtatatataagatggttatgagcattggctggaacccatatttcgacaataccgagaagacagtagaaccttggctgcttcataatttcggcgaggacttctatggcgaggaggtgcgccttgccatcgttggctacataagacctgaggccaactttccttcgctcgagagcttgatagagagaattcacgaggatggaagagtagcagagaaggcactagacctgccaatgtatgccaagtacaaagactcgccttatctgagaaacccttcgaagcacgggagtagtactaccggtgggacccagtctgagatggattccaagtgacaacccccctacagggccactagataatatgttacttattttctctatggtaaatgcgtcggtgttgatgcagaaacaattggactctctgtgagctaactcgcttcttaattttcggaagtagatagtattcctcgaagtggtgtttttactttgtaatatagaaaaaaataaagtggggttgttgaaacttgagagtcaaattccgagacgttatgcacgttttgatttctgaattaatcgattggtatcacttgtactgtttttatacgatgatgcttgaaccattcatttgtcattttaatttgatatacttgaagtcaacaatatgctt

SEQ ID NO: 62073 - DNA, 1499 bp, Zea Mays
cctcgcgtgctcgattcccatctcccccctccctgcgcacagccgcacaccagtaccaccaacaccattcaacagacgccgccgccgccgccgccgcccctcatccctgtcccgtcccgtcccgcgcgcggccgccgcatccgtccgggcctcctcgtctccccagccccgctgccgccgggttcatcagcagaagctgcttgctccgccgccgccgccctcttcctcctctactggtggtgcaacttaaaaccacttccaggagctaatcgactgataaaacatttaaagactaacggggtgcctactgctttggcttcaaactcaccaagatgtaacatagaagccaaaattttcttccaacaagggtggaaagagtctttctctgcaattgttggtggagatgaagtagagaaggggaagccatccccgaatatatttttggaagctgcaaagagaatgaactgtgctccttcaaattgcttagtaatagaggattccttgtgttacaggtggaaaagctgcagaaatgcatgtcatagctgtaccttcaatacccaaaaagactgctgagttcagttctgctgatgaggtgatcaattccctccttgatgtgaggcctgaaaagtgggggttgccaccatttaatgattggattgaaggtaccttaccaatagaaccatggtttattggtgggcctgtgatcaaaggatttggccgtggttctaaagtactaggaataccaacagcaaatttacccgcggagaatttttccgacgtagtgtcagaacatacatcaggggtatactttggctgggcaggactttcaacgcgtggtatatataagatggttatgagcattggctggaacccatatttcgacaataccgagaagacagtagaaccttggctgcttcataatttcggcgaggacttctatggcgaggaggtgcgccttgccatcgttggctacataagacctgaggccaactttccttcgctcgagagcttgatagagagaattcacgaggatggaagagtagcagagaaggcactagacctgccaatgtatgccaagtacaaagactcgccttatctgagaaacccttcgaagcacgggagtagtactaccggtgggacccagtctgagatggattccaagtgacaacccccctacagggccactagataatatgttacttattttctctatggtaaatgcgtcggtgttgatgcagaaacaattggactctctgtgagctaactcgcttcttaattttcggaagtagatagtattcctcgaagtggtgtttttactttgtaatatagaaaaaaataaagtggggttgttgaaacttgagagtcaaattccgagacgttatgcacgttttgatttctgaattaatcgattggtatcacttgtactgtttttatacgatgatgcttgaaccattcatttgtcattttaatttgatatacttgaagtcaacaatatgctt

SEQ ID NO: 62074 - DNA, 3391 bp, Zea Mays
ctcacctcgcgtgctcgattcccatctcccccctccctgcgcacagccgcacaccagtaccaccaacaccattcaacagacgccgccgccgccgccgccgcccctcatccctgtcccgtcccgtcccgcgcgcggccgccgcatccgtccgggcctcctcgtctccccagccccgctgccgccgggttcatcagcagaagctgcttgctccgccgccgccgccctcttcctcctctactgattttgcttcggggttcggctcaatttcgtcggatggatatcgattggggtcgtcaggagggcgttcgcgagcggcatgcgccccgacagcttaattttgcttaatcttagattttgcttcggggttcggctaaatttcaggcgtgcccatgaagccattggggtcgtcaggagggcgttcgtgagcggcatgcgccccgacagcttcaaggcggtgcaggtgctcacagcgtgcgcccgcgtcgcggatctagagaccggggaggccgtgtggagggcggcacaacaggaggagggggtcacggagagcgtgttcgtggcgaccacggcgttggacctgtacgtcaagtgcggggagatggagaaggctagggcagtgtttgacgagatgaagaacaaggatgcggtggcctggagcgcgatagtcagagggtacgcctccaacgaacatcctcgggaggctctagaccttttcttcgcgatggaggtggagggagcgaagccggattgttacacggcggtcggggcgctctcagcgtgcacgaggttaggtgcattggatttgggatgacaggcggttgaaatagtgcactaggatgaggtccttgacaacccagtcctgggcactgcactgatcaatatgtatgctaagtgttggagcacaagagaggcatggatggtgttccagcagatgttggagagggacatcattgtttggaatgcgatgatcatggggcttggcatgattggccacgagaagattgcatttgtgcttgttggccagatgaagaactcgggtgtgaagctgaatgataataccttcattggattgctctgcagctgcacacatactagccttgtgaatgatgggcggcggtattttcataacatgactcatgtatacagtataagccctaggattgagcattatggttgtatggttgacctgttgagtcgtgcgggattgctggaggaggctcatcagctgattggtgacatgccaatgctggcaaatgccgttgtatggggagcacgcctcggtggttgcaagatccatcggaatgctgaccttgctgaatatgtgctgaagcagctcacccgactggagccatggaattctgggaactatgtcatgctttctaacatttactcgaacagtggaagatgggaagatgctgcaaagcttaggttggaaatgaaggcaaaggggattgagaaggtcgctgcctctagctgggttgagcttgatgataaggtccacaagttctatgttggggacgattcacatcctctttcagataagatctatgcaaagcttgatgaattgggccacggcataccttgtagattgagcccatagcagcccatatatgaagaaaaaacaaaagaaaaagagcccaacacgtaacaagcaacatctcgcattgattttgaagcgtgagaatctggtctgcttattctgttcgctgtgtttctttcgtccactcagctttccgcagccgccgttttacgttagccaattctgctgtcagcttgccgctgtccgctcgtcctttgagctttggttgtgtctcccaaatatcttgcctttttgttgcattggactcttctgtggttagaatggcagcacccaagcccatttctcgtcttatttctcacgtcattcttgatttggatggcaccctcttaaacacagattctgttgtaagtaaggtagtaaaaccatttattctaaagaatggaaaaacgtgggatagcaagaaagctcacaagctagttgggaagacaccttatgaagctgcagctgttgttttagaagactatggactcccttactctacagaagagttcctctcgatgattactccgatgttcagtgagcagtggtgcaacttaaaaccacttccaggagctaatcgactgataaaacatttaaagactaacggggtgcctactgctttggcttcaaactcaccaagatgtaacatagaagccaaaattttcttccaacaagggtggaaagagtctttctctgcaattgttggtggagatgaagtagagaaggggaagccatccccgaatatatttttggaagctgcaaagagaatgaactgtgctccttcaaattgcttagtaatagaggattccttgccaggtgttacaggtggaaaagctgcagaaatgcatgtcatagctgtaccttcaatacccaaaaagactgctgagttcagttctgctgatgaggtgatcaattccctccttgatgtgaggcctgaaaagtgggggttgccaccatttaatgattggattgaaggtaccttaccaatagaaccatggtttattggtgggcctgtgatcaaaggatttggccgtggttctaaagtactaggaataccaacagcaaatttacccgcggagaatttttccgacgtagtgtcagaacatacatcaggggtatactttggctgggcaggactttcaacgcgtggtatatataagatggttatgagcattggctggaacccatatttcgacaataccgagaagacagtagaaccttggctgcttcataatttcggcgaggacttctatggcgaggaggtgcgccttgccatcgttggctacataagacctgaggccaactttccttcgctcgagagcttgatagagagaattcacgaggatggaagagtagcagagaaggcactagacctgccaatgtatgccaagtacaaagactcgccttatctgagaaacccttcgaagcacgggagtagtactaccggtgggacccagtctgagatggattccaagtgacaacccccctacagggccactagataatatgttacttattttctctatggtaaatgcgtcggtgttgatgcagaaacaattggactctctgtgagctaactcgcttcttaattttcggaagtagatagtattcctcgaagtggtgtttttactttgtaatatagaaaaaaataaagtggggttgttgaaacttgagagtcaaattccgagacgttatgcacgttttgatttctgaattaatcgattggtatcacttgtactgtttttatacgatgatgcttgaaccattcatttgtcattttaatttgatatacttgaagtcaacaatatgctt

SEQ ID NO: 62075 - DNA, 1886 bp, Zea Mays
cctcacctcgcgtgctcgattcccatctcccccctccctgcgcacagccgcacaccagtaccaccaacaccattcaacagacgccgccgccgccgccgccgcccctcatccctgtcccgtcccgtcccgcgcgcggccgccgcatccgtccgggcctcctcgtctccccagccccgctgccgccgggttcatcagcagaagctgcttgctccgccgccgccgccctcttcctcctctactggtggtgcaacttaaaaccacttccaggagctaatcgactgataaaacatttaaagactaacggggtgcctactgctttggcttcaaactcaccaagatgtaacatagaagccaaaattttcttccaacaagggtggaaagagtctttctctgcaattgttggtggagatgaagtagagaaggggaagccatccccgaatatatttttggaagctgcaaagagaatgaactgtgctccttcaaattgcttagtaatagaggattccttgccaggtgttacaggtggaaaagctgcagaaatgcatgtcatagctgtaccttcaatacccaaaaagactgctgagttcagttctgctgatgaggtgatcaattccctccttgatgtgaggcctgaaaagtgggggttgccaccatttaatgattggattgaaggtaccttaccaatagaaccatggtttattggtgggcctgtgatcaaaggatttggccgtggttctaaagtactaggaataccaacaggtatgacttgctagaagcatagaagctaaatgtcaaaagatttgtttaaaatatctcctttttttgaaagtgccggtctggattatttagtcaacctcttgtatatacgcataactgtaccttactgttatattcaccaaagcgatatataactgctgctctctcatgtacaaggttgggtgatgcaccataattttgtttcctatatagttattgcatcgagtgttccccccctccaattagtctactcatatacattatgctatagtatgacccatagtataccaccattatgtatgagttcatatttgtttcttctatgctactacacgtggtttttcgtctggagcattgatggctttgcttctgtactacagcaaatttacccgcggagaatttttccgacgtagtgtcagaacatacatcaggggtatactttggctgggcaggactttcaacgcgtggtatatataagatggttatgagcattggctggaacccatatttcgacaataccgagaagacagtagaaccttggctgcttcataatttcggcgaggacttctatggcgaggaggtgcgccttgccatcgttggctacataagacctgaggccaactttccttcgctcgagagcttgatagagagaattcacgaggatggaagagtagcagagaaggcactagacctgccaatgtatgccaagtacaaagactcgccttatctgagaaacccttcgaagcacgggagtagtactaccggtgggacccagtctgagatggattccaagtgacaacccccctacagggccactagataatatgttacttattttctctatggtaaatgcgtcggtgttgatgcagaaacaattggactctctgtgagctaactcgcttcttaattttcggaagtagatagtattcctcgaagtggtgtttttactttgtaatatagaaaaaaataaagtggggttgttgaaacttgagagtcaaattccgagacgttatgcacgttttgatttctgaattaatcgattggtatcacttgtactgtttttatacgatgatgcttgaaccattcatttgtcattttaatttgatatacttgaagtcaacaatatgctt

SEQ ID NO: 62076 - DNA, 1780 bp, Zea Mays
ggctgccccctcacctcgcgtgctcgattcccatctcccccctccctgcgcacagccgcacaccagtaccaccaacaccattcaacagacgccgccgccgccgccgccgcccctcatccctgtcccgtcccgtcccgcgcgcggccgccgcatccgtccgggcctcctcgtctccccagccccgctgccgccggttgtgtctcccaaatatcttgcctttttgttgcattggactcttctgtggttagaatggcagcacccaagcccatttctcgtcttatttctcacgtcattcttgatttggatggcaccctcttaaacacagattctgttgtaagtaaggtagtaaaaccatttattctaaagaatggaaaaacgtgggatagcaagaaagctcacaagctagttgggaagacaccttatgaagctgcagctgttgttttagaagactatggactcccttactctacagaagagttcctctcgatgattactccgatgttcagtgagcagtggtgcaacttaaaaccacttccaggagctaatcgactgataaaacatttaaagactaacggggtgcctactgctttggcttcaaactcaccaagatgtaacatagaagccaaaattttcttccaacaagggtggaaagagtctttctctgcaattgttggtggagatgaagtagagaaggggaagccatccccgaatatatttttggaagctgcaaagagaatgaactgtgctccttcaaattgcttagtaatagaggattccttgccaggtgttacaggtggaaaagctgcagaaatgcatgtcatagctgtaccttcaatacccaaaaagactgctgagttcagttctgctgatgaggtgatcaattccctccttgatgtgaggcctgaaaagtgggggttgccaccatttaatgattggattgaaggtaccttaccaatagaaccatggtttattggtgggcctgtgatcaaaggatttggccgtggttctaaagtactaggaataccaacagcaaatttacccgcggagaatttttccgacgtagtgtcagaacatacatcaggggtatactttggctgggcaggactttcaacgcgtggtatatataagatggttatgagcattggctggaacccatatttcgacaataccgagaagacagtagaaccttggctgcttcataatttcggcgaggacttctatggcgaggaggtgcgccttgccatcgttggctacataagacctgaggccaactttccttcgctcgagagcttgatagagagaattcacgaggatggaagagtagcagagaaggcactagacctgccaatgtatgccaagtacaaagactcgccttatctgagaaacccttcgaagcacgggagtagtactaccggtgggacccagtctgagatggattccaagtgacaacccccctacagggccactagataatatgttacttattttctctatggtaaatgcgtcggtgttgatgcagaaacaattggactctctgtgagctaactcgcttcttaattttcggaagtagatagtattcctcgaagtggtgtttttactttgtaatatagaaaaaaataaagtggggttgttgaaacttgagagtcaaattccgagacgttatgcacgttttgatttctgaattaatcgattggtatcacttgtactgtttttatacgatgatgcttgaaccattcatttgtcattttaatttgatatacttgaagtcaacaatatgctt

SEQ ID NO: 62077 - DNA, 1458 bp, Zea Mays
ccggctgccccctcacctcgcgtgctcgattcccatctcccccctccctgcgcacagccgcacaccagtaccaccaacaccattcaacagacgccgccgccgccgccgccgcccctcatccctgtcccgtcccgtcccgcgcgcggccgccgcatccgtccgggcctcctcgtctccccagccccgctgccgccggtggtgcaacttaaaaccacttccaggagctaatcgactgataaaacatttaaagactaacggggtgcctactgctttggcttcaaactcaccaagatgtaacatagaagccaaaattttcttccaacaagggtggaaagagtctttctctgcaattgttggtggagatgaagtagagaaggggaagccatccccgaatatatttttggaagctgcaaagagaatgaactgtgctccttcaaattgcttagtaatagaggattccttgtgttacaggtggaaaagctgcagaaatgcatgtcatagctgtaccttcaatacccaaaaagactgctgagttcagttctgctgatgaggtgatcaattccctccttgatgtgaggcctgaaaagtgggggttgccaccatttaatgattggattgaaggtaccttaccaatagaaccatggtttattggtgggcctgtgatcaaaggatttggccgtggttctaaagtactaggaataccaacagcaaatttacccgcggagaatttttccgacgtagtgtcagaacatacatcaggggtatactttggctgggcaggactttcaacgcgtggtatatataagatggttatgagcattggctggaacccatatttcgacaataccgagaagacagtagaaccttggctgcttcataatttcggcgaggacttctatggcgaggaggtgcgccttgccatcgttggctacataagacctgaggccaactttccttcgctcgagagcttgatagagagaattcacgaggatggaagagtagcagagaaggcactagacctgccaatgtatgccaagtacaaagactcgccttatctgagaaacccttcgaagcacgggagtagtactaccggtgggacccagtctgagatggattccaagtgacaacccccctacagggccactagataatatgttacttattttctctatggtaaatgcgtcggtgttgatgcagaaacaattggactctctgtgagctaactcgcttcttaattttcggaagtagatagtattcctcgaagtggtgtttttactttgtaatatagaaaaaaataaagtggggttgttgaaacttgagagtcaaattccgagacgttatgcacgttttgatttctgaattaatcgattggtatcacttgtactgtttttatacgatgatgcttgaaccattcatttgtcattttaatttgatatacttgaagtcaacaatatgctt

SEQ ID NO: 62078 - DNA, 1881 bp, Zea Mays
ctgatctagtattttatatgccgcctgcgctgctgcgccgctggctgcccggctgccccctcacctcgcgtgctcgattcccatctcccccctccctgcgcacagccgcacaccagtaccaccaacaccattcaacagacgccgccgccgccgccgccgcccctcatccctgtcccgtcccgtcccgcgcgcggccgccgcatccgtccgggcctcctcgtctccccagccccgctgccgccgggttcatcagcagaagctgcttgctccgccgccgccgccctcttcctcctctactggttgtgtctcccaaatatcttgcctttttgttgcattggactcttctgtggttagaatggcagcacccaagcccatttctcgtcttatttctcacgtcattcttgatttggatggcaccctcttaaacacagattctgttgtaagtaaggtagtaaaaccatttattctaaagaatggaaaaacgtgggatagcaagaaagctcacaagctagttgggaagacaccttatgaagctgcagctgttgttttagaagactatggactcccttactctacagaagagttcctctcgatgattactccgatgttcagtgagcagtggtgcaacttaaaaccacttccaggagctaatcgactgataaaacatttaaagactaacggggtgcctactgctttggcttcaaactcaccaagatgtaacatagaagccaaaattttcttccaacaagggtggaaagagtctttctctgcaattgttggtggagatgaagtagagaaggggaagccatccccgaatatatttttggaagctgcaaagagaatgaactgtgctccttcaaattgcttagtaatagaggattccttgtgttacaggtggaaaagctgcagaaatgcatgtcatagctgtaccttcaatacccaaaaagactgctgagttcagttctgctgatgaggtgatcaattccctccttgatgtgaggcctgaaaagtgggggttgccaccatttaatgattggattgaaggtaccttaccaatagaaccatggtttattggtgggcctgtgatcaaaggatttggccgtggttctaaagtactaggaataccaacagcaaatttacccgcggagaatttttccgacgtagtgtcagaacatacatcaggggtatactttggctgggcaggactttcaacgcgtggtatatataagatggttatgagcattggctggaacccatatttcgacaataccgagaagacagtagaaccttggctgcttcataatttcggcgaggacttctatggcgaggaggtgcgccttgccatcgttggctacataagacctgaggccaactttccttcgctcgagagcttgatagagagaattcacgaggatggaagagtagcagagaaggcactagacctgccaatgtatgccaagtacaaagactcgccttatctgagaaacccttcgaagcacgggagtagtactaccggtgggacccagtctgagatggattccaagtgacaacccccctacagggccactagataatatgttacttattttctctatggtaaatgcgtcggtgttgatgcagaaacaattggactctctgtgagctaactcgcttcttaattttcggaagtagatagtattcctcgaagtggtgtttttactttgtaatatagaaaaaaataaagtggggttgttgaaacttgagagtcaaattccgagacgttatgcacgttttgatttctgaattaatcgattggtatcacttgtactgtttttatacgatgatgcttgaaccattcatttgtcattttaatttgatatacttgaagtcaacaatatgctt

SEQ ID NO: 62079 - DNA, 716 bp, Zea Mays
atgtgatccattggttattctttgactgtttgtagatgtggtgcaacttaaaaccacttccaggagctaatcgactgataaaacatttaaagactaacggggtgcctactgctttggcttcaaactcaccaagatgtaacatagaagccaaaattttcttccaacaagggtggaaagagtctttctctgcaattgttggtggagatgaagtagagaaggggaagccatccccgaatatatttttggaagctgcaaagagaatgaactgtgctccttcaaattgcttagtaatagaggattccttgtgttacaggtggaaaagctgcagaaatgcatgtcatagctgtaccttcaatacccaaaaagactgctgagttcagttctgctgatgaggtgatcaattccctccttgatgtgaggcctgaaaagtgggggttgccaccatttaatgattggattgaaggtaccttaccaatagaaccatggtttattggtgggcctgtgatcaaaggatttggccgtggttctaaagtactaggaataccaacagcaaatttacccgcggagaatttttccgacgtagtgtcagaacatacatcaggggtatactttggctgggcaggactttcaacgcgtggtatatataagatggttatgagcattggctggaacccatatttcgacaataccgagaagacagtagtgggaaccttggc

SEQ ID NO: 62080 - DNA, 4784 bp, Zea Mays
atcctacccttctctgcattcagattgtggtttctgcgggaaatcatgtgctagttcatcaaaacataaatattgtcataaaagtcttaaatgcttaatcatatctttctttggattaatcaactactagtagtaaattgagtcccataaatttgtgcaaaacacatagtaattttcttttattgtgtgaaaatatcttggggttagcatgtgtcgttgatccagagactagcatttcagtattggctagaccaccattgcttgactgagagtatcatgtggcgtgctctcgcaaactcgtgtagtaggcacaaatccaataaatctgtatttgtctatccaacaatctttaattgatgaacaattactatagtatattttttagaagggcaggcctggtgaagtggtgagagttatctcactaagtcaccaggtcacgagttcgaaatagcctctctgcatttgcatgggaaggcttgcctcgttttatcccttctccagtgggagcctttggcactgggtctactgtttttttactacagtacaaatttaaattggttgaaatatagttatgtgtgcatggagtctgatttgttgtgtaaatttttgcagtgtgcttgactgatgggggctgctcattagtttcacaaaccactgctccacatcctggttcggttctgccacatacgggctgctatgtgcaagtagtttcttccttactgatgattctttgctgctatgtgccttcttgattttacggatgattcttggctgctatgtgccttttaaattttacggatgattcttgctactatgtgcctttttgattttacactttttgattttacagatgattcttggctactatgtgatcttatgaccggtagcctagcaaccctaataaaatcagttagtttgtttagatagataagtatcagttagtttgtttagatggataaggataagcaaagtttatttagatggataaggagtttgtttagatagataaggatttggtttgttaagatattagataaggtcggctgctatctcagccctataaatgtacccctccaatcaatgaaagattaagtaggcaagtatcttgcccgtgcttcccaccaactcatctactattcacccccaacagtaccgcaccttctccaccaacagcccaacggaggccaagcgccggggtcctggccgtagaccccaaacctatcactcttcatctgaagtacttgcagcactacaggaggttgaaggatttgactttgctagacatattactgtgtatatggacagattactgtatttatggctagtgcatggcctatggcctgccagctatatatggtagtgattgattagggacatattgcctgatatatatatatatatatatatagtggaagccccagccacccctgcaacatccgaccagaccagccccagccgtcccctgcaccaccagaccagaccagcctggtcgcctccacccccacgcccatcactgcatgcacaccttttgttttcatttgcatgcgcaacaaaattggaagacatgcacacaatttaggagatggattgacatgcatagaaacaaaaaaatctgatttgaatgctttattctgtccataaatataggatctctataacagccatgtagctaatctcgttaaaatattttatgatatatattgatactaattatgttacacaatgtagatatttatgcaatactgtaagtcacataaaaattagtttcttgttacatgtgcacaaatttaggatgacaagaatgtccgttgagaggaaatggattgacatgcatggaaacaaaaaatctgatttaaatgttttatttcccccataaatatagaatctctacaaacaatcatgcagctaggctcgttagaaccagtttatgatatatattgatactaattatgctacacgatttagatatttatgcagtgtggtacaccgtgtaaaaaatcagtttcctattgcatgcacacaaatttaggatggcaaagaatgtgcgttgaaagaaaataaattggcatgcatggaaaccaaaaaaactgatttaaatggtaaatttcgttcataaaaataggatctctccaacaaccatgtagctatgctcgttggaatcagattatgacatatactgatactaattatgctacacggtgtagatatttatagtgtggtacaccgcgtaaaaaatatgtttcttgctgcatgcgcacaaatttaggatggtaaaaatatgcgttgaaaagaaatggattggcatgcatggaaacaaaaaatctgatttaaatgctttatttcgtccataaaatatgatctctacaacagccatgtagctaggctcgttacagactgtttatgatatatattgatactaattatgctgcacggtgaaagtatttatgcattacgatacactacttaaaaattggcatgcgggtcactgtttggacgcatctccatgttcgatcgtaaaaacattcagttttgagtgtaagacatctcagttttgaccgtaaacaccgagctaacgtaaatgttagaaaccctatatacacattgggttaggtaacgagataatgcttacaaatctataaacgtttgcgtaaaatgtgaatagaaatatcataaatatacaatagatggaagcgcaaccattgactgaaatatatgtcgtaaacacatattgacgttggcataaatatgtatacagaatagcataaaaacatgtcgtcgctcacgccctaagggagccgtcgcccgctacacgcgcctctgggatccgacgctgctcgcacctaggggaggccgtcgtcgcagctcgcccctaaggaagtccgtcgccgccgatcccatctcagttgtgttgcctgtgacggcgccgcgtccgtccgctactgcgactcgtcgtccactcgccatagaccccttctgtccacgccagaaccgcccggccgcgcatcggccaaagccgcgccccgtccgtgccagatcccgccagacctgcacgctcgcatgtcggccatcgtcgtcgtggtccgcccgcgtcagatcagcccgtccacgcgcgttggttccgtcgtcgcgcaaccgttgcagccgccgcagcccatggcgcccgtggggaccgcgagatcgggcgctcgcggacaggaccagcagcggcagcaggttcctgcacggttgccacgccggtggcagccgcccgcgctggatccgcccgcccgcaaccgttgccgcgctgaaaccctaattcgtggtggtctcgggtagcttttatagacgacttgaggcctggtctatttgaggtggtgcggctgaaccgaaaggtggcgttgggtcagggcttccggtcactctttggaagcccaaggctcctaatagataaactatatatatatatatatatatatatatatatatatatatatagacacacacacacacatacatgtatcgtcccctcatgaatcaactactattcctccaattcttccacactttcagaatctgatactgatcttgacctgtatgacgttctcacctctgacgctagcaaatttaagtgcatgatagctctaccagttcaaaggggaaagaggtggctactgaagcagttaagaagtgattagagtaatatgtgtttcttaccaaatggttaatggttttaattttgatgtgtaatcagcacgtgttgtttggttcatatatcgtgttcgtgcttgtgcctacctctcactgatgtacttgttttaatttgattattagatgtctaaacatatattgtgttgattgggcctcatatattgtgctgattaagtgattatatacatatattgtgatctttgtgttctatatgggtctgtatgtgctgcgtgtgtctcatatattgtgctggttagataatctgggctcaattcttgatccaagttagccagacaagattttgattttaattccagaaattcagttatgtttgcacccaaacaagaataatgaaatgaatccgtttccagctggtacaattttagacgaatcaattcctagaatctgattcatagaaactgattcaattccaaggagccaaaccagccctaaaaagacacaaatcttagtcgtattcaacaaaaagcatcaccgcacactttcaaaataagaggttcacaacttaacattatctacatcctgctgtgtaataagaatgcatgacaaatcagaaaagatgaacaaactatgtttccaaatgatatgatgaggtgaggggacccttactaaattgcatggtgtgaaaagaaaccaatgcccttctagttcgttaaaaacatgaaagtaaaaaaacaaatgcataaacaaataaacaataataaagtgcatattgcaagttttgtaggatctatacgatttttcacacctaccggttacatacttaaagaagttgcaacaaccacctgatatacactttctttaccacttctttgctgttgctaatacatgcaagatttctccacgttttgtgaataaataactaaacagagacatcaagtacaaggctacaagcatgctaaatactcaagaacacgatgtagttcggtggttcctaccagaagccatattaggagaaaccacaaacaaagaaaataaagcatacaagagacaaaggcacgagtatgcccttaggccttaggatggaaaatgtcataatcattaaaaggaaataaactcacaatcatttagtataaaat

SEQ ID NO: 62081 - DNA, 1285 bp, Zea Mays
ctcaagttcaacagcttctgttatagccttcagcttgtgcatattttttagggcccagaccatgagcttttcccagctcaggaagcggtgctgcacattcaaactcatattgtagaccttggcccagacatggataacattatcacaacaagactacttgtacctgcaagtgaaattgcttgctttgatggaagggaggggtcattatctgatatacagaggcagactagtgcaaacgtgcagatattaccaagagaagatcttccgtcatgcgctttagagtctgatgaactcatacagattgttggagagattaaagctgctcggaatgctctgatacaagtaacaacaaaattaaggagttttctataccgtgagatgcctgatcctattcaagttggcaatatcaatttacatggagccatttctccagtagcaggctcacctcgaggaccataccaaggaaatgatatcccaatgggtgcttatcaccaagcatcgcaactggcaacttcatggcattcaaaggatagtggaggcagtgcaagtggatcatttgagcaaggcagcaacattaatgatgatataaggcaaagtgctacaaaaagatttgccgttcctctagtgactagaagcacactagaaattgtcataccaaacagtgctgttgcaagcctcaccatgagagctggtagcaagcttgctcaaataagcgagatatctggtgctgcagtaacgctagccgaggatagatctgacatcttgcagaaagttgttcgaatatctggtacccctgagcaggctagcaaagctgagaatttgctgcagggatttatccttagcattccagatgacattccttcaggttaatcgaagatactctgcatgtcatagttgttaattcgtcaattttcttttatattttcgaggcagaatatgtcgagtcatgtgattatttgtttaattgagcagcatgttttcatgtgcggagacatgcatgccattttctttgtatctttgtagctgtgaccctaaatttcggttgtctccgaagacactctgcatgtcatagttgttaattcgtcaattttcttttatattttcgaggtagaatatgttgagtcatgtgattatttgtttaattgagcagcatgttttcatgtgtgtagacatgccattttctttgtatctttgtagctgtgaccctaaatttcggctgtctccgtttaactggccgatggggctgtaagattagcaagtgttttatagactgattggacattaa

SEQ ID NO: 62082 - DNA, 1329 bp, Zea Mays
gtatactccctctcctcagcagatccaagcagcctgctggtggaaaaaaagaagtatttgcatcaccttctccgaggtacagtatcctggaacgcagccgggcgatagtgctctcaagttcaacagcttctgttatagccttcagggcccagaccatgagcttttcccagctcaggaagcggtgctgcacattcaaactcatattgtagaccttggcccagacatggataacattatcacaacaagactacttgtacctgcaagtgaaattgcttgctttgatggaagggaggggtcattatctgatatacagaggcagactagtgcaaacgtgcagatattacattgttggagagattaaagctgctcggaatgctctgatacaagtaacaacaaaattaaggagttttctataccgtgagatgcctgatcctattcaagttggcaatatcaatttacatggagccatttctccagtagcaggctcacctcgaggaccataccaaggaaatgatatcccaatgggtgcttatcaccaagcatcgcaactggcaacttcatggcattcaaaggatagtggaggcagtgcaagtggatcatttgagcaaggcagcaacattaatgatgatataaggcaaagtgctacaaaaagatttgccgttcctctagtgactagaagcacactagaaattgtcataccaaacagtgctgttgcaagcctcaccatgagagctggtagcaagcttgctcaaataagcgagatatctggtgctgcagtaacgctagccgaggatagatctgacatcttgcagaaagttgttcgaatatctggtacccctgagcaggctagcaaagctgagaatttgctgcagggatttatccttagcattccagatgacattccttcaggttaatcgaagatactctgcatgtcatagttgttaattcgtcaattttcttttatattttcgaggcagaatatgtcgagtcatgtgattatttgtttaattgagcagcatgttttcatgtgcggagacatgcatgccattttctttgtatctttgtagctgtgaccctaaatttcggttgtctccgaagacactctgcatgtcatagttgttaattcgtcaattttcttttatattttcgaggtagaatatgttgagtcatgtgattatttgtttaattgagcagcatgttttcatgtgtgtagacatgccattttctttgtatctttgtagctgtgaccctaaatttcggctgtctccgtttaactggccgatggggctgtaagattagcaagtgttttatagactgattggacattaa

SEQ ID NO: 62083 - DNA, 1414 bp, Zea Mays
tgcaatgtttccagatctgcctggtcctaagagaacaagggaagtaagctctttttgggcaggaccatttaactgtataatttatccttgccaaatagtcatccaaggaagtatatccaagctgtggctatagatcctgaaggccaaccagaattgctttgcaaagacacatgtgattcagtaaacgctcaattgtttcttcgccttcatcacaaaggtgacatttaacaggctaggatacttcagcagtcagcacctacatttcaagaaatgtacccacacgagcaaagttcaggcatggaaacatgggttccacaacaacaaccagcagtgctacaagggacagaagaggaaccaacatcttatgaatcagatgctactgctggtcaggagccagagaccctaactgctgctgactacctgcgtgaactggaccaactccgagaaaaatccagcgatgttgacaaaatgagctttcaggatgaacatgcatcctgtcttgccacgtgcagcacaggagacattgaagatgatccatacccagcctcctactctgacgatatggaaggcataggtgaagattctggtgccttcacttcttgtgttggcactaggtggttcagggctcctgagcttttatatgggtcaacaaactatgggctagagattgatctctggtcgcttggatgcattttggcagaactgatgaaattggaggctttgttcccagggatatctgatattgatcagattagtagaatcatcaatgtcctgggcgatataacagaagaaacctttccaggctgttcaaacttgccagattacaacaagatttcctttaacaaagttgagaaaccgacaggccttgaagcatgtctgcctaacagatctcctactgaggttagcatcataaagcagctaatttgctatgacacagcaaagaggaccagtgctgttgatctgctgaatgatcggtactttaccgaagagcccttgccggcacctatagaaggattacatgtcccggcatcaaaggacgaggatgatgacagctcaactgaagaatggggtaattacagggatggtgtctctcgggttgactttgatgagtttggtagtatggatgccaccaaaactgagaagggtttcagcatacagttttcgtgacgaagaaagacgtagacgtacggaccatgcgtgccatgtccaaactaagaccatatcatggtatttatctacatgggagttgaattgctgtcaacatagacgaacatcagtaagcgatcaaaggttgtgcaatgttgctttgggtttaacatttttttagtttctatggaactttgtgattctttgtacggcagaaccagttttttccctggcaagaataaaactgtgtgtggtagtctgaagttcc

SEQ ID NO: 62084 - DNA, 1229 bp, Zea Mays
atttctagagcccaagccaactcacattgtcttttgtgctacacaggctaggatacttcagcagtcagcacctacatttcaagaaatgtacccacacgagcaaagttcaggcatggaaacatgggttccacaacaacaaccagcagtgctacaagggacagaagaggaaccaacatcttatgaatcagatgctactgctggtcaggagccagagaccctaactgctgctgactacctgcgtgaactggaccaactccgagaaaaatccagcgatgttgacaaaatgagctttcaggatgaacatgcatcctgtcttgccacgtgcagcacaggagacattgaagatgatccatacccagcctcctactctgacgatatggaaggcataggtgaagattctggtgccttcacttcttgtgttggcactaggtggttcagggctcctgagcttttatatgggtcaacaaactatgggctagagattgatctctggtcgcttggatgcattttggcagaactgatgaaattggaggctttgttcccagggatatctgatattgatcagattagtagaatcatcaatgtcctgggcgatataacagaagaaacctttccaggctgttcaaacttgccagattacaacaagatttcctttaacaaagttgagaaaccgacaggccttgaagcatgtctgcctaacagatctcctactgaggttagcatcataaagcagctaatttgctatgacacagcaaagaggaccagtgctgttgatctgctgaatgatcggtactttaccgaagagcccttgccggcacctatagaaggattacatgtcccggcatcaaaggacgaggatgatgacagctcaactgaagaatggggtaattacagggatggtgtctctcgggttgactttgatgagtttggtagtatggatgccaccaaaactgagaagggtttcagcatacagttttcgtgacgaagaaagacgtagacgtacggaccatgcgtgccatgtccaaactaagaccatatcatggtatttatctacatgggagttgaattgctgtcaacatagacgaacatcagtaagcgatcaaaggttgtgcaatgttgctttgggtttaacatttttttagtttctatggaactttgtgattctttgtacggcagaaccagttttttccctggcaagaataaaactgtgtgtggtagtctgaagttcc

SEQ ID NO: 62085 - DNA, 559 bp, Zea Mays
atttcatacaattttttagttgcgatttttagtcccattgcaacgataggcacatacctaattttaacttatagattcagctgtttctagttttaacatatagattcagctgtttcttgtgtgagaacagaaacagataaagcttttttcaacaatgatcagctgtgcctaaagccgcaagcaccacagccggagaaatcctctcgtgtggtctcttcagctctcagacggcaagacgatgctgccgccgaggtccgccgccgccgcgccgtgctcggttgcaggacttctgttccaccgattctcatcctactcgtcctcttctgtctattctgtccgccaccacgcctcgtctgctctctcctcccagccctccacccgccccaccaccacctggtcctcttccccccattccagcagccgcaggatcagggggtttgcggcctgggcttcggcgccggggccggcggggtctgcggattccctcgctacaaaggcggacacagtcacggttgtggatacctctggagatggccgccatgtttgtattgatgtataa

SEQ ID NO: 62086 - DNA, 1015 bp, Zea Mays
gctattatgttcttattcttctccaaacccgatgatcgctgtcgtctaatctaccgcgcgcaagcctcccctcggggctagatctccggtctccgcttgcccaatttccaccactgaggcgatgcaggaagccaagcacctcaccacctcaaagcttccgccgcaatcccaatcctcatccccatccccttcggctcccgccgcgaaccctcccccataccatcacgactatggtacctttcaccggccgtttcagccgacgctgcccgtcgtaggccccgcctaccatgactaccatgcctctcctatcgggttcggcagccaggggttcgttgcctccccgggcgccgtccagcagcaggtcttcgtggagggcatccccgtccgagagccgcccctaccgttctgcggcgtcggcgtcggctggtttttgttcttattggggttcttcttggcggcaatcccctggtatgctggtgcgttccttctattctttgttgctttggaccacagagagaagcctggattaatcgcatgcaccgttgctggcatatttgcactagttccattcatcctgaacggtatcagattgaaccctttctggtgatcagtgcttgccaatccagatccacatgactaatgttttcagcaccacattcgatatgttcatagctgtattattttgctcaaacttgcgaagaacaaaatatatgagcttatgtgtaaaaaggaattgccatgctgttttatgtccgcagcaggttcatgccctgtgatatgtgtaatcatgaattgtacagtttatctgtaccgcagcagtttacgagagatgactagatgtaccatgaagctggaaatggggcttcggggatacatgtcacagtgaattttcaaatcctgtgtaagtgatccatattcaggccattgcagctgtttacaggcctcacgttggggcctggagctttgctactggttattcgagttgctttggtactcctgatttaaggtaatccat

SEQ ID NO: 62087 - DNA, 597 bp, Zea Mays
gctattatgttcttattcttctccaaacccgatgatcgctgtcgtctaatctaccgcgcgcaagcctcccctcggggctagatctccggtctccgcttgcccaatttccaccactgaggcgatgcaggaagccaagcacctcaccacctcaaagcttccgccgcaatcccaatcctcatccccatccccttcggctcccgccgcgaaccctcccccataccatcacgactatggtacctttcaccggccgtttcagccgacgctgcccgtcgtaggccccgcctaccatgactaccatgcctctcctatcgggttcggcagccaggggttcgttgcctccccgggcgccgtccagcagcaggtcttcgtggagggcatccccgtccgagagccgcccctaccgttctgcggcgtcggcgtcggctggtttttgttcttattggggttcttcttggcggcaatcccctggtatgctggtgcgttccttctattctttgttgctttggaccacagagagaagcctggattaatcgcatgcaccgttgctatgactagatgtaccatgaagctggaaatggggcttcggggatacatgtc

SEQ ID NO: 62088 - DNA, 758 bp, Zea Mays
gctattatgttcttattcttctccaaacccgatgatcgctgtcgtctaatctaccgcgcgcaagcctcccctcggggctagatctccggtctccgcttgcccaatttccaccactgaggcgatgcaggaagccaagcacctcaccacctcaaagcttccgccgcaatcccaatcctcatccccatccccttcggctcccgccgcgaaccctcccccataccatcacgactatggtacctttcaccggccgtttcagccgacgctgcccgtcgtaggccccgcctaccatgactaccatgcctctcctatcggttcttattggggttcttcttggcggcaatcccctggtatgctggtgcgttccttctattctttgttgctttggaccacagagagaagcctggattaatcgcatgcaccgttgctggcatatttgcactagttccattcatcctgaacggtatcagattgaaccctttctggtgatcagtgcttgccaatccagatccacatgactaatgttttcagcaccacattcgatatgttcatagctgtattattttgctcaaacttgcgaagaacaaaatatatgagcttatgtgtaaaaaggaattgccatgctgttttatgtccgcagcaggttcatgccctgtgatatgtgtaatcatgaattgtacagtttatctgtaccgcagcagtttacgagagatgactagatgtaccatgaagctggaaatggggcttcggggatacatgtc

SEQ ID NO: 62089 - DNA, 4663 bp, Zea Mays
agccccgcgatcaatgccctcgccccgtgccgtcacggacgcgataaacgccccgcgcatccactactcaaggtcaacggcaaagcctcttcaaatcgtctcgcgtgggcgggcgttccaccgacgatgccgtcgccaccgacgatgccgtcgccaccgacattggctcctccctccccgcgtccggcgtggaacacgaactgcaaccttgtggtgacccaccctctgctatccgtcctcgagtcatgcgcctccttccgccgcctccttcagctccaggcactgctcaccgtctccggcctcgcctccaaccgcttcccagcctcccgccttcttgccttctgcgcgctttccgacccgccgcgcctcgcccacgctgccgccgtcctcgctcaatgcacagaggggcccaatgcatacatgctcgccaccatgatgcgcggcttcctccgcgccggaaagccaacccacgcactcaccctcttccgccgagtgctccgcgatcgcctcgccgtcgacgcgcgcaccatcgtcttcgcagttaaagccgccgccacttcctcctcccctacggaggccatccattgcgttgccttcaagcgaggatttattgggcagagcgtgctcgcggggaacgcgctggtgcacatgtacactagcagcatgttattacccgacgcgcggaagctgttcgacgaaatggctgacagggacgtggtctcgtggacaacgctgattgacggatacgcgcgaggtggcttgcccgatgaggcctggcgagtattctgccggatggtggttgctgagagtgtgtggccgaacgaggttactctggtcgcagcagcctcggcagctgggcaaatggggctacttgggttggggaggacagtgcatcagtgtatcgtggagagtggtggacgcatgagcgttaacttggagaatgcgctcgtcgatatgtttggaaagtgtgggtgtgtggccgcagcgaaggaagtttttgatgggatgcccatcaaggatgtatactcttggacgagcatggtcagtgcttatgccaagtgtggtgatttggagaatgcagcgaagcttttcaaggaaattcctaataggaatgtggtttcttggagttgcatggtcgcagcttattcacatgcaaatatgccagatgaagccattaggatattcaatgacatgattgcagcaggtgtggagccgattgatgctacacttgtgagtgttctgtcagcatgcgctcagctgtgttctttggatgttggtacatggttatatgacacttacattgtcagtcataaggttgagcttacaccgaatctaagcaatgcattcattgatatgtttgcaaaatgtggagatgtcggtgcagcatcaaggttatttagcaatatggaggacaagaatgtagtaagttggaacacaatgatcatggcacatggtttgcatggtcagcctgaagaagcccttcatctctttcaagaattcaaaggaaacggtattttgcctgatgaggccacatatattggggtactttctgcgtgcagtcatggtggtttagtatcagaaggacggtgccatttcaaagagatgaagatagtttatgggattgaacccagggccgaacattatgcatgcatgattgaccttttgggtaaagttgggcttcttcaagaggcgtttgaagttgcaaggagtatgccagtaggagctgacgaggctggttggggtgctcttttaaatgcttgcagaatgcatggtaatgtagagattggcaaatgtgcagcggataagctagcagggctggatccttcagacagtggaatctatgtacttatgagtcaaatatatgcaagtaaaagtaaatggggccaggtaaagatgctgagaacagtgatgagagatagaagagtaaagaagaatcctggatgtagttctatcgaagttgatgggaaatgtcatgagtttttggtggcagatgtttcgcatgttcactcagaagatatatatgctgcactggggaatatttaccttcattcaaaggcagaagaatgaagtactacaatgcgtgtctgttccacaaggtggagaaggatttcttggcacaaatccaactggaactggcaccgatggtgattccgtatacaaatttctctatggtgatcaagctcgattttttgatgatgagatccgaccagagttgaggcattctaaaactggaactgttgctatggccagtgctggtgaaaactgcaatgcctcgcaggtgcaaagctgccccggtgccttaattgataatattggatgctccatttttcaccatttttcagtacttcgttgcttgttttggccttcaatttatgtgcttttaatgtttttagttctacattaccttgcgggatgacatggattaccttgataaacacactgtgagcagcacttagattttgttaactgattttttttgttcatatgaacagaattcctttatttgaacaattcctgtgtttgttctgttgaccataggtgtttgggatggttgccaaaggttttgatatgctgacaaaaataaatgaagcttatgttgatgataaaggaagaccattcaaggacataaggtggagtgttgattaatgccttagttgcaccattaaacatgaatctcttggaattatttggcaaagcttcagggctccattataataatgagcagaaatccaatgtttacccgattcagtgctccgaggatgatccgatggtggttcataacttgttaccttgagagatctgatttcccttgcagatatctaggaattcctctctccctacgcaaattaactaaagaacagcttcagcctatcatagataggattgttgatcgcctaccaagctggaaagcagaccttgtaacaaaggcggtagaaaagttatggtgcaatgcaacatgtgctcacaagcatgattgtctacttagcaatgaccattgatcttccttcttgggctctagatgctattgacaagatcagaaggggatttctgtggagaggtcgcaaagatgccaagggagaacattgtttgatagcctggggaagagtgtgtcggcctctacaattaggaggtcttggaatatctagcttaaaggaattgtattgagcccttcgcatgagatgactttgcttgcataaatctgatccaggacgtacttgggcaaatcttcctatccaagttccaaaaaaggcaaaggctttctttccactgttttgatttcagaagtggagaatggagcccacactctgttgatctgttctagacagacaagtggatcttgggtcaaagagtaagtgatctggctcctaggttgtttgcaattataccaaaagaattgcaaataatataactgtttcagaggctttaaccaacagaaaatggatctctgacatcagaggggctctttcagttggagccatagtggactacttgcagttgtgggatttgctatcagaagtggtgttacaacctgaagtagaggataatcatatattcagtttagctagagatggcaaatactcggccaaaacaacaattgaaggtttctttgcaggctcaacagtttttggttattatcctttggtatgggaaacttgggcccctaaaagtgtcgtttcttcctttggttggttgcccacaggagatgttggactgtggacagacttgccaagagagggatggatcacccgacgatatgcctcttatgtgaccaggaagaagaaaccttgaaccatctccttgtctcttgtgtgtttacaagagggttttggtttcatcttctgagaccttttggattagaaagcctggctcctcagccagagctgttttccttcatgaactggtaggagcaaatcataggagtcatggctggcttgcccagaaaaggcctcaactccttaattgcctttgagcctggacaatttggaaacttcgaaatagatgtgtattcgagggctagactccaggtttggccttatctatatggctagcaggggaggagagattgttttgggaagcgacaggggctaaggggctttcctaccttgctgccctccttcctgaggtctagcatcttttgagtgattgtgtgtgtgtgagtgtgtctgatggattgttttagttatttgtgtttttggcctccgtaagtagacatttgtatttggcctttttaggcctctttttccgttgttcttaatataacgaggcacatttctcctacgttttcgagaaaaaaaatacaccattaaacggatgtttcactttagtttcctttgtcattttaattcctgtttgctgacctcatacaacttaattatttgcagaaataaggatacacatagcttggatgatcttttttatgatcctcctcgacttgctgaacttattcccgagaattctcatacaggaaagccacattttgaggttgtagaagagcgtttagaggatacttgggttcctttggaccaaactgtgggaaaccctaaccctgtcttagggatgagtgttgtattaatagatttgaattaactgggcccgacccattacacatgagtgagagagtaattacaaagggagaaccctaaaccctgaatgggattctaac

SEQ ID NO: 62090 - DNA, 7507 bp, Zea Mays
cagcctggaagacaaataagtagtaatgctgagttaaagtgcacactagtaactgtgaatagtacagaaactggctatttttaaaagcagcagtaccttcgcaatgctaattgtctgttgctccatggcttcatgtattgttgttctgtcatgctctcgcatgctattgagaagaatatcagatttaggtgttatatatctccatgataattagtgttggaaaacctaaccctaaacagggtggatgttatgtgcgcgcgcgtgtgtgtataatatatatattcatcacctagggtgcacccgagccaccccccacgcccatgtaccccccatccggtcaagcccccccccctcggcccatgtccagccgcccacccgaccgagctgatcgacatgaaaaatgattgactgaaaaacaaagaatgacttaatgttatctagactctcgaatgatcgaaaaaacataaatgtaggagaaaatatggagaatgactaaaaacaaaaaaaaatgacttaatgtttccctgaaaatgacttgatgtttccctgaaaaacaagaatgactgagctaaaaaacaaaggaatgtctgagaaaacatgaaaaatgcctgaaaactaaaatgacttaatgttgcatagatgtttactagaatgacttaacgttggctgaaccaataacaaaggaatgtcggagatgcatcaaaaaatgacagaataacttatgtacgttggaatgtctgaaacagaagggaaatgacttagtgcgcgcctgtggagccgcgcacggtcgagcgggcacgagccacgtagggcacgagtcgcgcgcacaatgggcgcgggcacaatgggcgcgggtgcgccagggtggtccaggtgatggaccattgggtccatcaccctaggtgatgaatagagtatatatatatagggtgaagcttcacctagtcggtaataatcgatatatatagttgagtacatgggctgggccaagacccattacaacagtaaacacatacacataatctaacaccctccatagtcgcaactctagccactacagatgttgagactgtaccgaaactccaagaacaccgtcgaggggaggcccttagtgaagatatcagtgaactagaaggtcaggacgtgtacattgctgacagtgacacactagcggacaaagtgtaggtcaatctccacgtgatccatgcgctaatgttgcatgggattggtggagagacagaccacattgacgttgtcacactagacgaggttgtcacagacaagagggttgtgaagctcctggaacagctgacaaagtcaggacgcctcgaccacatcgttggccacggcgcggtactcggcttcaaagctagagtgggatatgacaaattgtcgctttaaagaccagcagactaggttggcaccgaggaacacggtgtagaccaaggtagaccggtgcgtgacgggataacccgcccaatcagcgccgatgtagacgaccagcttggaggccagagaggggcgaaggagaaggtcgtggtcgagggtgtcgcggaggtaacgaaggatctactttgcagcggtgaggtgttgctcccgcggggagatgcatgtgaaggcacacatattggatgtcgtatgcgatgtcgggcctggtgaaggtgaggtactggagggcttcgaaaacgctctggtaggtcatcacgtcgcctaccgcgacactggcatcgtcggagaccttcgcctcggtgtcaacagacgtggagcaaggcttgcagtcgaacatgccatcccactccaggatttcgagtacgtactaccgctgatggagaaagaggccctatggacggcgctccatgtcgacccccagaaagcggtggagaagacccaagtccttcatcgcgaactcctgctgccaggaggcgattgtgcgctgaaggagggcgggactggacgtcgtgagcagaatatcgtcgacatacaacagcaagtagaaggtgtcagcgtcgtgccggaggatgaacagggacgtgtccaacttagctttgacgaagcctagtgagaccaagtaataggcgaagcgattataccaagcatgtcacacctgctttaggccatacaaagagaggttaagtttgcaagctatacccgggtgagtagagtcaacagagccgacaagctggctatagtacaccgtcccagtgagtgccatgaaggaaggcgttcttgacatccagctggtgcaccgcccaatcctaagagagcgccagaaagagaacgatactgacggtggcgagcttcgcagggctgaatgtctcgttgtaatccacttcagggcattgagtgaagcccaaaggacccaacaagccttgtaacgatccagggtaccgtcagccttgagcttgtgccgaaagatacacttgtcggtgaccacgttggtgccaggggtgaggtaccaggtcccacgtgtggttcgccagcaaggcctcgtactcctccatagtgtgatgctagtgggggtcagtgagcgtgctacagactaaggacggtacaggcaagggatgcagagtggggagggcgtaagcaccagtcattcgacgggacagagaacaccggttggatgccgcgtgaccatcgggtggatgggcgagggtcgcggtggatggcgacaagattgtacactggctgctcgtcacgagagcgagtcatggcactaggccacacatgtcgttggtaaaggaagaggagggacgtccacaggattggatcaaagagggtgtcgaggtcggggcctcttgggggatgagacgacaaggggaaagacaatctcgtcaaacaccacgtggcgggatatgatcacgtggtgggtggtgagatcgaggcaccagtaccccctgtgatcaaaggagtatctgaggaaaagacgagtggagcagggcgctagcttatggggaacagtggcgaaaatgttgggatagcaggcacaaccgaagacgcgaaggtgctcgtaggagaggttgtgacgaagagggcaaagaagggagtggggtgggcgggtggttgactgccttggagggaagacggttgaggtaggtggcagtgtttagcgcctcaacccggtatcgagtaggaagggaagcctgaaacaggaggcgacacagcatgttggtggtgatatgaatcatgtgctctgtccagcctttctgaggggaggtgtagggacacaagagccgcagttgaacactgtgacggagagaggaaggaatggaggagtcgccaaactcgtgaccgttatcacactggacaacacgaacgttgcgatcgaactgggtggagacccaagacaagaagtgcgagaacgtggtgaacgtatcggactttaaacgcaaagggaaagtccaaagaaaatgagagaaatcatccaaaatcagcaagtaatacttataccccgagatgttgaaaataggtgacgtccacatatcacagtgtacaagatcaaaagcctaagaagccatagaggaggaactatgcgaagggaagacgaacatgtcgacctaactgataggcatgatacagactatcaaaattgtccttgccatagcatataggagatgacagagctgctagatagcttggacatgacatcggacccaggatgaccgagacaatgataccaggtgatggacgaagtagtagcagtcaaggcaagagaagaggacatggcggtagagccgcacgtggacaatcgtcctatactcctagtctcctatcgatcgaacgcccatctcccagcatttccgtttcccaaaacgcctacacacggacagtaatcaggaccacaagtcatcaagaattccctgctcccatgcaccgttgccgccgcaccgcccggcttggccactcctcggcgcgccacgctgcagggggacgctgacacgcatggcccacatcccggtgactctacactcggctctgctccaccaccgcactcgccctcttcgacgttgtcgtccgtctccacaatccccacccatattccattttggttctcctcttgcgtcacacctcctccctcctagcctcctcctgcggctcacttatatataccaccacgtcgatgcgggggaattgaagagtgtacaaccgccctgagctgtcacatcgagcaagaagggtccttatagacagatccttcatagataaaccaaaatggtcaaactccatagaacaaaagttgttagtggtgaaccgacgaactgaaaaaagattttggataatgttgggaccaacaagaacgtttttgaggtgaaacagtcccgggagaacggaggcacccactaagggcttgttcggttttacctcaatccatatggattgagggggattgagggggttttaatccctagtaagtcaaaattcctctcaatccgtatcgatccccttcaatccatatggattgaaaataaccgaacaagccctaaggtagtcgggagagtggaaccgttccccagaacgataggaaggaaaagacgggtgaggtcgtgaccgtgagggggatgggaatgagataacatgtcggcgtcgggagtggtatggtaagagggcctagagtctaccacccaatccgacgcggtgggtggtggagtcgatgccatggtgttgaacaagtcatcgagggactgttgatcccagccgctatccagcagatactgtgggtgaggtgggggtcctcgggagtggaaggaggggcagaagcgatgattagtgctgaggagggggtgcttgaggtggaggggcgatgtagtggggtgtgaccagcaaagccgactaaagagagagcgttgaggagggaccgacggctgggctcaaccacatagagatggtcccgatccatgggttgtagaaggacaaccatgcatgaccccctcgtccagaagggacaccattgtgctggccaccatcccacagtcacccttgcagtggtggcgaccgccccccggagctggcaacctgacgagggccctaggagcagaagtggaggcaggagggcacgaaggaggcccatcggtaatggagggcgggggctggctgccggaggacacgtcgtagagggttgtggcagagcggtggattcggtgcccaaagtgagctcctcgagaagcagctcattgcagacattgtggaaggacaggaagggcatgaagcacttgaggaccttcaggtgatcatagcgccgactgagaccatgaagaaggttgagaacaagcgtgcaatcggagatgggctcgtcgagatctcgaagagagactgtcatgcccttcatctggtgaccgtactcggtaacggagaggtcaccctgatagaagagtcagaaggaggcatcgaagtggactagtggagggtgcgggcctccggttgccgaggaactgggcctcgaaggtagcccagacctggcgagcggtgccccccgctcgtggacgatatcctagagctcgacggtgagggtgccaaaaagccacaagagcaccatgtagtccatcgacgccaaggcaagagcaggtgggaaacggtgtcagcggggacatggtcgtcgagtgcgtagcgttgcaaagtgaggagtacctgggatcgaggacggcgaagacgagcaaccggatgttctggacacccgtcgcctggggcgtggaggttggtgatgaccgtgacctcatactccgaggggttgggaccatcgagggtgccgatgagggctcgacgacggggaagccaagcaagtgacgcttagcatcagccagctgcagggcgagggcatccactgcgttacgctcctgctcccaggcaagggtagcagcacgttcgcggtcccgagcagcagcagcaactgccttggcagcgataagtgcagtggccaaggtcgagtgtcggctgcgatgtcggagttgggcgcaaagccaagcacgaagctaggacccaggctggcaacaccaaggctagtaggggccatagcagggggcgcacgcggtgcagggtcggcacggtcagtgcagggtggggcccaggcgtggcggaagtcgtgagcgcccacgcaacggtgcggacgagcggtgaggtggggacaaaggcggccgcgggcgagcctgtgtggaggacagggccatgctggtgatgggcagcccaacggtagacgcgaggatggcggcagcaacgacaacccactggcgagagagaaagggaggggagaagagagggaggctggccatggaggaaggtggttggcaagtaggcggccagcaaaggctacgagcaggcgaccagtgaaggttgcacctaaggaagatagggaggaaagaagagaggattagcttgataccatgttgaaaaacctgaccctaaacagggtgggtgttgtatatatatatagttgagtacatgggctgggccaaggcccattacagcagtaaacacatacacataatctaacagttaggttatataatcatatttgtgttaattttaacaagaacccagaaataatgcacaacataccatggctaaaaagtatcaacaccacaataagatgagctattatcaggtaaaaaatatgcatgcagattatatctgtgatccattgtgcgtatctagggacataagtgatcattgctcatcagacagccctgtagcaggataacgacagcgcctactaaggagcatatgggaaaggggtcctaaccttagtatagtttactgtttacctaaagaggtggtgcttacttgttacatgcatgtatatacatctcatacaagagtaaacaaaaaaataactgcaattgctggacatcttataccaggcatgtgtctacatctatgtagcactgttatcagatgtcagaactgcagagtgcagaggatagtgttagtactattttgtatgcccagatgggttctaatatagtttaggaattggaacgtcttgaattcaataatcatagagcactataagaacgtatttcgatcacttccacatctcgccaaaattcggtacataagttgagaccgttgttcagatcacaaccatatcttgtcacaggttaggctgccacaacttttccttcagtaggcggcagattttttttgctaaatcttcagtggaagaattgttcgccgtgttttcagcaatgccgtgactgtctggtgcgtacgggacactgcccaaacagggtctagtaaacagtattaaatagaaaattggcgattgataacctgtcgaattcatctatgcagcataagccaccatcagccaaaacaagagcaccagcctcaagcatccactcccctgacattacacccccaccaccgccatcgcaacaaaaaagggaacaaaagtgttattagatgcagataaaattaaaaaaaacagcataatgctatgacaaacatattaccaccatcctttacagctgtgacagttaaaccagcactggtgcttccgagaccagttgtgatcaca

SEQ ID NO: 62091 - DNA, 1059 bp, Zea Mays
tgcctgacagatatataaactgataatagcaggtggagtcatttctaagccattgcgtgtgtgtctgtgcaactgtgctgcatccaagctaagaccaagatcatcgtcattcgtcagagccttcctaccggcaaccaactccaacgaaagccgcctcaccaactcccagcgtggcagctgctgcaatggcttccggtggcgcgtcgtcactggccttggccgcgctgctcctcgtgagctgcgcctcggcggcggtggcgaccaagtacaccgtcggggacgcgtccggctggacgaccaccggcgactacgccacctgggccagcggcaagaagttcaaagtcggcgacagtctcgagttcaaatacgccggcggggcgcacacggtggacgaggtgagcgcggcggactacgccgcctgctcctccagcaacgcgctcagcaccgacagcgccggcgccacgaccgtgaccctcaagacggccggcaagcactacttcatctgcggcgtggcgggccattgcagcagcggcatgaagctcgtggtggacgtggccaaggcggtggccgccccggcgccggccccagccgcggccgcggccccggctccggccgcggacaccgccccagacgcccccgacaccacgccgtcgaccccgacgtccccctcgagctccggcggccgcacgcccaagagcccagacacgacggtcctctcgccgccggacaagaagtccacctcctccggcgccaccgggctcagcgccgcggcgtgggccggcttgggccttgccgggctcgtggccgtgcacctcggcgcgttctaggccagcccgctggcctggccagggaggagacagtgccgtgtgctgttgttaggctgcacgtcatggattggattggtgtattggttgagggacttgactgcttaccagagagagatctcttttggttcagggaactgtgctgtagacctgtagttggataccttggatgttatgctatcagttttgctgttgttatcacatctctttcgtgattttcttttcgatattgtcc

SEQ ID NO: 62092 - DNA, 1691 bp, Zea Mays
gaaccggattgcagttgcccgttgtaatagaagcgccacgtgcgagctgcgactttgcttcaacacggaactgaaacgggttgacccacatcacaattcacaacaccagttgccaaccccacgcacgctctgcgacgcgcgagttccccttccccactcccagcttccgtttcctcggaccccaccaccgcgcccccattcctcagagctcagatgcagccgcagcccgccgagatggaccccgccgtcgacgcctccgcctccaccgcgcaggccgactccaacgtcagcgccgccgtccccgcacccgatccctccccgcccctgccggcgccggaggctgagacggtcgatccgccgcccccgccgcccgcaccagcgcccaagacggtcacctggagcgagaagctcacgtccgagtcgccgacgcacgtgcacgccgccgctgcggcggagtccagccagtacgtgtcccgcgggcccgcgtcctcctcgtctaaaggcgccgtggaggcgatgagggagacgctgtcgaggtgggggaagtcgtggggggagaccaccaagatggtcgagagcctcagccgcgacacgtggcaacacttcgacggttagaaagttgaattgtggtagtcgttggaactctcatccaacccaagttcaaagcacgacacctcttaagatgaagccagggtggagtcccctgcattgtgaaaactgacacctcttcaatgggactttcaagatcaaacttcaaatcactgaaaactgactatagttgtagatcatgggcgaaggtcctcagtggtgtgtgtagtcaagactggacctagttttactgaagctgctatgggacgcctagcacaagggactaaagttttagcagaagggggctatgaaaaaatatttaagcagaccttcgaagttcttccagatgagcagctgaaaatatgctttgcgtgctatctctcaacatcggcgggtcctgtcatgggagtcttgtatatttctacagcaaagattgctttctgcagtgacaatcctctgtcatacaaagctggaaataaaactgaatggagttactacaaggtggtcattcctcttcaccagctaagagcagctaatccttcagtaagcaaattaagtcccgcggagaagtacattcaggtcgtatccattgaaggccacgagttctggttcatgggttttctaatgtacgacaaggctgcaaccagtcttcaagaagccttggctagcgcacgtgagttgcaaccgtgaagacaccggggtaaatggtgtttcttccggttacatcagtttccacatcttgagttcaggctgggtcgcaaggattccttagcttctgagtgtctcctgtttcagatccttttagctgaagcctttgacacggtacactcactagcttgcatacgcgtcagaaatgtctgttgttcctgtcaatgttgtaatcatgagatgtatgtggagaaagaatgcatgtcaaacatttaaatgtggcagaactaatgtgggaacttgattatcaagggcctagaaaagttagggggaccagaaggtcgaggagaaacaagcggttggtgatgcgttatatttttgtcgattgacaaagggagccaggatttttaaatgtttctctgcattcacaccattatatttatatgggagctttg

SEQ ID NO: 62093 - DNA, 754 bp, Zea Mays
ctatgataccaaaggatctagaaaacttgcagctaatggtgttatctcagccatgaaatgctaacgccaaggcacacattgcacttaatgacattgatgcagccgtggagagctttaaacaggcattggagttggagccaaatgatgctggaatcaaaagagagctggctgctgcaaagaagaagattgctgacagaagagatcaggagcggaaggcatttgctaggattttccaatcttctggaaagtctgacaagagcaacgaagagaataattgatctacagttcctttcccccgtctgaaactttgcttagcttaaatctggggcacattggaacaggagtctcatgggagtctgctctgcaaaaaaacgcagattactgatctttagatagaaggaaacatagtggggggaaaggaagcttttgttttcttgtactacagaagtagcaattcgtgcttttgtcccggtcttagtttattcaggaaacggacattgaatttaaatgtgcaatttttagacccaacctgacgattcacatcttttgtgggtagttcgcccgtttcactttcgtggtgttttcttgtagccttttgtctgcttgttgccagactctaaggccatgtgtgccacacttcatctcacagctttacatattcaagcagtttctgcagcagctttttagtccagctgcttatctcaatgaactaaaagcagctgtgtttagacccgaatcatacacggtatttctg

SEQ ID NO: 62094 - DNA, 814 bp, Zea Mays
gcctagtctaattgccccttacctgggcatgcaaattaaagttaggagattcaagtggggctttattagacgcagattttgcactgcgtgaaagggagggaaatgctaaagcttttttccgacaaggacaggcacacattgcacttaatgacattgatgcagccgtggagagctttaaacaggcattggagttggagccaaatgatgctggaatcaaaagagagctggctgctgcaaagaagaagattgctgacagaagagatcaggagcggaaggcatttgctaggattttccaatcttctggaaagtctgacaagagcaacgaagagaataattgatctacagttcctttcccccgtctgaaactttgcttagcttaaatctggggcacattggaacaggagtctcatgggagtctgctctgcaaaaaaacgcagattactgatctttagatagaaggaaacatagtggggggaaaggaagcttttgttttcttgtactacagaagtagcaattcgtgcttttgtcccggtcttagtttattcaggaaacggacattgaatttaaatgtgcaatttttagacccaacctgacgattcacatcttttgtgggtagttcgcccgtttcactttcgtggtgttttcttgtagccttttgtctgcttgttgccagactctaaggccatgtgtgccacacttcatctcacagctttacatattcaagcagtttctgcagcagctttttagtccagctgcttatctcaatgaactaaaagcagctgtgtttagacccgaatcatacacggtatttctg

SEQ ID NO: 62095 - DNA, 1457 bp, Zea Mays
cttactgcatgctagtaaataagagtgggctcatgcttccaccgtgttattaaagggtttatgattcaagggggagacacaactgctggagacggaactgggggagagtcaatttatgggtccaaatttgaggacgagaattttgttttaaagcatgagaggaaaggaatgctttcaatggctaattctggtcccaacacaaatggttctcagtttttcatcactactacacggacacctcatttagacgggaaacatgttgtttttggtagagtgatgaaaggaatgggggtagttcgctctattgagcatgtttctgtcggagaagctgactgccccactcttgaagttaaaattgttgattgtggggagcttcctgaaggtgctgatgatggagttgtaaactttttcaaagatggtgatacgtacccagattggcccaatgatcttgaagagaagcctgctgaggtttcatggtggatggatgctgtggagtctgctaaagcttatgggaatgacaatttcaagaaacaggactacaaggcagctctcagaaagtacaggaaagctctgcgctacttggatctttgctgggagaaagaagagatagatgaagataagagcacagcactgcggaagaccaagtcaataatactcactaatagctccgcatgcaaattaaagttaggagattcaagtggggctttattagacgcagattttgcactgcgtgaaagggagggaaatgctaaagcttttttccgacaaggacaggcacacattgcacttaatgacattgatgcagccgtggagagctttaaacaggcattggagttggagccaaatgatgctggaatcaaaagagagctggctgctgcaaagaagaagattgctgacagaagagatcaggagcggaaggcatttgctaggattttccaatcttctggaaagtctgacaagagcaacgaagagaataattgatctacagttcctttcccccgtctgaaactttgcttagcttaaatctggggcacattggaacaggagtctcatgggagtctgctctgcaaaaaaacgcagattactgatctttagatagaaggaaacatagtggggggaaaggaagcttttgttttcttgtactacagaagtagcaattcgtgcttttgtcccggtcttagtttattcaggaaacggacattgaatttaaatgtgcaatttttagacccaacctgacgattcacatcttttgtgggtagttcgcccgtttcactttcgtggtgttttcttgtagccttttgtctgcttgttgccagactctaaggccatgtgtgccacacttcatctcacagctttacatattcaagcagtttctgcagcagctttttagtccagctgcttatctcaatgaactaaaagcagctgtgtttagacccgaatcatacacggtatttctg

SEQ ID NO: 62096 - DNA, 1484 bp, Zea Mays
ctttacctctgcgcccttgcgtgatttgtgttctttgttgctatttgtcctgcgggctcatgcttccaccgtgttattaaagggtttatgattcaagggggagacacaactgctggagacggaactgggggagagtcaatttatgggtccaaatttgaggacgagaattttgttttaaagcatgagaggaaaggaatgctttcaatggctaattctggtcccaacacaaatggttctcagtttttcatcactactacacggacacctcatttagacgggaaacatgttgtttttggtagagtgatgaaaggaatgggggtagttcgctctattgagcatgtttctgtcggagaagctgactgccccactcttgaagttaaaattgttgattgtggggagcttcctgaaggtgctgatgatggagttgtaaactttttcaaagatggtgatacgtacccagattggcccaatgatcttgaagagaagcctgctgaggtttcatggtggatggatgctgtggagtctgctaaagcttatgggaatgacaatttcaagaaacaggactacaaggcagctctcagaaagtacaggaaagctctgcgctacttggatctttgctgggagaaagaagagatagatgaagataagagcacagcactgcggaagaccaagtcaataatactcactaatagctccgcatgcaaattaaagttaggagattcaagtggggctttattagacgcagattttgcactgcgtgaaagggagggaaatgctaaagcttttttccgacaaggacaggcacacattgcacttaatgacattgatgcagccgtggagagctttaaacaggcattggagttggagccaaatgatgctggaatcaaaagagagctggctgctgcaaagaagaagattgctgacagaagagatcaggagcggaaggcatttgctaggattttccaatcttctggaaagtctgacaagagcaacgaagagaataattgatctacagttcctttcccccgtctgaaactttgcttagcttaaatctggggcacattggaacaggagtctcatgggagtctgctctgcaaaaaaacgcagattactgatctttagatagaaggaaacatagtggggggaaaggaagcttttgttttcttgtactacagaagtagcaattcgtgcttttgtcccggtcttagtttattcaggaaacggacattgaatttaaatgtgcaatttttagacccaacctgacgattcacatcttttgtgggtagttcgcccgtttcactttcgtggtgttttcttgtagccttttgtctgcttgttgccagactctaaggccatgtgtgccacacttcatctcacagctttacatattcaagcagtttctgcagcagctttttagtccagctgcttatctcaatgaactaaaagcagctgtgtttagacccgaatcatacacggtatttctg

SEQ ID NO: 62097 - DNA, 1618 bp, Zea Mays
atggccgaggtggacatcgtcgacggcgagaccgggcgcagcttcccccgcgacgggtccacgatgggcgagatcatgctccgcggcggctgcgtcatgctcggctacctggacgacgacaaggccaccaaggcggcgatacgcgacaacgggtggttctacacgggggacgtcggcgtgatgcatcctgacggtacatggagatctgcgaccggtccaaggacgtgatcatcaacggcggggagaacatcagcagcgtggaggtggagtccgtgctgtacagccacccggcggtgaacgaggccgcgatggtggcatggccggacgatttctggggagagacgtcgtgcgcattcgtgagcctcaaggaggagggatcgacggctgccgatgtcatcgcgatatggtttaatattgaaagggtgagcccctggaaccaatggtatagtgtggtcgcatgttctgcttggtggtaagccgactggatcctcaaatacctccacgaactgatccagaactacttggacttttggatcgaccgattgtccagcaggtgtagcctgtgattccattgacaagagcaaaagttcggtgacagcgccggctggtaatgtcacctaatgtcacctgcacaccttgcaagtatgctgacgacccattatatggaatgactgcccacttgttcgcccaatccaccttcatcggactgtattgctggagccagttcatgcccaatagacaatagtacatcaaacactataagaggcaaaaatttcatgtcagtgacaaattggcaatcagacatactccactcaactgctgggagatgataacggcatgaaagcacttgaccgttggctacttgcacagatatggttctaggcaactcttgaacaccagacaactgtggccgtaagcggtcactgacaaaagtgtgagaagaccctgagtcaactaatatgaggatgtcgtgttgctgcatgcgaccagcaaatcacatagtggttcctttgtcaattccttcccatgctgctggtgatagagatagtgccatcatgatttgttccggctggtcagcggtcgcacaaaccgcgagcacgacgatagcttttgagcgatgctacacgatcagctggtgaagatgcacgactgaagtcaccagtcgttttgtcagtggattgattttgtccgcctggttgttccttcttgctgaattcagacgacgccatatgcggccaagccatccggttggagaaaggctcagcatgctgacgccgagatgactccagcgcctcttcctgcacaaggacgagtgcacaagcagcatcgagatttggaggtctttgtaccattataacagttttaatatcatgtttgagaccatcgataaatcgcattgtgtagtacaagggatcagtatgcgactcatatgcagctaactcatctatcaaggatgcaaactgttcaacatagtctgaaacagaccctgtctgactaatatggaagagctgacgaatcaaggattcatgttgttcacgagctggatgggcttggccaacatcgcattcgacccctcccctatcgtcgtcgctcggggttgcaggcgaattttgggcgg

SEQ ID NO: 62098 - DNA, 542 bp, Zea Mays
cacctcattgatttggcacaaatgaaggttgaaatgctgaagaagcaaaaggatgaggtcctggagcgaatcaacaaccaacatggaccgaaggcaaagaaactttgtcttcaccgcaccctgactggcccatggtagcctgctgaagcttgcacagacctcaccgaagtcgagatcgtcggcttagatgtgctcgtgtgtataccagatgatctcaagttgttctgtgacgtgggttgttgtctgtgcctgacagttcaccgtttaggttcagctgcgcaatcctcatataaacaatgaggcgtactatctaatctgttcatttaactccctcctattgccatggtgagatcatgcatgtaacttaggccttgttcgtttgtgtcagattgtacccggaatcgttccagtttatcaaagtctatataaattagagaatcaatccggttaggaatcgtttcggcccatcaatccggtacaaacgaacaaggccttaatgttgttgagataatttgacaatgagattatagctgatagctcag

SEQ ID NO: 62099 - DNA, 1230 bp, Zea Mays
cacgtcagcccagaagacgttcgacgaaggtcctgacgcgagagcgtggtcttcactgacggggtagggacgcgcaggcaggttacggctcccgctctcacgcccgcgcacgcgtaactgccggagcagacacagcggcagcagacgctggggtaccatgactctggaggatttcctggtacgcgccggcgtggttcgtgaggacatggggcagcagaccctcgtgctgcagccgctcgcgcagggtctcttctcccaggggaatgcggtcgcgctcgcgccgcagaccatgcagctggggaacggggtgttgaccggggtcgtcgggcaggggctcggaggagggatgacggtggcggtgccgacgacgccggtcgtgttcaacgtgatgaggaaactggaggcgggggatctttataggccgctgcagctgacgatgcccatcggcactacactgagggtgaggacaagtcgagccgaaaggaaggtggtggagaggatgaagaggaggatgatcaagaacatggagtcggcaaccaataatagtctgaataagcacgcatacataattgagctggaagctgaggtggcaaaactcaaggacctgaatgacgagttgcagaaaaagcaggtcctgagttcaaatcgtccgacgccaaagcacaagatccggtatctgtcgcggtcgttctcacatgagctacggtgccactatgttgaaatgctgaagaagcaaaaggatgaggtcctggagcgaatcaacaaccaacatggaccgaaggcaaagaaactttgtcttcaccgcaccctgactggcccatggtagcctgctgaagcttgcacagacctcaccgaagtcgagatcgtcggcttagatgtgctcgtgtgtataccagatgatctcaagttgttctgtgacgtgggttgttgtctgtgcctgacagttcaccgtttaggttcagctgcgcaatcctcatataaacaatgaggcgtactatctaatctgttcatttaactccctcctattgccatggtgagatcatgcatgtaacttaggccttgttcgtttgtgtcagattgtacccggaatcgttccagtttatcaaagtctatataaattagagaatcaatccggttaggaatcgtttcggcccatcaatccggtacaaacgaacaaggccttaatgttgttgagataatttgacaatgagattatagctgatagctcag

SEQ ID NO: 62100 - DNA, 2112 bp, Zea Mays
aaatatttggatgtgcggattgcctcgacgcgagcggccgccgccgcctgcaccacgccgtattcgtgtgtcaaatactcttctgacaagtgacaactgacaagcaacccgccaccagcgccgttgtctacctcgactgcggcaaccttctcccgctgccttcccgcgtgatctcaacttgggcaggatgcgatataccagttgctgttggtattaaacagcacgcaccaacaatgagccttgccaatgccccgaaatccgccgccgcgctctattcctccctgctccagagctctatgggcgctaacgcgtttcggcaaggcaaatccgtgcaccaccgggccatcatcacgtcttccgcctcacctccggacctccacctgaataccaagctcgtcattttctactctcacttcggcgacgttgcggccgcacgcagggtgttcgacgggatgccgcacaggagtgtcgtgtcctggactgccatggtctctgggtacgccaagaacagccgtccccaggaggcgctggacctgtttgcgttcatgctccggtccggcgccaggccgaaccagttcacgttcgggagcgcggtgagggcatgcacgggcgcccgctgcgcgaggagcggggagcaaattcacgcgtgtgcggctaaagggaggttcgcaggcgacatgtttgtgcagagcgcgctcatggacatgcatctcagggatgctacctgatcatttcacatttggaagtgctctaaaggcatgtggagcaatcagtgtgcttttcaatgtggagctaattcacgcttgcatcatcaagcttggttattgggacgaaaacgtcgctattgcatcacttattgattcttatgcaaaatgtcggagcttaagcagtgcgagggtgatatatgattccatgtgtgaaccagacctcgtgtcatctacagcattgatcagtgggtactccatggataggaactatagtgatgatgcaatgaagcttttctgtaagattcatcgaaagggtttaagaattgatgctattctgttaagctccttgcttggtgtttgtgctaatgtagcatcaataaaatttgggacacaaattcatgcttacatgcacaagaagcaacctatgggtgatttggcattggacaacgctcttgttgacatgtatgcaaagtcaggagaatttttggattccagacgcgcttttgatgaaatgcccaacagaaatgtgatttcgtggacttcacttattacttcctgtgcacaacatggttttggagaagatgctgtgaccctttttgctaggatggaggaggatggtgtgaagccaaatgatgtgacattcctttctcttctatcagcatgcagccattctggtatgatgaacaaagggatggaatatttcacttctatgatgagcaagtatggtattgatccaagatttaagcattacagctctgctgttgaccttcttgctcgtggtggtcagttagaagatgcatggatgcttgttcaaaatacgaatactgagtgcaagtcatcaatgtatggtacaatgcttggagcttgcaaggtacatggcaacatgcctcttggagaaactgcggctaagaatcttttgagtatagatcctgagagttctgtgaactatgctgtccttgcaaacatgtatgcagaatcccatttatgggaggatgctcagagaacaagaaaattattggtggagacatccaaaggaaaagaagctggtttcagtgtcatatcaagataggtaacggtcaacaaagatattttcatctgcagaaatgaaagggaatggctatttgcctctaaaaatgatcaagattaatctgaaaccctgatcttcttttgactatggtccaagatcccagatggactttagatccaacgtacatgacagctgttgaattgaaacactgagtcactgaccttgtgaagacttaagagcttcgaccgatctgtatgcagagccacacgatgactgcaactggtgtgcagtgttctctttttctgcttactccctgttttctgggacttcatacactgtaaattgttgtaccttttcacctacttaatgcaaaggcag

SEQ ID NO: 62101 - DNA, 1858 bp, Zea Mays
ctgatgtgtttggatgcattggtggagccaaacagaaacatcacgtatagagaagaggcgatcaagaccatcatacgttctctgagatgctgcctgtcagaggacactgtcgtgcccagcactcggagagctctgctgctgctgggagggcaattcaccttctcaggcgaccttcacgtagaggactggatgctggaacatgccggcttcgtcgaccactcacgggccaccactgccacttctgatgctgttgtaaatgacaaggaagcggccgaaaacgatgcgtggctgagacacgtggccgcggcgctactcggcagccgtagcgggatcaggagaccgttcctagaggcgctgtccaggtgcctgggctcccccgacgccggcctggtgggggcgtgcctgacgatggcctggtggaggttatcagtgagaaaatagatatctgggtaaaccacctcttcagctatgattttgcattttggttttatgcaaatgttgcctatcatattattgaattgcaactatttttttgtactgattaaatactaatagtgccatgagttaacgttagtgttttgtgattttttacaggctcatgggtgtctcttgtataaaatctgcacagaatattagctgttggttatgattatggaaggtcttgtttttagctcatgaatataggtttcaaattttagttgttttttattaggaaggtcgaatataaaagtaactgattttattgtatgtacctgattaatctaaaagcattgaaataattctgctcttggctcgagtatgtatctgaggtatacagagaaatggaacgtgttggatacgctccagatagaaaggctagaaaaatgtttcatataaaattttttactaccgtcgcaacgcacgagcacatacctagatgagtctgtctgttactgcgaaaagctacatacaaattataattgtgggcacattttcattactaatagttttttgttttccttctttttttacctgaggttacaaagggtgcagggtattctccacggcagtgtgtccaatgatcctaaacaagacaatatgtatttgctctttattatcaattcatctatattgtgaaaatctgaaagaacgtggaacctgaaactattgtctggtgggctggtggctgattttcattcaattgggctggtacacctctgttttgactcccatacaccaagaatcgagggcgccagcatccgtgggagtaagactctccggctttgaaggaggagacaaaggccgaagggcagacacattgccttctgttcatgctgcttgatgttgaaacaccaaccactcaccagtcatttactctcacttgctcattggatcatgtgcaccaccatagttagaaacctttatgtcacagttagcgcaatgcattgggatttttttgctatgcacagaatacgaaggttatattatatctctatattttgaatgggagtcattgaagcctaggcaaggtacttgtatttggatctggcataattacaatcatcctgtcatcatcagtttcactcctctggctgctccttgtgtgtgtccactaatgcgttcagcattgcaactgctactgccaaatgctaaggcagcagtatacatagctggttcagtttgtgcagcatttgttgccaacatagatggtcactctgataaaactgtcaccttcaatgggaggatgctcagaaatttggtggctggtggatctgcttaagaatcaaaagtcagataaggtggacatcaccatccaaccggaggagctggaagccatgaatgatgttctagcagccaggtgacgcctgatgtctttgtt

SEQ ID NO: 62102 - DNA, 1053 bp, Zea Mays
atttttttttctatcgccgcagaccaactggcagttagaacggcagttatgggctccttggatcggcggcaggggggttgcaggcaggggtggtccctacaccgtgggaccccaccacttgcaggtcccgcagttcgttcccagggcgccggcctctcctctccagatgatggtgccccagcagcagcagcagcacggtggtgccccagcagctgctatctacccgtctcctcagtttgggtactgctggtacccgccggactttcaataccaacaggccctagccagcccgcaagcgctgcagaactactacgcccagctgtacggtctgacgacctcgccttcggcggcggcggcgccctaccaccaccagtacctcggctacatggcgccgccgcctccaacgccaaggatgatactgccaccaccaccgccgctggcggcgcagcaggtcaccgccgtgcaaccgttggtgcagcatccgccgccgccggcgcagcaggtcacggtgcagcctctgctccagcatcccccgccacagattcatgcccctttcttcccggctccctcgctcccgcagcacaacttcaggctccatccgccgccgcaagctatggcagtattgcctcccaacacaacaggcggatcgctgccacctgctgatcaggccgctgcccctgcagctcgcgcgacaaacgcgagcagtactcggccgggtgcgtgatccagagaggcttcaaggagaactcaagataaaaagcatcggattcaccataccttgaaattataactgactttttttttgggaaaaagggggtggcgaagaaaatgaagtttcagtcgatctactatggacgaggttgaggtttaagttactgatgatctgtaactgtaacagtctctcatcatgttttgtctccagaaccaaacaaaagacatttcgtttttttcttccccctttgtccgtcctccgattttttaccagtttcggcgaagctcatcgaatccattgtaaaagtgaaaggtaaaactgagaaaaaaaatacgactaac

SEQ ID NO: 62103 - DNA, 1044 bp, Zea Mays
gcctttcgctctcccttccgctagcacgagcggtggccggccgggagccgggaggtagccgacgcaagttgcaggcaggggtggtccctacaccgtgggaccccaccacttgcaggtcccgcagttcgttcccagggcgccggcctctcctctccagatgatggtgccccagcagcagcagcagcacggtggtgccccagcagctgctatctacccgtctcctcagtttgggtactgctggtacccgccggactttcaataccaacaggccctagccagcccgcaagcgctgcagaactactacgcccagctgtacggtctgacgacctcgccttcggcggcggcggcgccctaccaccaccagtacctcggctacatggcgccgccgcctccaacgccaaggatgatactgccaccaccaccgccgctggcggcgcagcaggtcaccgccgtgcaaccgttggtgcagcatccgccgccgccggcgcagcaggtcacggtgcagcctctgctccagcatcccccgccacagattcatgcccctttcttcccggctccctcgctcccgcagcacaacttcaggctccatccgccgccgcaagctatggcagtattgcctcccaacacaacaggcggatcgctgccacctgctgatcaggccgctgcccctgcagctcgcgcgacaaacgcgagcagtactcggccgggtgcgtgatccagagaggcttcaaggagaactcaagataaaaagcatcggattcaccataccttgaaattataactgactttttttttgggaaaaagggggtggcgaagaaaatgaagtttcagtcgatctactatggacgaggttgaggtttaagttactgatgatctgtaactgtaacagtctctcatcatgttttgtctccagaaccaaacaaaagacatttcgtttttttcttccccctttgtccgtcctccgattttttaccagtttcggcgaagctcatcgaatccattgtaaaagtgaaaggtaaaactgagaaaaaaaatacgactaac

SEQ ID NO: 62104 - DNA, 1627 bp, Zea Mays
atagctgtcaccccatccaaaccgtccccctccagcgcaaacccacctgatcatcagattcctcctctccaacgatcattaaggccaccttgatcacagcgtggttttatatagaagtgggctggctggaccgtttccaaaactaagagcgagcgcacggcacggcggcgtgccgcggcgcaggcacaacagcagctccctccgcgctccgccctccctgctcgcaagaccaacaccaccagcagcagcagcagcaccgcgccaacgaggcttccctccggtgtgtgtgtgcgcgcgcgctcgtgatggcagcagccccggcggcgtcgtcgtccacgtcggggtcgccggccgccggcgggccgcggtcgcggttcggcgacacgacgctgacgaaggtgttcgtgggcgggctggcgtgggagacgccctcggaggggctccggcaacacttcgagcggtacggcgacatcctggaggccgtcgtcatcacggaccgcctcaccggccgctccaagggctacggattcgtgacgttccgggagccggaggcggcgcggcgcgcggtgcaggacccgaacccgacgatcgccgggcggcgcgccaactgcaacattgcgtcgctggggccgccgcgccccacccagcctggaggcaggggtggtccctacaccgtgggaccccaccacttgcaggtcccgcagttcgttcccagggcgccggcctctcctctccagatgatggtgccccagcagcagcagcagcacggtggtgccccagcagctgctatctacccgtctcctcagtttgggtactgctggtacccgccggactttcaataccaacaggccctagccagcccgcaagcgctgcagaactactacgcccagctgtacggtctgacgacctcgccttcggcggcggcggcgccctaccaccaccagtacctcggctacatggcgccgccgcctccaacgccaaggatgatactgccaccaccaccgccgctggcggcgcagcaggtcaccgccgtgcaaccgttggtgcagcatccgccgccgccggcgcagcaggtcacggtgcagcctctgctccagcatcccccgccacagattcatgcccctttcttcccggctccctcgctcccgcagcacaacttcaggctccatccgccgccgcaagctatggcagtattgcctcccaacacaacagcaggcggatcgctgccacctgctgatcaggccgctgcccctgcagctcgcgcgacaaacgcgagcagtactcggccgggtgcgtgatccagagaggcttcaaggagaactcaagataaaaagcatcggattcaccataccttgaaattataactgactttttttttgggaaaaagggggtggcgaagaaaatgaagtttcagtcgatctactatggacgaggttgaggtttaagttactgatgatctgtaactgtaacagtctctcatcatgttttgtctccagaaccaaacaaaagacatttcgtttttttcttccccctttgtccgtcctccgattttttaccagtttcggcgaagctcatcgaatccattgtaaaagtgaaaggtaaaactgagaaaaaaaatacgactaac

SEQ ID NO: 62105 - DNA, 2402 bp, Zea Mays
gttttagttcgtagtccctcaagagatgactaaaaaggactaaaccatattaatttcatcggttgccccttattcacttccatcgtagtggtagaagaatggtaaatgacattttggtctttctacaagtcatttaatgagttctgcacactttatcgtcggaaacaaatagttaaggactaaactttagtcatgaactaaaataaccaaacagacacatagactaaccagcaggacataaagcttttctttgaattaaacaagagttccttatgcgcaggcacaatagaggaccagacagatataattgtactagtgttgtatagatatccatgagctaccacacgtcgagaactcgtgtaggagcatacaaagaggaaggaagaggaaaacaaaagggtgagcatagctgtcaccccatccaaaccgtccccctccagcgcaaacccacctgatcatcagattcctcctctccaacgatcattaaggccaccttgatcacagcgtggttttatatagaagtgggctggctggaccgtttccaaaactaagagcgagcgcacggcacggcggcgtgccgcggcgcaggcacaacagcagctccctccgcgctccgccctccctgctcgcaagaccaacaccaccagcagcagcagcagcaccgcgccaacgaggcttccctccggtgtgtgtgtgcgcgcgcgctcgtgatggcagcagccccggcggcgtcgtcgtccacgtcggggtcgccggccgccggcgggccgcggtcgcggttcggcgacacgacgctgacgaaggtgttcgtgggcgggctggcgtgggagacgccctcggaggggctccggcaacacttcgagcggtacggcgacatcctggaggccgtcgtcatcacggaccgcctcaccggccgctccaagggctacggattcgtgacgttccgggagccggaggcggcgcggcgcgcggtgcaggacccgaacccgacgatcgccgggcggcgcgccaactgcaacattgcgtcgctggggccgccgcgccccacccagcctggagttgcaggcaggggtggtccctacaccgtgggaccccaccacttgcaggtcccgcagttcgttcccagggcgccggcctctcctctccagatgatggtgccccagcagcagcagcagcacggtggtgccccagcagctgctatctacccgtctcctcagtttgggtactgctggtacccgccggactttcaataccaacaggtaagcatgcatgctccctccccccacacaccccatccttcaattcccgtctcctttgctttcttctaccttctcctcacatcacatgcataaccgccggtgcacatgcctatggctaccacctagctccaccctacatgcatgcagcgatacatttcactgctacctatttgcactgaaaacttcgactatggcaatggcatgctcggccgattatctttttcatgctgcaaaaccagatttaacattagcaatctgccatgttgttgttgttgttattgttgttgtttactcatcatgtgcgatcaactcgaggctaatttttgacaacacacgcgaatgtgcgatattaatgacgaccgaacaggccctagccagcccgcaagcgctgcagaactactacgcccagctgtacggtctgacgacctcgccttcggcggcggcggcgccctaccaccaccagtacctcggctacatggcgccgccgcctccaacgccaaggatgatactgccaccaccaccgccgctggcggcgcagcaggtcaccgccgtgcaaccgttggtgcagcatccgccgccgccggcgcagcaggtcacggtgcagcctctgctccagcatcccccgccacagattcatgcccctttcttcccggctccctcgctcccgcagcacaacttcaggctccatccgccgccgcaagctatggcagtattgcctcccaacacaacaggcggatcgctgccacctgctgatcaggccgctgcccctgcagctcgcgcgacaaacgcgagcagtactcggccgggtgcgtgatccagagaggcttcaaggagaactcaagataaaaagcatcggattcaccataccttgaaattataactgactttttttttgggaaaaagggggtggcgaagaaaatgaagtttcagtcgatctactatggacgaggttgaggtttaagttactgatgatctgtaactgtaacagtctctcatcatgttttgtctccagaaccaaacaaaagacatttcgtttttttcttccccctttgtccgtcctccgattttttaccagtttcggcgaagctcatcgaatccattgtaaaagtgaaaggtaaaactgagaaaaaaaatacgactaac

SEQ ID NO: 62106 - DNA, 2086 bp, Zea Mays
cttttaccatttggtatcacttaggggctgcttggttccagggactagaccgttttagttcgtagtccctcaagagatgactaaaaaggactaaaccatattaatttcatcggttgccccttattcacttccatcgtagtggtagaagaatggtaaatgacattttggtctttctacaagtcatttaatgagttctgcacactttatcgtcggaaacaaatagttaaggactaaactttagtcatgaactaaaataaccaaacagacacatagactaaccagcaggacataaagcttttctttgaattaaacaagagttccttatgcgcaggcacaatagaggaccagacagatataattgtactagtgttgtatagatatccatgagctaccacacgtcgagaactcgtgtaggagcatacaaagaggaaggaagaggaaaacaaaagggtgagcatagctgtcaccccatccaaaccgtccccctccagcgcaaacccacctgatcatcagattcctcctctccaacgatcattaaggccaccttgatcacagcgtggttttatatagaagtgggctggctggaccgtttccaaaactaagagcgagcgcacggcacggcggcgtgccgcggcgcaggcacaacagcagctccctccgcgctccgccctccctgctcgcaagaccaacaccaccagcagcagcagcagcaccgcgccaacgaggcttccctccggtgtgtgtgtgcgcgcgcgctcgtgatggcagcagccccggcggcgtcgtcgtccacgtcggggtcgccggccgccggcgggccgcggtcgcggttcggcgacacgacgctgacgaaggtgttcgtgggcgggctggcgtgggagacgccctcggaggggctccggcaacacttcgagcggtacggcgacatcctggaggccgtcgtcatcacggaccgcctcaccggccgctccaagggctacggattcgtgacgttccgggagccggaggcggcgcggcgcgcggtgcaggacccgaacccgacgatcgccgggcggcgcgccaactgcaacattgcgtcgctggggccgccgcgccccacccagcctggagttgcaggcaggggtggtccctacaccgtgggaccccaccacttgcaggtcccgcagttcgttcccagggcgccggcctctcctctccagatgatggtgccccagcagcagcagcagcacggtggtgccccagcagctgctatctacccgtctcctcagtttgggtactgctggtacccgccggactttcaataccaacaggccctagccagcccgcaagcgctgcagaactactacgcccagctgtacggtctgacgacctcgccttcggcggcggcggcgccctaccaccaccagtacctcggctacatggcgccgccgcctccaacgccaaggatgatactgccaccaccaccgccgctggcggcgcagcaggtcaccgccgtgcaaccgttggtgcagcatccgccgccgccggcgcagcaggtcacggtgcagcctctgctccagcatcccccgccacagattcatgcccctttcttcccggctccctcgctcccgcagcacaacttcaggctccatccgccgccgcaagctatggcagtattgcctcccaacacaacaggcggatcgctgccacctgctgatcaggccgctgcccctgcagctcgcgcgacaaacgcgagcagtactcggccgggtgcgtgatccagagaggcttcaaggagaactcaagataaaaagcatcggattcaccataccttgaaattataactgactttttttttgggaaaaagggggtggcgaagaaaatgaagtttcagtcgatctactatggacgaggttgaggtttaagttactgatgatctgtaactgtaacagtctctcatcatgttttgtctccagaaccaaacaaaagacatttcgtttttttcttccccctttgtccgtcctccgattttttaccagtttcggcgaagctcatcgaatccattgtaaaagtgaaaggtaaaactgagaaaaaaaatacgactaac

SEQ ID NO: 62107 - DNA, 854 bp, Zea Mays
cccgacctgatccacgggggaggacagtgctttggtctagggcctcatagggtcgggaagggcttccccgcgtcccctcccgtgcaagccgccgcctcctcctctcgttcgtgaagcctcctctccctcgcgcacggtactgccacccaccacctccacctcgcactcgcgcacccaccgtcgcccgccaccccgctcttcctcaccccctcctctgcctcgcgcaaagcacaccctactacaggcggcaggaccgcacaacttgccccagatccgaaacggtctcctgtctcctcaactcacgcatgacgacctcctcagctcccccatccgcatctcgcgaaggtacgcctatgcactcgcacaagggggtagtgctggcagctgaccgcctggccgtaaccagacggcgctctgcacgatctgtccctagttggtgtggtagctagtgtacctcagcatggaattgggagcaggtttctcttccaattccactgcgaaattgagattctaggctcttggtgtggaagatcaaggtgatggaggtggtccaacaacagtttctaacccaagtggacctcacagctttggtagctgagcacgcagcggatgggcggacgttgttgtttcgccacatggaggagacgggccgggcggtggctaaactgcgaccggaggagatggggaaggcgctgggggagtcgtcggaggattctgatggcaaagagagtaatcgctctcattgttgagttccgtggcatccaggaggacaagaggagcaccatcggtggggaatcaccaaggtggttcaacagatggtgctagaatcacgtatgtccgcaatgggatcacgc

SEQ ID NO: 62108 - DNA, 524 bp, Zea Mays
gtgctttggtctagggcctcatagggtcgggaagggcttccccgcgtcccctcccgtgcaagccgccgcctcctcctctcgttcgtgaagcctcctctccctcgcgcacggtactgccacccaccacctccacctcgcactcgcgcacccaccgtcgcccgccaccccgctcttcctcaccccctcctctgcctcgcgcaaagcacaccctactacaggcggcaggaccgcacaacttgccccagatccgaaacggtctcctgtctcctcaactcacgcatgacgacctcctcagctcccccatccgcatctcgcgaagctttggtagctgagcacgcagcggatgggcggacgttgttgtttcgccacatggaggagacgggccgggcggtggctaaactgcgaccggaggagatggggaaggcgctgggggagtcgtcggaggattctgatggcaaagagagtaatcgctctcattgttgagttccgtggcatccaggaggacaagaggagcaccatcggtg

SEQ ID NO: 62109 - DNA, 10817 bp, Zea Mays
ctaaggccttgggagttcggtcccgggagctcctccccatcgaaaataagcggaagcgcgtcccgcagcttctccgtgctagctgtaacggacgcgcgctgcctgtctgtgcatgggcgccgccctccccgctggatctgcagccacccccactccccgtcgcgccgattccatgagaggttgacaactgggcactgacgaagtggatactctgctctgctctgctctgctcgacgagttttaacatctgagtatggctgcggcgttggcgtggcggttcaatggcaccaatggtggcgcccatggcagcgcagatctggaaagacacacggacaaagttcaagactcagagccacaaactcctatgtcaatcgtgaaaatgggcaagaaccgagttaatgtggaggacgaggagacactttcaagcgttgctcaatgtattgagcaactacgacagagttcttcatcctcacaggagaaagagagctctttgaagcagttattagatcttgttcaaactcgtgatactgcattcggagctgttgggtcacattcacaggctgttccgatacttgtatctctccttaggtctggaccatctggagttaagatgctggctgccactgttcttgggtctctttgcaaggaagaggagttaagggtgaaagtcttacttggtggttgcatacctccattgcttgctcttctcagatcgaagtcagctgaaagccaaactgcagctgccaaaaccatatatgcagtttcacagggtgggataagggatcatgttggatcaaagattttctctacggaaaatgttgttcctgtactgtgggagcaacttaaaattagtctcaagaatgagagtttggtggatggccttctaactggagcactgaagaatttatcaaagaatacagaggggttttggtcagcaactgtgcaatgtggtggagttgatatacttataaagctggttagttctggacaaacaaatactcttgcaaacacttgctatcttcttgggtctttgatgatggaagactcttctgtttgttctaaagttttatctggagaaacaacaaagcagctcttaaagttacttggtcctggcaatgagacttctattagagctgaggctgctggggctctcaagttcctttctgcacagagtaaagaggccagacgtcagatagctaattctaacggtattccttctcttataaatgctactattgctccatcaaaagagttcatgcaaggtgaatctgctcaagcattgcaagagaatgcaatgtgtgcattagcaaatatatctggtggtctttcctacgtaatctcaagccttggtgagagtctcgagtcatgttcttcacctgcacagattgcagatactcttggtgcattggcctcagccttgatgatatatgacacaaatgcggaatctatcagtgcttctaatcctgttgacattgagaagacacttttgaagcagtttaagcctaaggttccttttcttgtgcaggagcgcataattgaagctttggctagcttgtatggtaacccggttctctgcaagacactagcagattctgatgcaaaacgcttacttgttggtttaataaccatggcagctactgaggtacaagatgacctcacgaaatcactttttgctctctgcaagaaggattgtgatctatggcaagctctgcaaggccgtgaaggtgtccagctattgatttctttacttggtctttcatcagaacagcagcaggagtgtgctgttgctctacttgcgcttctttcaaaggagaatgatgagagcaaatgggctatcactgctgctggtggcatacctccacttgtgcaaattttggaaactggatcttccaaagctaaagaagattcagcaaccatccttggcaatttatgcaatcacagtgaagacataagagcatgtgttcaaagtgctgatgctgttcctgctttactatggcttctgaaaaatggaagtgataatggcaaggagatagcttctaaaacactgaatcatctcatccacaaatcagatactggaactatcagtcagttatctgctcttttaactagtgatcagcctgagtcaaaagtttatgttctggatgctttgaaaagcttgctttctgttgcaccacttaatgatattctacatgagggaagtgcagcgaatgatgcggttgagacaatgattaaaattctaagctcacccaaggaagagactcaggctacatcagcaactgctcttgctggtctatttcattgccgcaaggacctgcgagaaactcatattgcagtgaagacactttggtcagtcatgaagctgcttgatatgcagtctaacaaaatactaacgggggcctcatgttgccttgctgccgtttttctttcgatcaaggaaaataaagaggttgctgcaattggccgggatgccttaaacccacttgtctcacttgcaaattcttcagttatagaagtggcagaacaagcgactagagctttggcaaatcttttccttgatcaggaattgtccctccaggtgccttttgaagaaattctcttccgtgtaacacgtgtactaagagagggaactattgatggaagaactcatgcagccgcagcaatagctcgtcttttacagtgccgaactattaatcagccactttcagatactgttaaccgctctgggtctgtccttgctctagctgggctcttggaagctgcaaatggtgaagctgctgcaacatcagaagttcttgatgcactggtgctgttgtcgcgatcaaaggcgtcaagtgggcacaccaaggctccctgggcaattcttgcagaaaacccccacacaatacttccccttgtttcatgtattgctgatgctgctgcctccttacaagataaagctatagaagttgtgtcaaggctctgttccgacctacatgatgttgtcggtggtctggtttctgaaactccaggttgcatgtcatccatcacacggcgcatcattggctccaacattcttaaagttaaagttggtggttgtgctcttctcgtctgtgctgcaaaagagtattgtcagaagcaaatagaggttctgaatgatgcaagtctgtatattcaactaattcattctttaattggtatgatccatatggcaaacacgcaagctgaaaatgtcagcagtgaaagcatatcagatattagaatttccagacactccaaagaaaacaacagtgatggtgaaactctgtgctgtactgctgtcatctcaggcaacatgattccactatggctacttgctatcttttctcgtcatgacagcaaaacaagagcagaactcctggaaatgggagcagttgaaatgctcatcgagaagatttcacaaaatgcattccaatatgtgaggtctttaataggtgataagatgatggtgtttgttgggttgggtcatggtttgatggtgaagaagataacacctcatgggtcagatgagccagcatacaggtactttgcggcacaagctttgtcaagtctggtctgcaatggtagcagaggaactcttctggctgttgcgaattctggggcagccattggacttatatctttgcttggatgtgctgatgttgatatagctgatcttttggaattatcagaggaattcatgttggtgcctaaccctgatcaaattgcattagagaggctattcagagttgatgatatcagggttggtgcaacttctagaaaatctattcctcttcttgttgatctacttaaacccattcctgaaagacctggtgctcctttcttggccttgggtcttctgacccagttagccgttgattgccccccaaacatgctgctaatggctgaagctggaatcctagaagcacttaccaaatacttatctcttagtccacaagatgcaacagaagaagctacaactgaattgctgggcattcttttcagtagtccagaaataaggcaccatgaatcagcacttggtgttgttaaccaacttgtggcagtccttcgtctaggaggaaggaattcacgttatagtgccgcgaaggcattagagagtttattttgtgctgaccatgtgaggaacagtgagtcaactaggcaggctatccaaccgcttgtggagattctgagtactggcatggagagggagcagcatgcagctatatcagcccttgttaggcttctttctgacaatccttcaagagcacttgcggttgcggatgttgagatgaatgctgtggatgttatgtgccggattctttcttctgattgttcagtggagttgaaaggaaatgctgcggaactatgctgtgttctatttaccaacacaaggatccgttccacaatggcagcagctcgttgtgtggaacccctggttggtttactggttagtgaagctaaccctgcccagctttctgtggttcgtgcattggataggcttctagatgatgagcaactagcagaattagtggcagcaaatggagctgtcattcctcttgtggggcttttgtatggcaaaaactacatgcttcatgaggcagttgctagagctttggtgaaacttggaaaggacagaccagcttgcaaattggaaatggtcaaggctggtgtaattgagagcattcttgatattctccatgacgctccagattttctttgcattgcattggcagaaatgcttcggattttgacaaacaatgctaccatagcaaaaggtccatcctcagccaaagtagtacaacctcttttctctttgctttccaaggcggacatgggtcctgaagggcagtatagcacattgcaggttcttgtgaatattttggagcatcctgaatgccgtgctgattataacttgacacctcgccaaactattgagccagtgataaccttactgaattcatctccaccagctgtacagcaattagctgcagaactcctatcacatcttcttctagaagaccacctccaaaaggacacagtaacagagcaggcgattactcctcttattcaagttctttcttcaggtttgccaaatttacagcagagagctataaaagctctagctaaccttgcaatagcttggccaaatacgattgccaaggagggtggtgtttttgagttgtctaaagtgttgttgcaatctgacccgcctttgccgcatgttgtgtgggaatctgcagcatctgtattgtctagcattctacagtacagtactgagtttttccttgaggtacctgttgcagtactagtgcaattgctcaggtcaggaactgaaagcactgttgtcggtgctttgaatgcccttcttgtattggagagtgatgactcaacaagtgcagaagcaatggctgaaagtggtgctgtggaagcattgcttgatctcctgaggagtcatcagtgtgaggaaactgctgccagactaattgaggcattgctgaacaatgtaagaataagggaggcaaaggctgctaaaaatgctattgcaccattgtccatgtaccttctggatccacagacacaatctcaacagggaagattgcttgctgctcttgctcttggtgatcttttccaaaacgaaggtcttgctcgttctactgatgctgttgcagcatgccgcgctctagtcaatcttcttgaagatcaaccaactgaagagatgaaagtggtagcaatatgtgccttgcagaatctagtcatgtacagccgagcaaataagagagcagttgcagaatccggtggtgtccaggtcctgctggatcttatcagttcaagcaatcctgacacttctgttcaggcagcaatgtttgtcaaacttctattcaataatcacactatccaggaatatgcgaccagtgaaacagtcagagttataactggtaaacaatatccctttcttgttctgtcatattcatttgcatagcaaattcatatttgtcaatgcctgtcatagttcttaaggcggtaaggcgaggcacggcgagtgacccctgcctggacgcctaggcggacacctaggcgagcaaggcgacgacttatggatgtgtgcagcagtgaggaaatcaaaagaaataagaaataaaaggagaaaaaagcaaagaagagggaaagagaggctcctggcccagcccaatacatgccctcccgaaccctctcccccatcctagtctctcatcagctccgccgtttgcccactctcccctcgcgccgacgacccgccctcgctccttcgcccgacgctgcctctggaccctcgcgccgtcgccagtccctcgctcctccgcccgacgccgccgtaggccacgcgggacaccactgtcggacccgcgcgccgtctccagcccctcgcgctgccgaagttcttcgctcccctttgccccgcgctcgcgtgctcgtgccgccgacgctccaccggcgccggatctgccttaccctctttcttcttcccttccctctcccattttgctgtggttttggcaaggcgacaaccgacaccatagattttttggcgcctggacgcctaggcgacgccttaagaaccatgatgcctgtcatgctaaagatgtcaatgtccacctctagtatgagatttaaggaatttctaagtggtaatgccttctctaacaaggtatcacgagtgtaatctcacttttgctccttccctggttgccgccaatctagggccaccacctcccttgtgctgcgttgccgcaacaacgcacacatctcctttaccatggcaggtacctcatcgactgccgtggagcgtggccacatcgaggaggttgtggcctttcgcaagaagattgacgacatgctcaccatggctcaagctacgaacaaggaggctaccaacacacatcctcatctccagacagccacccttctcgaacaggagaaggccgtcgctgcctggtagggtttgggctatagcactccacagccgtcggcccccaccctagggcattccccacaggacgaccctactgcatcttatgaggttgccatcgtcgccaaccatgtctaggcagctgttggtcccgacttcgtatcgttggtgatggtcgttctcgcgtcctctgacaattactcctgttggtgtgatcaagtgttgcttgtgctcaagctgtacgccttgtcgaccacatcttatttgtccctcagacaacggttcattctgggatcgaatggacaacatcgtcatctgctggatcttcggcaccatctccgctgaattgctagggagctgcaatggcatgacacgccacctctgactcgtttttgagaatcagtcgagaatcatgagactcgcaccctctagttcgacgctaccttctgcacctcgtccagggtgacctacccgtcgatgactactgttgcaagttgaaggggacgactgactccttggttgacctgggcactctgtcaacgactagatccttgtcctcaaggcctaaataagaagtttgagcacatcagggctatcatccgacgctactctcccttcccgtccttcctcaaggtcgacccagatgatcttgttctagaggagctcaacatgattgccactgccctgttgttgctccgacgaccttcatcgccactccttcaccgatcaccctcatgccatttgccccaacttcttcctctactttggcacgctcctccgaaaattaaaggcaacccactctcacctcagcatctggcaagaagaaagggcatggtcgggcaatgcaatcttctacaacccatggatgggcaacatcaccatgtggcctagccctgctcctcatggacagcagcaacaatagcgctaggctaggccatgatggtgatgtctggattgtttgagcaacatagcatcctcagcttcgaacccttgtaggctctagcattcctatcctagcataggcccccagtctactaagctggattccatggcccggcagctgggatcagtagactcttgctagctcgtttagcactatggctctgaattcacatgctgcggttatcagctgggtttggaccttagtactgcaaaggttgaataatattgtgaggccgccggatcctaacaatcgcctaaattcttggtggtgtagagttgttagctccctacctaaggtgatgcagaaataatttaactccctagtgattctagttacttgggagctatggaagcatcaaaatgcttgcattttttagaatgtgatgcacagatggtggtttggactgtaattgatgaagggctttttagaatgtgatgcacggatgaccctaggaggtcatggccgtgtattgtattttgtgagagtgggtgttgtatttttttggccttgggggactcttttctcccatggcctccctatttgctttttaatgaaatgatgtgcacctctcctgcgtggttcgagaaaaaaactaggtggccaacttcggtgcctccaaccacaccaccatcaacactgataacatccccctctacacactgcctcctagggtctcctgcctcctgtgccatgtctattgttgttgtgtctacctagcatcagtgtcttggccaccttggctctgatgtgctgtctagtttgtctattgcttcaactatctcgtgtaataaaagcgggcatgatctttgtcatgcctgtcagctaggaaaacatacccatttacctttctctagttcctccagttgagcttccaagttgtttgagttggttcattatgatttgtggacgtatcatgttgttagcgtgtctagttacaaatactacttagtcattcttgatgatttttctcattacttatggacctttcctctgcatttaaaatttgacacattcactactttgtcccactttttctcatatgtttctagtgtgacaatgggcattagtttgataatgcttccattcggtcctttctcctttgtcctttcccatggcacttcgcttcgaatgttgtgcctctacaactcttagtagaatggtaaagtcggccatatttttatttgttctagtcattttcactctgcgttttcaagcttctgctccagcacgatactgggttgaaggcattgacattgtgacatacttgttgaattgtctcccccacaaagaccatcaacgccttttgctcccacggtgccttgttcggcactcccccttcctacaaacaccttcacatttttggttgtgcctgctatcccaacctttccgctgttgttccccacaaacttgcacgtcgttccactaattgtcttccttggatactcttctgaccataagggggatgttggtgccttgatctctctttccattgcatcattgtctcctgtcatgtgtttgacaaggcaactaaccttgtttttttatttaagtcaggttctttggcaccattgggaccccaccctttgcaggttcatctctgtcggcacccttgatgcctatgcccctggtcctgcctgacttctagctttgtgcggccatgatgccatgctctcctgcgccacacatagccatggcaccaccctctctcgtgccatacgcggcctcagagaccatcatctacacgtgtcgcccatgctggctcggacaactacctccctcgtcggtgttgagctcgtcaccccgcctgtcaatcaccaccctatggccacaccggccatcacgactttcgagagctcatgaaccggttgattcccattgcgacgtcctcatcgcccttgtctcctgtcctgatgtccatccacaatgcccttgtcgatcctcatttgcgttggtatgacgaacgacatcttagacttagtgccttttccacctagttccaatgttatcaccggaaagtggatcttcaagcacaagtttcatgccgatgggttcctggagtgctacaaggcttgttgtattctttgtcgcttcacctagcggcctggaatggcctacgatggcactttcactccagtggtcataccggtgattgcccacatggtcctctcgctagttctctcttgaggctggctggtacatcaactcgacgtcaagaatgacttctgagagcacctagaggggggggggtgaataggtgatcctgtatacttcaaaacttaagccacaaaactttaattaagtgttagcacagttaatgccaagtggctagagagaagatcttgcacaatatgataatcacaaggagttcaacacagagtagacacagtgatttatcccgtggttcggccaagtacaaaacttgcctactccacgttgtggcgtcccaacggacgagagttgcactcaactcctctcaagtgatccaatgatcaacttgaataccacagtgttatgcttttcctttcaatttcccgtttgcaggaatctccacaacttggagtctctcgcccttacacttgagattcacaaagaaatacggagtaagggagggaagcaacacacacaaatccacagcaaaatgcgcacacacacggccaagaatcgagctcaaaagactatctcaaagttctcactagaacggagctcgaatcacttagaataacaaacggatgcgcaaagactgagtgtggatgatcaagaatgctcaaaggttgcttagtctcctcctccatgcgcctaggggtcccttttatagccccaaggcagctaggagccgttgagaacaaatctggaaggccatctttgccttctgtcgtcgggcgcaccggacagtccggtgcacaccggacactgtccggtgcccgatttctt

SEQ ID NO: 62110 - DNA, 10890 bp, Zea Mays
gtgggattggatgggtttcaatcccaaacaagtcaaaatcttttacaattttttccaatcccatccaatccacatgggataggaataaccgaacaagcccttaggggcgcgcggaaattaccggagttactaaggccttgggagttcggtcccgggagctcctccccatcgaaaataagcggaagcgcgtcccgcagcttctccgtgctagctgtaacggacgcgcgctgcctgtctgtgcatgggcgccgccctccccgctggatctgcagccacccccactccccgtcgcgccgattccatgagaggttgacaactgggcactgacgaagtggatactctgctctgctctgctctgctcgacgagttttaacatctgagtatggctgcggcgttggcgtggcggttcaatggcaccaatggtggcgcccatggcagcgcagatctggaaagacacacggacaaagttcaagactcagagccacaaactcctatgtcaatcgtgaaaatgggcaagaaccgagttaatgtggaggacgaggagacactttcaagcgttgctcaatgtattgagcaactacgacagagttcttcatcctcacaggagaaagagagctctttgaagcagttattagatcttgttcaaactcgtgatactgcattcggagctgttgggtcacattcacaggctgttccgatacttgtatctctccttaggtctggaccatctggagttaagatgctggctgccactgttcttgggtctctttgcaaggaagaggagttaagggtgaaagtcttacttggtggttgcatacctccattgcttgctcttctcagatcgaagtcagctgaaagccaaactgcagctgccaaaaccatatatgcagtttcacagggtgggataagggatcatgttggatcaaagattttctctacggaaaatgttgttcctgtactgtgggagcaacttaaaattagtctcaagaatgagagtttggtggatggccttctaactggagcactgaagaatttatcaaagaatacagaggggttttggtcagcaactgtgcaatgtggtggagttgatatacttataaagctggttagttctggacaaacaaatactcttgcaaacacttgctatcttcttgggtctttgatgatggaagactcttctgtttgttctaaagttttatctggagaaacaacaaagcagctcttaaagttacttggtcctggcaatgagacttctattagagctgaggctgctggggctctcaagttcctttctgcacagagtaaagaggccagacgtcagatagctaattctaacggtattccttctcttataaatgctactattgctccatcaaaagagttcatgcaaggtgaatctgctcaagcattgcaagagaatgcaatgtgtgcattagcaaatatatctggtggtctttcctacgtaatctcaagccttggtgagagtctcgagtcatgttcttcacctgcacagattgcagatactcttggtgcattggcctcagccttgatgatatatgacacaaatgcggaatctatcagtgcttctaatcctgttgacattgagaagacacttttgaagcagtttaagcctaaggttccttttcttgtgcaggagcgcataattgaagctttggctagcttgtatggtaacccggttctctgcaagacactagcagattctgatgcaaaacgcttacttgttggtttaataaccatggcagctactgaggtacaagatgacctcacgaaatcactttttgctctctgcaagaaggattgtgatctatggcaagctctgcaaggccgtgaaggtgtccagctattgatttctttacttggtctttcatcagaacagcagcaggagtgtgctgttgctctacttgcgcttctttcaaaggagaatgatgagagcaaatgggctatcactgctgctggtggcatacctccacttgtgcaaattttggaaactggatcttccaaagctaaagaagattcagcaaccatccttggcaatttatgcaatcacagtgaagacataagagcatgtgttcaaagtgctgatgctgttcctgctttactatggcttctgaaaaatggaagtgataatggcaaggagatagcttctaaaacactgaatcatctcatccacaaatcagatactggaactatcagtcagttatctgctcttttaactagtgatcagcctgagtcaaaagtttatgttctggatgctttgaaaagcttgctttctgttgcaccacttaatgatattctacatgagggaagtgcagcgaatgatgcggttgagacaatgattaaaattctaagctcacccaaggaagagactcaggctacatcagcaactgctcttgctggtctatttcattgccgcaaggacctgcgagaaactcatattgcagtgaagacactttggtcagtcatgaagctgcttgatatgcagtctaacaaaatactaacgggggcctcatgttgccttgctgccgtttttctttcgatcaaggaaaataaagaggttgctgcaattggccgggatgccttaaacccacttgtctcacttgcaaattcttcagttatagaagtggcagaacaagcgactagagctttggcaaatcttttccttgatcaggaattgtccctccaggtgccttttgaagaaattctcttccgtgtaacacgtgtactaagagagggaactattgatggaagaactcatgcagccgcagcaatagctcgtcttttacagtgccgaactattaatcagccactttcagatactgttaaccgctctgggtctgtccttgctctagctgggctcttggaagctgcaaatggtgaagctgctgcaacatcagaagttcttgatgcactggtgctgttgtcgcgatcaaaggcgtcaagtgggcacaccaaggctccctgggcaattcttgcagaaaacccccacacaatacttccccttgtttcatgtattgctgatgctgctgcctccttacaagataaagctatagaagttgtgtcaaggctctgttccgacctacatgatgttgtcggtggtctggtttctgaaactccaggttgcatgtcatccatcacacggcgcatcattggctccaacattcttaaagttaaagttggtggttgtgctcttctcgtctgtgctgcaaaagagtattgtcagaagcaaatagaggttctgaatgatgcaagtctgtatattcaactaattcattctttaattggtatgatccatatggcaaacacgcaagctgaaaatgtcagcagtgaaagcatatcagatattagaatttccagacactccaaagaaaacaacagtgatggtgaaactctgtgctgtactgctgtcatctcaggcaacatgattccactatggctacttgctatcttttctcgtcatgacagcaaaacaagagcagaactcctggaaatgggagcagttgaaatgctcatcgagaagatttcacaaaatgcattccaatatgtgggtgaagaagataacacctcatgggtcagatgagccagcatacaggtactttgcggcacaagctttgtcaagtctggtctgcaatggtagcagaggaactcttctggctgttgcgaattctggggcagccattggacttatatctttgcttggatgtgctgatgttgatatagctgatcttttggaattatcagaggaattcatgttggtgcctaaccctgatcaaattgcattagagaggctattcagagttgatgatatcagggttggtgcaacttctagaaaatctattcctcttcttgttgatctacttaaacccattcctgaaagacctggtgctcctttcttggccttgggtcttctgacccagttagccgttgattgccccccaaacatgctgctaatggctgaagctggaatcctagaagcacttaccaaatacttatctcttagtccacaagatgcaacagaagaagctacaactgaattgctgggcattcttttcagtagtccagaaataaggcaccatgaatcagcacttggtgttgttaaccaacttgtggcagtccttcgtctaggaggaaggaattcacgttatagtgccgcgaaggcattagagagtttattttgtgctgaccatgtgaggaacagtgagtcaactaggcaggctatccaaccgcttgtggagattctgagtactggcatggagagggagcagcatgcagctatatcagcccttgttaggcttctttctgacaatccttcaagagcacttgcggttgcggatgttgagatgaatgctgtggatgttatgtgccggattctttcttctgattgttcagtggagttgaaaggaaatgctgcggaactatgctgtgttctatttaccaacacaaggatccgttccacaatggcagcagctcgttgtgtggaacccctggttggtttactggttagtgaagctaaccctgcccagctttctgtggttcgtgcattggataggcttctagatgatgagcaactagcagaattagtggcagcaaatggagctgtcattcctcttgtggggcttttgtatggcaaaaactacatgcttcatgaggcagttgctagagctttggtgaaacttggaaaggacagaccagcttgcaaattggaaatggtcaaggctggtgtaattgagagcattcttgatattctccatgacgctccagattttctttgcattgcattggcagaaatgcttcggattttgacaaacaatgctaccatagcaaaaggtccatcctcagccaaagtagtacaacctcttttctctttgctttccaaggcggacatgggtcctgaagggcagtatagcacattgcaggttcttgtgaatattttggagcatcctgaatgccgtgctgattataacttgacacctcgccaaactattgagccagtgataaccttactgaattcatctccaccagctgtacagcaattagctgcagaactcctatcacatcttcttctagaagaccacctccaaaaggacacagtaacagagcaggcgattactcctcttattcaagttctttcttcaggtttgccaaatttacagcagagagctataaaagctctagctaaccttgcaatagcttggccaaatacgattgccaaggagggtggtgtttttgagttgtctaaagtgttgttgcaatctgacccgcctttgccgcatgttgtgtgggaatctgcagcatctgtattgtctagcattctacagtacagtactgagtttttccttgaggtacctgttgcagtactagtgcaattgctcaggtcaggaactgaaagcactgttgtcggtgctttgaatgcccttcttgtattggagagtgatgactcaacaagtgcagaagcaatggctgaaagtggtgctgtggaagcattgcttgatctcctgaggagtcatcagtgtgaggaaactgctgccagactaattgaggcattgctgaacaatgtaagaataagggaggcaaaggctgctaaaaatgctattgcaccattgtccatgtaccttctggatccacagacacaatctcaacagggaagattgcttgctgctcttgctcttggtgatcttttccaaaacgaaggtcttgctcgttctactgatgctgttgcagcatgccgcgctctagtcaatcttcttgaagatcaaccaactgaagagatgaaagtggtagcaatatgtgccttgcagaatctagtcatgtacagccgagcaaataagagagcagttgcagaatccggtggtgtccaggtcctgctggatcttatcagttcaagcaatcctgacacttctgttcaggcagcaatgtttgtcaaacttctattcaataatcacactatccaggaatatgcgaccagtgaaacagtcagagttataactggtaaacaatatccctttcttgttctgtcatattcatttgcatagcaaattcatatttgtcaatgcctgtcatagttcttaaggcggtaaggcgaggcacggcgagtgacccctgcctggacgcctaggcggacacctaggcgagcaaggcgacgacttatggatgtgtgcagcagtgaggaaatcaaaagaaataagaaataaaaggagaaaaaagcaaagaagagggaaagagaggctcctggcccagcccaatacatgccctcccgaaccctctcccccatcctagtctctcatcagctccgccgtttgcccactctcccctcgcgccgacgacccgccctcgctccttcgcccgacgctgcctctggaccctcgcgccgtcgccagtccctcgctcctccgcccgacgccgccgtaggccacgcgggacaccactgtcggacccgcgcgccgtctccagcccctcgcgctgccgaagttcttcgctcccctttgccccgcgctcgcgtgctcgtgccgccgacgctccaccggcgccggatctgccttaccctctttcttcttcccttccctctcccattttgctgtggttttggcaaggcgacaaccgacaccatagattttttggcgcctggacgcctaggcgacgccttaagaaccatgatgcctgtcatgctaaagatgtcaatgtccacctctagtatgagatttaaggaatttctaagtggtaatgccttctctaacaaggtatcacgagtgtaatctcacttttgctccttccctggttgccgccaatctagggccaccacctcccttgtgctgcgttgccgcaacaacgcacacatctcctttaccatggcaggtacctcatcgactgccgtggagcgtggccacatcgaggaggttgtggcctttcgcaagaagattgacgacatgctcaccatggctcaagctacgaacaaggaggctaccaacacacatcctcatctccagacagccacccttctcgaacaggagaaggccgtcgctgcctggtagggtttgggctatagcactccacagccgtcggcccccaccctagggcattccccacaggacgaccctactgcatcttatgaggttgccatcgtcgccaaccatgtctaggcagctgttggtcccgacttcgtatcgttggtgatggtcgttctcgcgtcctctgacaattactcctgttggtgtgatcaagtgttgcttgtgctcaagctgtacgccttgtcgaccacatcttatttgtccctcagacaacggttcattctgggatcgaatggacaacatcgtcatctgctggatcttcggcaccatctccgctgaattgctagggagctgcaatggcatgacacgccacctctgactcgtttttgagaatcagtcgagaatcatgagactcgcaccctctagttcgacgctaccttctgcacctcgtccagggtgacctacccgtcgatgactactgttgcaagttgaaggggacgactgactccttggttgacctgggcactctgtcaacgactagatccttgtcctcaaggcctaaataagaagtttgagcacatcagggctatcatccgacgctactctcccttcccgtccttcctcaaggtcgacccagatgatcttgttctagaggagctcaacatgattgccactgccctgttgttgctccgacgaccttcatcgccactccttcaccgatcaccctcatgccatttgccccaacttcttcctctactttggcacgctcctccgaaaattaaaggcaacccactctcacctcagcatctggcaagaagaaagggcatggtcgggcaatgcaatcttctacaacccatggatgggcaacatcaccatgtggcctagccctgctcctcatggacagcagcaacaatagcgctaggctaggccatgatggtgatgtctggattgtttgagcaacatagcatcctcagcttcgaacccttgtaggctctagcattcctatcctagcataggcccccagtctactaagctggattccatggcccggcagctgggatcagtagactcttgctagctcgtttagcactatggctctgaattcacatgctgcggttatcagctgggtttggaccttagtactgcaaaggttgaataatattgtgaggccgccggatcctaacaatcgcctaaattcttggtggtgtagagttgttagctccctacctaaggtgatgcagaaataatttaactccctagtgattctagttacttgggagctatggaagcatcaaaatgcttgcattttttagaatgtgatgcacagatggtggtttggactgtaattgatgaagggctttttagaatgtgatgcacggatgaccctaggaggtcatggccgtgtattgtattttgtgagagtgggtgttgtatttttttggccttgggggactcttttctcccatggcctccctatttgctttttaatgaaatgatgtgcacctctcctgcgtggttcgagaaaaaaactaggtggccaacttcggtgcctccaaccacaccaccatcaacactgataacatccccctctacacactgcctcctagggtctcctgcctcctgtgccatgtctattgttgttgtgtctacctagcatcagtgtcttggccaccttggctctgatgtgctgtctagtttgtctattgcttcaactatctcgtgtaataaaagcgggcatgatctttgtcatgcctgtcagctaggaaaacatacccatttacctttctctagttcctccagttgagcttccaagttgtttgagttggttcattatgatttgtggacgtatcatgttgttagcgtgtctagttacaaatactacttagtcattcttgatgatttttctcattacttatggacctttcctctgcatttaaaatttgacacattcactactttgtcccactttttctcatatgtttctagtgtgacaatgggcattagtttgataatgcttccattcggtcctttctcctttgtcctttcccatggcacttcgcttcgaatgttgtgcctctacaactcttagtagaatggtaaagtcggccatatttttatttgttctagtcattttcactctgcgttttcaagcttctgctccagcacgatactgggttgaaggcattgacattgtgacatacttgttgaattgtctcccccacaaagaccatcaacgccttttgctcccacggtgccttgttcggcactcccccttcctacaaacaccttcacatttttggttgtgcctgctatcccaacctttccgctgttgttccccacaaacttgcacgtcgttccactaattgtcttccttggatactcttctgaccataagggggatgttggtgccttgatctctctttccattgcatcattgtctcctgtcatgtgtttgacaaggcaactaaccttgtttttttatttaagtcaggttctttggcaccattgggaccccaccctttgcaggttcatctctgtcggcacccttgatgcctatgcccctggtcctgcctgacttctagctttgtgcggccatgatgccatgctctcctgcgccacacatagccatggcaccaccctctctcgtgccatacgcggcctcagagaccatcatctacacgtgtcgcccatgctggctcggacaactacctccctcgtcggtgttgagctcgtcaccccgcctgtcaatcaccaccctatggccacaccggccatcacgactttcgagagctcatgaaccggttgattcccattgcgacgtcctcatcgcccttgtctcctgtcctgatgtccatccacaatgcccttgtcgatcctcatttgcgttggtatgacgaacgacatcttagacttagtgccttttccacctagttccaatgttatcaccggaaagtggatcttcaagcacaagtttcatgccgatgggttcctggagtgctacaaggcttgttgtattctttgtcgcttcacctagcggcctggaatggcctacgatggcactttcactccagtggtcataccggtgattgcccacatggtcctctcgctagttctctcttgaggctggctggtacatcaactcgacgtcaagaatgacttctgagagcacctagaggggggggggtgaataggtgatcctgtatacttcaaaacttaagccacaaaactttaattaagtgttagcacagttaatgccaagtggctagagagaagatcttgcacaatatgataatcacaaggagttcaacacagagtagacacagtgatttatcccgtggttcggccaagtacaaaacttgcctactccacgttgtggcgtcccaacggacgagagttgcactcaactcctctcaagtgatccaatgatcaacttgaataccacagtgttatgcttttcctttcaatttcccgtttgcaggaatctccacaacttggagtctctcgcccttacacttgagattcacaaagaaatacggagtaagggagggaagcaacacacacaaatccacagcaaaatgcgcacacacacggccaagaatcgagctcaaaagactatctcaaagttctcactagaacggagctcgaatcacttagaataacaaacggatgcgcaaagactgagtgtggatgatcaagaatgctcaaaggttgcttagtctcctcctccatgcgcctaggggtcccttttatagccccaaggcagctaggagccgttgagaacaaatctggaaggccatctttgccttctgtcgtcgggcgcaccggacagtccggtgcacaccggacactgtccggtgcccgatttctt

SEQ ID NO: 62111 - DNA, 2636 bp, Zea Mays
caccttcctccctcccagagtcccagtcaaaccctgctcggaagcaaacggacttcggatcctcggctttaccactcgcggtaccctgctggaggttgttttgtatcatggagagtacagacaagaatgacaaaagaaatgctgtcacagaagagtcttctaatcctggacaaaattgtgaagatgacggggatttttcaatgaaaactgaaatgttaaatgtagaagaagcaccaagtttctcgaatgacaaattaaacaacgaatcagaagtgcagattcaagagggaggtaatgattcagaagagggcttaaacggacaaatgaatgaaaggacaagctcagatgtcatggaatgtgcaagctcaaacgagatcacaaaagagaatctttctgaagataaaactgaagagccagtatttgatggaactgaggttcttgaaatagaagaaatgaggcgttcttccaatcaatctggggaacttgactcagaggctcaggggtctgtactcaatgaccgggctgttgcaataaaaaattttgttaaagaaaggagtgcaattgcagtttcaacatttatgcggcgcctttctggcaaaaaggatgagaatgaatttaaggctgaagctgacaagactattggttcagaatacatggactgcgagaaaaccaggacagatgctgaatccaatcctaaagaggtgcaacagaaatctgtggaaagaactgtctggaacccactgaacttcattaaaattggccgggattctgatacttttgtaactggggaagcgttgaatgaaaatgtgcctggtttgttggagataccaccattgaagggtaggataataatatacacaaaactgggatgtgaagattgcaaaaaggttcgtctattcttgcttcggaaaaggctcaagtatgttgagattaacattgacatcttccctggtagaaagttggaattggagaagaatactgggtcatccactgtaccaaaagtgtattttaatgacctactaattggagggttaattgagttgaggaaaatggaagattctggcatacttgatgagaatatcgatgttctgttcaatgaggaatccccatattctgctccattaccccccttacttggagaagatgatgaatcaggaagtgggaagattgatgagctggcaaccattgtcaaaaaaatgagagagtcaatcactcctaaggatagattctataagatgagaagatttagcaactgctttcttggtagtgaagctgtggatttcatatcagaagatcaatatttggagagagatgaggcagtggaatttgcaaggaagcttgcaagaaaatacttctttcgtcatgttctagatgaaaatgtcttcgaagatggaaaccacatatatcgtttcctggatcatgatcccatagttatgactcaatgttacaacatccctaggggcatcatcgatgttgcaccaaagcccattgctgaagtagcatcaaggctgaggttgctatcctgtgccatttttgaagcttatgtatcagccgatggtagacatgttgactaccaaagcatccaaggttctgaggaatttaaaagatatattagaacagttgaggagctccagagggtggaaattgattatttatcacgtgaagagaaacttgctttcttcataaatctctacaatatgatggctatccatgcattagtgacatgtggccatcctgctggaccattggacagaaaaaagttttttggagattttaagtatatcattggtggatgtgcttattcactgtcagcaatccaaaatggcattctacgtggcaaccaaaggccaccatacaacattgccaaacctttcgggcagaaagaccgaagatccaaggtggcccttccataccatgaacctcttgttcactttgctttgatatgtggcaccaaatctggacctgcacttaggtgttactcaccaggggatatcgataaagaattgatggaagctgcacgtgatttcgtgaggaatggaggactgattgttgatcctgaagccaaaattgcatctgcaagcaagattttgaaatggtatagcacagattttggtaagaacgagatggaagtgctaaagcatgctgcgaactatcttgagcccgcagagtcagagcagctcttggaactgctcgccagcactcaactgaaagtcatgtaccaaaattacgactggagcatcaacatttagaagtggtggtgcttatcatttttctgaattccgttcagttaactaaatgagaatcgccgacgccgtcttccctaccggagctattaagatttacaaacggtggtgatgttatcagcacggccggtgatgtggagcgagcgagcatgcgtgaacgctgctgcagcgcgcatgattgcttggaacaattaacttctcgccattacgagcgagcgtttgagctgcacgtattttgttttgttgactggctcgatctgaaaaaaaagctgattctacgattttcctcttaccttttaaactctccaaacagtttaaattacctgtctcccatggtttataatggcattttgaactcaaaaccgttgaaattacctctactatggtttaaag

SEQ ID NO: 62112 - DNA, 2781 bp, Zea Mays
gtttccttcacctcttctcctgcagtcctgcgcaccttcctccctcccagagtcccagtcaaaccctgctcggaagcaaacggacttcggatcctcggctttaccactcgcgtaccctgctggaggttgttttgtatcatggagagtacagacaagaatgacaaaagaaatgctgtcacagaagagtcttctaatcctggacaaaattgtgaagatgacggggatttttcaatgaaaactgaaatgttaaatgtagaagaagcaccaagtttctcgaatgacaaattaaacaacgaatcagaagtgcagattcaagagggaggtaatgattcagaagagggcttaaacggacaaatgaatgaaaggacaagctcagatgtcatggaatgtgcaagctcaaacgagatcacaaaagagaatctttctgaagataaaactgaagagccagtatttgatggaactgaggttcttgaaatagaagaaatgaggcgttcttccaatcaatctggggaacttgactcagaggctcaggggtctgtactcaatgaccgggctgttgcaataaaaaattttgttaaagaaaggagtgcaattgcagtttcaacatttatgcggcgcctttctggcaaaaaggatgagaatgaatttaaggctgaagctgacaagactattggttcagaatacatggactgcgagaaaaccaggacagatgctgaatccaatcctaaagaggtgcaacagaaatctgtggaaagaactgtctggaacccactgaacttcattaaaattggccgggattctgatacttttgtaactggggaagcgttgaatgaaaatgtgcctggtttgttggagataccaccattgaagggtaggataataatatacacaaaactgggatgtgaagattgcaaaaaggttcgtctattcttgcttcggaaaaggctcaagtatgttgagattaacattgacatcttccctggtagaaagttggaattggagaagaatactgggtcatccactgtaccaaaagtgtattttaatgacctactaattggagggttaattgagttgaggaaaatggaagattctggcatacttgatgagaatatcgatgttctgttcaatgaggaatccccatattctgctccattaccccccttacttggagaagatgatgaatcaggaagtgggaagattgatgagctggcaaccattgtcaaaaaaatgagagagtcaatcactcctaaggatagattctataagatgagaagatttagcaactgctttcttggtagtgaagctgtggatttcatatcagaagatcaatatttggagagagatgagttatccatgtaggcagtggaatttgcaaggaagcttgcaagaaaatacttctttcgtcatgttctagatgaaaatgtcttcgaagatggaaaccacatatatcgtttcctggatcatgatcccatagttatgactcaatgttacaacatccctaggggcatcatcgatgttgcaccaaagcccattgctgaagtagcatcaaggctgaggttgctatcctgtgccatttttgaagcttatgtatcagccgatggtagacatgttgactaccaaagcatccaaggttctgaggaatttaaaagatatattagaacagttgaggagctccagagggtggaaattgattatttatcacgtgaagagaaacttgctttcttcataaatctctacaatatgatggctatccatgcattagtgacatgtggccatcctgctggaccattggacagaaaaaagttttttggagattttaagtatatcattggtggatgtgcttattcactgtcagcaatccaaaatggcattctacgtggcaaccaaaggccaccatacaacattgccaaacctttcgggcagaaagaccgaagatccaaggtggcccttccataccatgaacctcttgttcactttgctttgatatgtggcaccaaatctggacctgcacttaggtgttactcaccaggggatatcgataaagaattgatggaagctgcacgtgatttcgtgaggaatggaggactgattgttgatcctgaagccaaaattgcatctgcaagcaagattttgaaatggtatagcacagattttggtaagaacgagatggaagtgctaaagcatgctgcgaactatcttgagcccgcagagtcagagcagctcttggaactgctcgccagcactcaactgaaagtcatgtaccaaaattacgactggagcatcaacatttagaagtagcttgatgtctatccatatgttctttttacatttgcgtacctattacacaaagttccgtggattggaattctctttctgaagcaggacgaacgtctgacagggtggtgcttatcatttttctgaattccgttcagttaactaaatgagaatcgccgacgccgtcttccctaccggagctattaagatttacaaacggtggtgatgttatcagcacggccggtgatgtggagcgagcgagcatgcgtgaacgctgctgcagcgcgcatgattgcttggaacaattaacttctcgccattacgagcgagcgtttgagctgcacgtattttgttttgttgactggctcgatctgaaaaaaaagctgattctacgattttcctcttaccttttaaactctccaaacagtttaaattacctgtctcccatggtttataatggcattttgaactcaaaaccgttgaaattacctctactatggtttaaag

SEQ ID NO: 62113 - DNA, 2810 bp, Zea Mays
tttctccgctcgccccgcggttcccgcttcctacagccctccggtcgactcgggttcccacttcgccgccgctcccccgtttccttcacctcttctcctgcagtcctgcgcaccttcctccctcccagagtcccagtcaaaccctgctcggaagcaaacggacttcggatcctcggctttaccactcgcctcgcggacttcggggtttagtttgggacccgttgctccggagttcttcttaaggtaccctgctggaggttgttttgtatcatggagagtacagacaagaatgacaaaagaaatgctgtcacagaagagtcttctaatcctggacaaaattgtgaagatgacggggatttttcaatgaaaactgaaatgttaaatgtagaagaagcaccaagtttctcgaatgacaaattaaacaacgaatcagaagtgcagattcaagagggaggtaatgattcagaagagggcttaaacggacaaatgaatgaaaggacaagctcagatgtcatggaatgtgcaagctcaaacgagatcacaaaagagaatctttctgaagataaaactgaagagccagtatttgatggaactgaggttcttgaaatagaagaaatgaggcgttcttccaatcaatctggggaacttgactcagaggctcaggggtctgtactcaatgaccgggctgttgcaataaaaaattttgttaaagaaaggagtgcaattgcagtttcaacatttatgcggcgcctttctggcaaaaaggatgagaatgaatttaaggctgaagctgacaagactattggttcagaatacatggactgcgagaaaaccaggacagatgctgaatccaatcctaaagaggtgcaacagaaatctgtggaaagaactgtctggaacccactgaacttcattaaaattggccgggattctgatacttttgtaactggggaagcgttgaatgaaaatgtgcctggtttgttggagataccaccattgaagggtaggataataatatacacaaaactgggatgtgaagattgcaaaaaggttcgtctattcttgcttcggaaaaggctcaagtatgttgagattaacattgacatcttccctggtagaaagttggaattggagaagaatactgggtcatccactgtaccaaaagtgtattttaatgacctactaattggagggttaattgagttgaggaaaatggaagattctggcatacttgatgagaatatcgatgttctgttcaatgaggaatccccatattctgctccattaccccccttacttggagaagatgatgaatcaggaagtgggaagattgatgagctggcaaccattgtcaaaaaaatgagagagtcaatcactcctaaggatagattctataagatgagaagatttagcaactgctttcttggtagtgaagctgtggatttcatatcagaagatcaatatttggagagagatgaggcagtggaatttgcaaggaagcttgcaagaaaatacttctttcgtcatgttctagatgaaaatgtcttcgaagatggaaaccacatatatcgtttcctggatcatgatcccatagttatgactcaatgttacaacatccctaggggcatcatcgatgttgcaccaaagcccattgctgaagtagcatcaaggctgaggttgctatcctgtgccatttttgaagcttatgtatcagccgatggtagacatgttgactaccaaagcatccaaggttctgaggaatttaaaagttctcctacatagatatattagaacagttgaggagctccagagggtggaaattgattatttatcacgtgaagagaaacttgctttcttcataaatctctacaatatgatggctatccatgcattagtgacatgtggccatcctgctggaccattggacagaaaaaagttttttggagattttaagtatatcattggtggatgtgcttattcactgtcagcaatccaaaatggcattctacgtggcaaccaaaggccaccatacaacattgccaaacctttcgggcagaaagaccgaagatccaaggtggcccttccataccatgaacctcttgttcactttgctttgatatgtggcaccaaatctggacctgcacttaggtgttactcaccaggggatatcgataaagaattgatggaagctgcacgtgatttcgtgaggaatggaggactgattgttgatcctgaagccaaaattgcatctgcaagcaagattttgaaatggtatagcacagattttggtaagaacgagatggaagtgctaaagcatgctgcgaactatcttgagcccgcagagtcagagcagctcttggaactgctcgccagcactcaactgaaagtcatgtaccaaaattacgactggagcatcaacatttagaaggtggtgcttatcatttttctgaattccgttcagttaactaaatgagaatcgccgacgccgtcttccctaccggagctattaagatttacaaacggtggtgatgttatcagcacggccggtgatgtggagcgagcgagcatgcgtgaacgctgctgcagcgcgcatgattgcttggaacaattaacttctcgccattacgagcgagcgtttgagctgcacgtattttgttttgttgactggctcgatctgaaaaaaaagctgattctacgattttcctcttaccttttaaactctccaaacagtttaaattacctgtctcccatggtttataatggcattttgaactcaaaaccgttgaaattacctctactatggtttaaag

SEQ ID NO: 62114 - DNA, 2837 bp, Zea Mays
ctctcgtcagtttctccgctcgccccgcggttcccgcttcctacagccctccggtcgactcgggttcccacttcgccgccgctcccccgtttccttcacctcttctcctgcagtcctgcgcaccttcctccctcccagagtcccagtcaaaccctgctcggaagcaaacggacttcggatcctcggctttaccactcgcctcgcggacttcggggtttagtttgggacccgttgctccggagttcttcttaaggtaccctgctggaggttgttttgtatcatggagagtacagacaagaatgacaaaagaaatgctgtcacagaagagtcttctaatcctggacaaaattgtgaagatgacggggatttttcaatgaaaactgaaatgttaaatgtagaagaagcaccaagtttctcgaatgacaaattaaacaacgaatcagaagtgcagattcaagagggaggtaatgattcagaagagggcttaaacggacaaatgaatgaaaggacaagctcagatgtcatggaatgtgcaagctcaaacgagatcacaaaagagaatctttctgaagataaaactgaagagccagtatttgatggaactgaggttcttgaaatagaagaaatgaggcgttcttccaatcaatctggggaacttgactcagaggctcaggggtctgtactcaatgaccgggctgttgcaataaaaaattttgttaaagaaaggagtgcaattgcagtttcaacatttatgcggcgcctttctggcaaaaaggatgagaatgaatttaaggctgaagctgacaagactattggttcagaatacatggactgcgagaaaaccaggacagatgctgaatccaatcctaaagaggtgcaacagaaatctgtggaaagaactgtctggaacccactgaacttcattaaaattggccgggattctgatacttttgtaactggggaagcgttgaatgaaaatgtgcctggtttgttggagataccaccattgaagggtaggataataatatacacaaaactgggatgtgaagattgcaaaaaggttcgtctattcttgcttcggaaaaggctcaagtatgttgagattaacattgacatcttccctggtagaaagttggaattggagaagaatactgggtcatccactgtaccaaaagtgtattttaatgacctactaattggagggttaattgagttgaggaaaatggaagattctggcatacttgatgagaatatcgatgttctgttcaatgaggaatccccatattctgctccattaccccccttacttggagaagatgatgaatcaggaagtgggaagattgatgagctggcaaccattgtcaaaaaaatgagagagtcaatcactcctaaggatagattctataagatgagaagatttagcaactgctttcttggtagtgaagctgtggatttcatatcagaagatcaatatttggagagagatgaggcagtggaatttgcaaggaagcttgcaagaaaatacttctttcgtcatgttctagatgaaaatgtcttcgaagatggaaaccacatatatcgtttcctggatcatgatcccatagttatgactcaatgttacaacatccctaggggcatcatcgatgttgcaccaaagcccattgctgaagtagcatcaaggctgaggttgctatcctgtgccatttttgaagcttatgtatcagccgatggtagacatgttgactaccaaagcatccaaggttctgaggaatttaaaagatatattagaacagttgaggagctccagagggtggaaattgattatttatcacgtgaagagaaacttgctttcttcataaatctctacaatatgatggctatccatgcattagtgacatgtggccatcctgctggaccattggacagaaaaaagttttttggagattttaagtatatcattggtggatgtgcttattcactgtcagcaatccaaaatggcattctacgtggcaaccaaaggccaccatacaacattgccaaacctttcgggcagaaagaccgaagatccaaggtgttactcaccaggggatatcgataaagaattgatggaagctgcacgtgatttcgtgaggaatggaggactgattgttgatcctgaagccaaaattgcatctgcaagcaagattttgaaatggtatagcacagattttggtaagaacgagatggaagtgctaaagcatgctgcgaactatcttgagcccgcagagtcagagcagctcttggaactgctcgccagcactcaactgaaagtcatgtaccaaaattacgactggagcatcaacatttagaagtagcttgatgtctatccatatgttctttttacatttgcgtacctattacacaaagttccgtggattggaattctctttctgaagcaggacgaacgtctgacagggtggtgcttatcatttttctgaattccgttcagttaactaaatgagaatcgccgacgccgtcttccctaccggagctattaagatttacaaacggtggtgatgttatcagcacggccggtgatgtggagcgagcgagcatgcgtgaacgctgctgcagcgcgcatgattgcttggaacaattaacttctcgccattacgagcgagcgtttgagctgcacgtattttgttttgttgactggctcgatctgaaaaaaaagctgattctacgattttcctcttaccttttaaactctccaaacagtttaaattacctgtctcccatggtttataatggcattttgaactcaaaaccgttgaaattacctctactatggtttaaag

SEQ ID NO: 62115 - DNA, 2850 bp, Zea Mays
cagaactgcagaaggcagacccacgtgactctttctcccgtttctctcgtcagtttctccgctcgccccgcggttcccgcttcctacagccctccggtcgactcgggttcccacttcgccgccgctcccccgtttccttcacctcttctcctgcagtcctgcgcaccttcctccctcccagagtcccagtcaaaccctgctcggaagcaaacggacttcggatcctcggctttaccactcgcctcgcggacttcggggtttagtttgggacccgttgctccggagttcttcttaaggtaccctgctggaggttgttttgtatcatggagagtacagacaagaatgacaaaagaaatgctgtcacagaagagtcttctaatcctggacaaaattgtgaagatgacggggatttttcaatgaaaactgaaatgttaaatgtagaagaagcaccaagtttctcgaatgacaaattaaacaacgaatcagaagtgcagattcaagagggaggtaatgattcagaagagggcttaaacggacaaatgaatgaaaggacaagctcagatgtcatggaatgtgcaagctcaaacgagatcacaaaagagaatctttctgaagataaaactgaagagccagtatttgatggaactgaggttcttgaaatagaagaaatgaggcgttcttccaatcaatctggggaacttgactcagaggctcaggggtctgtactcaatgaccgggctgttgcaataaaaaattttgttaaagaaaggagtgcaattgcagtttcaacatttatgcggcgcctttctggcaaaaaggatgagaatgaatttaaggctgaagctgacaagactattggttcagaatacatggactgcgagaaaaccaggacagatgctgaatccaatcctaaagaggtgcaacagaaatctgtggaaagaactgtctggaacccactgaacttcattaaaattggccgggattctgatacttttgtaactggggaagcgttgaatgaaaatgtgcctggtttgttggagataccaccattgaagggtaggataataatatacacaaaactgggatgtgaagattgcaaaaaggttcgtctattcttgcttcggaaaaggctcaagtatgttgagattaacattgacatcttccctggtagaaagttggaattggagaagaatactgggtcatccactgtaccaaaagtgtattttaatgacctactaattggagggttaattgagttgaggaaaatggaagattctggcatacttgatgagaatatcgatgttctgttcaatgaggaatccccatattctgctccattaccccccttacttggagaagatgatgaatcaggaagtgggaagattgatgagctggcaaccattgtcaaaaaaatgagagagtcaatcactcctaaggatagattctataagatgagaagatttagcaactgctttcttggtagtgaagctgtggatttcatatcagaagatcaatatttggagagagatgaggcagtggaatttgcaaggaagcttgcaagaaaatacttctttcgtcatgttctagatgaaaatgtcttcgaagatggaaaccacatatatcgtttcctggatcatgatcccatagttatgactcaatgttacaacatccctaggggcatcatcgatgttgcaccaaagcccattgctgaagtagcatcaaggctgaggttgctatcctgtgccatttttgaagcttatgtatcagccgatggtagacatgttgactaccaaagcatccaaggttctgaggaatttaaaagatatattagaacagttgaggagctccagagggtggaaattgattatttatcacgtgaagagaaacttgctttcttcataaatctctacaatatgatggctatccatgcattagtgacatgtggccatcctgctggaccattggacagaaaaaagttttttggagattttaagtatatcattggtggatgtgcttattcactgtcagcaatccaaaatggcattctacgtggcaaccaaaggccaccatacaacattgccaaacctttcgggcagaaagaccgaagatccaaggtggcccttccataccatgaacctcttgttcactttgctttgatatgtggcaccaaatctggacctgcacttaggtgttactcaccaggggatatcgataaagaattgatggaagctgcacgtgatttcgtgaggaatggaggactgattgttgatcctgaagccaaaattgcatctgcaagcaagattttgaaatggtatagcacagattttggtaagaacgagatggaagtgctaaagcatgctgcgaactatcttgagcccgcagagtcagagcagctcttggaactgctcgccagcactcaactgaaagtcatgtaccaaaattacgactggagcatcaacatttagaaggtggtgcttatcatttttctgaattccgttcagttaactaaatgagaatcgccgacgccgtcttccctaccggagctattaagatttacaaacggtggtgatgttatcagcacggccggtgatgtggagcgagcgagcatgcgtgaacgctgctgcagcgcgcatgattgcttggaacaattaacttctcgccattacgagcgagcgtttgagctgcacgtattttgttttgttgactggctcgatctgaaaaaaaagctgattctacgattttcctcttaccttttaaactctccaaacagtttaaattacctgtctcccatggtttataatggcattttgaactcaaaaccgttgaaattacctctactatggtttaaag

SEQ ID NO: 62116 - DNA, 2798 bp, Zea Mays
cgcagaactgcagaaggcagacccacgtgactctttctcccgtttctctcgtcagtttctccgctcgccccgcggttcccgcttcctacagccctccggtcgactcgggttcccacttcgccgccgctcccccgtttccttcacctcttctcctgcagtcctgcgcaccttcctccctcccagagtcccagtcaaaccctgctcggaagcaaacggacttcggatcctcggctttaccactcgcgtaccctgctggaggttgttttgtatcatggagagtacagacaagaatgacaaaagaaatgctgtcacagaagagtcttctaatcctggacaaaattgtgaagatgacggggatttttcaatgaaaactgaaatgttaaatgtagaagaagcaccaagtttctcgaatgacaaattaaacaacgaatcagaagtgcagattcaagagggaggtaatgattcagaagagggcttaaacggacaaatgaatgaaaggacaagctcagatgtcatggaatgtgcaagctcaaacgagatcacaaaagagaatctttctgaagataaaactgaagagccagtatttgatggaactgaggttcttgaaatagaagaaatgaggcgttcttccaatcaatctggggaacttgactcagaggctcaggggtctgtactcaatgaccgggctgttgcaataaaaaattttgttaaagaaaggagtgcaattgcagtttcaacatttatgcggcgcctttctggcaaaaaggatgagaatgaatttaaggctgaagctgacaagactattggttcagaatacatggactgcgagaaaaccaggacagatgctgaatccaatcctaaagaggtgcaacagaaatctgtggaaagaactgtctggaacccactgaacttcattaaaattggccgggattctgatacttttgtaactggggaagcgttgaatgaaaatgtgcctggtttgttggagataccaccattgaagggtaggataataatatacacaaaactgggatgtgaagattgcaaaaaggttcgtctattcttgcttcggaaaaggctcaagtatgttgagattaacattgacatcttccctggtagaaagttggaattggagaagaatactgggtcatccactgtaccaaaagtgtattttaatgacctactaattggagggttaattgagttgaggaaaatggaagattctggcatacttgatgagaatatcgatgttctgttcaatgaggaatccccatattctgctccattaccccccttacttggagaagatgatgaatcaggaagtgggaagattgatgagctggcaaccattgtcaaaaaaatgagagagtcaatcactcctaaggatagattctataagatgagaagatttagcaactgctttcttggtagtgaagctgtggatttcatatcagaagatcaatatttggagagagatgaggcagtggaatttgcaaggaagcttgcaagaaaatacttctttcgtcatgttctagatgaaaatgtcttcgaagatggaaaccacatatatcgtttcctggatcatgatcccatagttatgactcaatgttacaacatccctaggggcatcatcgatgttgcaccaaagcccattgctgaagtagcatcaaggctgaggttgctatcctgtgccatttttgaagcttatgtatcagccgatggtagacatgttgactaccaaagcatccaaggttctgaggaatttaaaagatatattagaacagttgaggagctccagagggtggaaattgattatttatcacgtgaagagaaacttgctttcttcataaatctctacaatatgatggctatccatgcattagtgacatgtggccatcctgctggaccattggacagaaaaaagttttttggagattttaagtatatcattggtggatgtgcttattcactgtcagcaatccaaaatggcattctacgtggcaaccaaaggccaccatacaacattgccaaacctttcgggcagaaagaccgaagatccaaggtggcccttccataccatgaacctcttgttcactttgctttgatatgtggcaccaaatctggacctgcacttaggtgttactcaccaggggatatcgataaagaattgatggaagctgcacgtgatttcgtgaggaatggaggactgattgttgatcctgaagccaaaattgcatctgcaagcaagattttgaaatggtatagcacagattttggtaagaacgagatggaagtgctaaagcatgctgcgaactatcttgagcccgcagagtcagagcagctcttggaactgctcgccagcactcaactgaaagtcatgtaccaaaattacgactggagcatcaacatttagaaggtggtgcttatcatttttctgaattccgttcagttaactaaatgagaatcgccgacgccgtcttccctaccggagctattaagatttacaaacggtggtgatgttatcagcacggccggtgatgtggagcgagcgagcatgcgtgaacgctgctgcagcgcgcatgattgcttggaacaattaacttctcgccattacgagcgagcgtttgagctgcacgtattttgttttgttgactggctcgatctgaaaaaaaagctgattctacgattttcctcttaccttttaaactctccaaacagtttaaattacctgtctcccatggtttataatggcattttgaactcaaaaccgttgaaattacctctactatggtttaaag

SEQ ID NO: 62117 - DNA, 792 bp, Zea Mays
atcactgatacctgctccctgtcttgacggaattttggatcgagaataacaagggaggtttatggagagagtatcgaacacagagagagatgatcggaggtactggagccacctatccacaagatttcacgttgttgcctatcttaagccgatttggtgactagaggtaggttggagattgatttctgctttcctgctggttcatacaacctattcttctgactccatttgggtcgatcgcataagctgatgggccacaaaggatgttgttttgagaatatccatggttgggacatcaaatggacacagttgggacatcaagtttagacgagacttttggtttcacaatggctacaatgaatggatcagaaagtgtatttgcaacgtgcaagggtgacaagaatatgaacactctaatgcaccacccttttagtaactgggctgatacagtgagtcgctatttcgcaagatcgtcgtggccctatcaggaacggagatgctcttagcgaagcaggaggacatggtagacgtgaacctgaagctaaagctgacttccagccaatccaacaagcagcagcaggcggggagtggatgcgcctgctagaagagtgctagctctgcatatacgctcgctcgacaaacgtgtgttgttaactattgtatatagtgttataatcactgtcctttattcctgatgtttgttttgtagttgaaactcacattgttttctcgtttccatctcgattttgtatgccgtgaccatgaaagaacaaatgttttcctatggtttct

SEQ ID NO: 62118 - DNA, 173 bp, Zea Mays
ctagccccatccttggtgggaggaagaagctagcgccaccattgcagcagcaggaggtggtggatccaagcctacgcgacgggttcagagcgaaggcgctcctcggtagacaagacaccagcatcactgatacctgctccctgtcttgacgagatttggacaccttacaaagg

SEQ ID NO: 62119 - DNA, 1148 bp, Zea Mays
gtctggccctcgaacggcgagacggtgggtggccgcatacgcatacatttcttccgcattgactctgtggggccaccgacggccacagagagaaacgttgagacagggagagagagagagcgagcgagctccagcctccacgcctccactacaccagccaggcagcagcccccaacgactggctcgccgctcgcgagaacccgagtctatttctgcacgcgcttccaggttttagctgcagcggcatcagggcagggggagagcaaaagcaatagttctgttctactggaggaagagcagggagcaagatggggtccggatctttcctcaaggtgctggccaataacttcgatgtccttgccgggcttccattttggtcgtatgcaaagctgttctttaactgctggttggtcttgccttggttcaatggtgctgcctatgtttacgaccattttgtgcggccaatgtttgtgaaccgccaaatagtgaacatatggtacattccaagaaatgagaagctaggtaaatctgatgatgttctgtcagctgcagagagatatattgaacaaaacggaccagaagcatttgagaagcaacttggaggatggagaggctgaaaatcgagctaaagccgagagagaatcgtggggcgaaaatcccttctacgacaaaaactacagatactaaaccagttcaaaatccactcagcagtttgaagatgaccttgctcacgagcctcatgcaagctatagttgcgtcggactgaagacgacattcccatatttctgactctgaatattgtaccttgttacatccactgctactacataatgatgagttctagagcaattgtggactgtgtaaatggaggtagatgctagcgttaatcgtttatgtgctttttggatggtgtccttatcacccgttttactacatctttagcaaggagcgagccttgattttcagtttggctttcgtatttttgtaattgaatgctacttttagataactgaaatatgagggagttcgagcttctatgaagaaacttaacatgtgctaatgcatagagtgccaacaccgttatcatcgtcacaatttttgtacagggctcttctacaatgacttagagcaaggtggatctttgcagc

SEQ ID NO: 62120 - DNA, 1362 bp, Zea Mays
gtctggccctcgaacggcgagacggtgggtggccgcatacgcatacatttcttccgcattgactctgtggggccaccgacggccacagagagaaacgttgagacagggagagagagagagcgagcgagctccagcctccacgcctccactacaccagccaggcagcagcccccaacgactggctcgccgctcgcgagaacccgagtctatttctgcacgcgcttccaggttttagctgcagcggcatcagggcagggggagagcaaaagcaatagttctgttctactggaggaagagcagggagcaagatggggtccggatctttcctcaaggtgctggccaataacttcgatgtccttgccgggccactcatatcacttgcttatcctctatatgcttctgttagagctatagagacaaaaaatcctgtagatgatcagcagtggctcacttactgggtgttgtactcgtttatcactttgtttgagctaacttttgctccaattatcgagtgatctttgtttgcaggcttccattttggtcgtatgcaaagctgttctttaactgctggttggtcttgccttggttcaatggtgctgcctatgtttacgaccattttgtgcggccaatgtttgtgaaccgccaaatagtgaacatatggtacattccaagaaatgagaagctaggtaaatctgatgatgttctgtcagctgcagagagatatattgaacaaaacggaccagaagcatttgagaagctcatcagcaagtctacgaagtcttcgaagtcaaggaacacaaagcggttgaacttggaggatggagaggctgaaaatcgagctaaagccgagagagaatcgtggggcgaaaatcccttctacgacaaaaactacagatactaaaccagttcaaaatccactcagcagtttgaagatgaccttgctcacgagcctcatgcaagctatagttgcgtcggactgaagacgacattcccatatttctgactctgaatattgtaccttgttacatccactgctactacataatgatgagttctagagcaattgtggactgtgtaaatggaggtagatgctagcgttaatcgtttatgtgctttttggatggtgtccttatcacccgttttactacatctttagcaaggagcgagccttgattttcagtttggctttcgtatttttgtaattgaatgctacttttagataactgaaatatgagggagttcgagcttctatgaagaaacttaacatgtgctaatgcatagagtgccaacaccgttatcatcgtcacaatttttgtacagggctcttctacaatgacttagagcaaggtggatctttgcagc

SEQ ID NO: 62121 - DNA, 1216 bp, Zea Mays
cgaaatctcaggtctgccgtctggccctcgaacggcgagacggtgggtggccgcatacgcatacatttcttccgcattgactctgtggggccaccgacggccacagagagaaacgttgagacagggagagagagagagcgagcgagctccagcctccacgcctccactacaccagccaggcagcagcccccaacgactggctcgccgctcgcgagaacccgagtctatttctgcacgcgcttccaggttttagctgcagcggcatcagggcagggggagagcaaaagcaatagttctgttctactggaggaagagcagggagcaagatggggtccggatctttcctcaaggtgctggccaataacttcgatgtccttgccgggcttccattttggtcgtatgcaaagctgttctttaactgctggttggtcttgccttggttcaatggtgctgcctatgtttacgaccattttgtgcggccaatgtttgtgaaccgccaaatagtgaacatatggtacattccaagaaatgagaagctaggtaaatctgatgatgttctgtcagctgcagagagatatattgaacaaaacggaccagaagcatttgagaagctcatcagcaagtctacgaagtcttcgaagtcaaggaacacaaagcggttgaacttggaggatggagaggctgaaaatcgagctaaagccgagagagaatcgtggggcgaaaatcccttctacgacaaaaactacagatactaaaccagttcaaaatccactcagcagtttgaagatgaccttgctcacgagcctcatgcaagctatagttgcgtcggactgaagacgacattcccatatttctgactctgaatattgtaccttgttacatccactgctactacataatgatgagttctagagcaattgtggactgtgtaaatggaggtagatgctagcgttaatcgtttatgtgctttttggatggtgtccttatcacccgttttactacatctttagcaaggagcgagccttgattttcagtttggctttcgtatttttgtaattgaatgctacttttagataactgaaatatgagggagttcgagcttctatgaagaaacttaacatgtgctaatgcatagagtgccaacaccgttatcatcgtcacaatttttgtacagggctcttctacaatgacttagagcaaggtggatctttgcagc

SEQ ID NO: 62122 - DNA, 1348 bp, Zea Mays
gagaaaagatcgtaaccctaatcggacaaaatcgggctatcttcttcctatatatcccgtcgccgctgcctcggccgtttcatgtccaggttaagtttaagattgataaagattgccgtcctctccctgagagtagtctcaagcaagccatcaaggaaaattacaatgcaaagagcaaatttgatccagagctcaccacaaaacaagtccaaaggttacttttgctgtttaagcctgttagtgcacctcaatctgtttcaaataatcaccttggagaaaggcgccactatgaaaaacgaaggaagccacgccattttgaagaaaggcggcctattgaagcagcgcgtcggccacgatttgatgaggaaaggcgccctgcggttagacatgttccttttgaggatccatacagggcaccacgctatgctccagttcctgttgactctcagcatggccattctttggctagtgatcaccacagatattatcaaccagcacttacacctgagcctcggcagcttcctcttgttctagagcctcgatatgttccgccggccctagatcatcatcatgtgccagagcttcgacatgccccacctgcatattatcgcactttggctccatctggtgattcatactatcggtctgttgagaatctggtgcctgagcgatatgcagacagaaccatggctgacttgaccactagagatccaattattagggatcacacagcactaccaggggaggcacttgctcgagcagaccgcttggatgatctctaccgttctgatcgtgtggaggaactctaccgttctgatcgacttgttaaccgtgctgtggaccgccctcatccagcctattttacagctgcttatgagaccaaccctgcttatgctgaaacgagcattaggcctgtctctgcaagggtcaatggacccagtgcggcagtttcgtcactctattccttcagtggtggcccagtatatcggtaatgaatgatcatggctctgttgaaagccttagccagactaagaagacagggtattcgtctctttaactgcaactgttgtttgccttagcttctattcggtattttcttaaatatccttccctggatgaatgacattcgttatcaagacttgatggtctaaactgtcgaaattatgtactgtacttggcgtgctttgaagctcacttcgttctgtgaatggatcgatgcacgtattggtagcatttgcttgttctgcccttcagattggttgctacttgctaaactgagtagggctacctcatgcagtggtcatttcttaggatctgtgtatatgcttatcctaatatacaggacgtt

SEQ ID NO: 62123 - DNA, 1416 bp, Zea Mays
gagaaaagatcgtaaccctaatcggacaaaatcgggctatcttcttcctatatatcccgtcgccgctgcctcggccgtttcatgtccaggtaaaaggaaaaatcgccccatcccctgactatcactggctcactgcccttccacctacaggttccaggttaagtttaagattgataaagattgccgtcctctccctgagagtagtctcaagcaagccatcaaggaaaattacaatgcaaagagcaaatttgatccagagctcaccacaaaacaagtccaaaggttacttttgctgtttaagcctgttagtgcacctcaatctgtttcaaataatcaccttggagaaaggcgccactatgaaaaacgaaggaagccacgccattttgaagaaaggcggcctattgaagcagcgcgtcggccacgatttgatgaggaaaggcgccctgcggttagacatgttccttttgaggatccatacagggcaccacgctatgctccagttcctgttgactctcagcatggccattctttggctagtgatcaccacagatattatcaaccagcacttacacctgagcctcggcagcttcctcttgttctagagcctcgatatgttccgccggccctagatcatcatcatgtgccagagcttcgacatgccccacctgcatattatcgcactttggctccatctggtgattcatactatcggtctgttgagaatctggtgcctgagcgatatgcagacagaaccatggctgacttgaccactagagatccaattattagggatcacacagcactaccaggggaggcacttgctcgagcagaccgcttggatgatctctaccgttctgatcgtgtggaggaactctaccgttctgatcgacttgttaaccgtgctgtggaccgccctcatccagcctattttacagctgcttatgagaccaaccctgcttatgctgaaacgagcattaggcctgtctctgcaagggtcaatggacccagtgcggcagtttcgtcactctattccttcagtggtggcccagtatatcggtaatgaatgatcatggctctgttgaaagccttagccagactaagaagacagggtattcgtctctttaactgcaactgttgtttgccttagcttctattcggtattttcttaaatatccttccctggatgaatgacattcgttatcaagacttgatggtctaaactgtcgaaattatgtactgtacttggcgtgctttgaagctcacttcgttctgtgaatggatcgatgcacgtattggtagcatttgcttgttctgcccttcagattggttgctacttgctaaactgagtagggctacctcatgcagtggtcatttcttaggatctgtgtatatgcttatcctaatatacaggacgtt

SEQ ID NO: 62124 - DNA, 2417 bp, Zea Mays
ttggtggaatgacttcatttcacatattagtactaaacaactaactatgagaaataaggtggtgatggattaactcactccattccataaaccaaacaaaaaagtgagaagtgagaagatgatggactacatcattcctcaaaccaaacactccattaaagcccccgttccctccaaaaccgtagtagatcaagtccgattagttgctgatgtcgccgacgaccatgtccctgacgaccacgacgagccgcctgcccatctgccgggcacgggacgtgtccaagcaggcgcctccaggctgctgcggtccgcggcgctgggtttcgggctcggtctcgccaggagagacccagcgcgggcgcgcgccgagacgacgccgccatcacccgcgctggcgccggaggaggtgacatcgaaccggatgtcctactcgcggttcctggattacctcaacgccaacgcggtgcggaaggtggacttcttcgagaacggcacggtggccgtcgtcgagctggacgacccggcgctggcgtcgagagtgcaccgggtgcgggtgcagctcccggccgggggcctcccagcggagctggtgcgtaagctgcgggacaggggcgtcgacttcgcggcgcaccccgtggaacccaacctcgggctcatgttcctcgacctcctcctcaacttcggcttcccgctcctcttcctcgcctcgctgatctggaggtcggtcaccatgaacaaccctggcgctggcggcggggggcccaacctcccgttcgggctcggcaggtccaaggccaagttccagatggagcccaacaccgggatcacgttcgacgacgtcgccggcgtggacgaggccaagcaggacttccaggagatcgtgcagttcttgaagtcgccggagaagttcacggcggtgggtgcgaggatccccaagggcgtgctgctggtgggcccgccgggcacggggaagacgctgctggccaaggccatcgcgggggaggcaggcgtgcctttcttctctctgtccgggtccgagttcatcgagatgttcgtcggcgtgggcgcgtcgcgggtgcgggacctcttcaacaaggccaaggccaacgcgccgtgcctcgtcttcatcgacgagatcgacgccgtgggccgccagcgcggcacgggcatcggcgggggcaacgacgagcgggagcagacgctgaaccagctgctgacggagatggacgggttcagcggggacagcggagtcgtcgtcatcgcggccacgaaccggcctgacatcctcgacgccgcgctgctccgcccgggccgcttcgaccgccaggtcagcgtcgggctccctgacgtccgcgggcgggaggagatcctcagggtacacagctccaacaagaggctggaccccgacgtgtcgctcagcgtcgtggccatgcgcacccccggcttcagcggcgccgaccttgccaaccttatgaatgaggctgccatccttgccggccgccgcggcaaggaccgcatcggtgtcaaggagatcgatgactccatcgaccgcatcgttgccggcctcgagggcacaagcatgaccgacggcaagagcaagctgcttgttgcctaccacgagatcggccacgccgtgtgcgcgacgctgacgccggggcacgacgcggtgcagaaggtgacactgatcccacgggggcagtcgcgagggctgacgtggttcctgccgggcgaggacccgaccctggtgtccaagcagcagatcttcgcgcgcatcgtgggcgggctcggcgggcgcgccgctgaggaggtgatcttcggggagcccgaggtgacgacgggcgcggcgggcgacctgcagcaggtgacgcaggtggcgcggcagatggtgaccacgttcgggatgtcggagatcgggccgtgggcgctcatggagccggctgcgcagagcggcgacgtcgtgctgcggatgctggcccggaactccatctccgagaagctcgcagcggacatcgacagggccgcgaagcacatcatcgaccaggcgtacgaggtcgccaaggagcatgtcaggaggaaccgcgcggccatcgaccagctggtggacgtgcttatggagaaggagacgctcaccggcgacgagttcagggcgctcttgtcggagcacgtggacattggcagggagcagagggaaacagcggcccggaaaaagctggtcgtcaccgcttgaagcttcactgtagtcctttgtagtgtagaaatatataggggcagcatagcatagtgcaaatatgcagtagtatgttgtacttagacacttgatagtatcagcacatagtactgtatatgcatggtaaacttttttccagggaacaaaaccgaaatctgaagcacatgaatttccgcatgacgattcagga

SEQ ID NO: 62125 - DNA, 773 bp, Zea Mays
atcaactggatgtctccatatgttcgtgcttcattccagagttcctcattgaccaactcatttttgtgcttttaacaatgcaaagtagggtcagttgagtattgactctaaattgagatctaattcaatctagtaaagggcagaagtataacatatagaaaagtgactggtaaaaccattatgtttaatggctgttcaaacaatagtacttataaacaaaaaggtgtgataggctgcaatcgcaagcaattatgcagagaaagcaatcaacagagacattgtttaggatctattaagatgagcgatgccttcgagtacgctattgtcctcctacatcataatttgtactgtgcatacttctaagcgtagaaccatactaaaaactaaaagccacagcaagtatattgtcaaattaccataatatagctgtccacctccaaagttttattcttaccaggccaacaaagaatcgaactgtaacttttcctgatcgaacagaatcatactgcatccaagttctgcgaactgccattcggcgtttgaaattatttgctgtagagaagaccccaatgaaaagatcaaccggtttatccatgggcacaggtggagccttcaatatttctaagtcagtgacatgctcgaagtcctctgttgtaggcaggccacttgctatcacagataacaatttaatgtctcctgcaattcttacttcacctacaaaccctggttccaaatcctggagagatcaatatatgaagtgtaaatgtaataat

SEQ ID NO: 62126 - DNA, 802 bp, Zea Mays
gaaacaatatatcctggtccatgcgcccagggaggataactctcctcaggccattcctaactcaagtaaaacagcagttattacacttgatccaccataccaaatgacagaaaccagaactaaattattgaaaataaggcagcaacatatgcttaaaaacaaatgtgctaataagcatagtaacaaccaagcactaattagtgctccaacagtatgcaggtgcttagcgagctttgcatgtttcttatacatccatgcaggagcccctaacctcctaatgatgttttttatacaaaacttgagctgcttaagcgagcacttatttaacgtatcaatccatcatttatggaacaaaacacatggcagagcaatggtctagaggaagagccatttcgtgtatacaaatgatattttgcagaatctcttgatataacgtatagcacttgtggtcttaaacttgttctgggtgtcatttaggtccataagtgtatcacatgaggtctaaatcaccctaatcaacatataattacgtatgtggtagtgtcactcttgcctgaagtctgagatatccccgttgtctactacatgctcatggccatcgtcgctatcttgtattgtgcatataaatttaccttgtaccattttgtatgccacatagactaagtttgtgctgattagagtgatttgaactttgagtagcacatttagcaattttagggggccatgtgtgcgttttaagagtttagtacacatagtcacatacggagcaagtttaatgacaattgacgtattttactcaaat

SEQ ID NO: 62127 - DNA, 1927 bp, Zea Mays
ggttcaccactggtacttggccttgacaaggacgtcctcgtagagctcagccgcgtggtcccagctgaggtcctgcgacatgccgcgcgcctggagactcttccagctctcctcgtagttccggtacgtgtcgaggcagtgcctgagcgcctcgatcagcttgttggcctcggcgcggtcaaaagtccacccgagcccggcgtcgctgaacgggtcgaacggcgccacggtgtccctgagcccgcccacggcgtgcaccacagggacggtgccgtatgccatcgcgtagagctggttcagcccgcagggctcgaagcgggagggcatcaccagcacgtcggcgcccgccgtgatgcgatgcgccataggcaccgagaacccgacccacccgcgcaccttgttgggatgctcccgctccaagtgctgcagcattcgttccaggtcggcgcgcccggtgcccagcatcaccagctgcacgtcctgccccgcgatccacggcatcgcgtccccgatgatgtccacgcccttctgtccatccagacgcccgatgaagccgagcagcggcacgtcgtcgcgcacttccaggcccagctcccgctgcagggccgccttgcactgccgctttccagcgtcgagtgtctcgagggagtagttggtgtagccgtccgaccgcaggtgcacgtccaccttggggttccactcctggtggtcgatgccgttcacgatgccattgatcttccagtcgttagaacggatgatgtcgtggaggccccagccgccttccactgtcttcagctcccacaggtagccgcggctgacagtcaccacccggtctgccatcttcagacccgcggcaaagatgttggcgtgctcgccaccgacgggatcgtacagctcgaaatgttgaaggtagtgttcaggcaagtccatgtacgggaattcatctacaggaccacggccctggtgggcgatgttatgtatgacgaggacggagcgagtgtactgcattaacccatggtctctgtaatatgccttcagataaacaggcaggagtgcagtgtgccaatcattggcaatgaacaccaaatttccatctccgtagcacacaccaccgcatggaacgtgccaaggaacctgcaggtttatggagcagtcacatactcctatataataacagaacaatattctggtacacaatatgcaggaacgcaccaattgaagaacaacagtaaaatgaggagtagggagaaatcaagacatgcacacttagcaccaaaaatactgacatgtgtgaaacccacaaaattaagaaattgtcaaaaatcgttaactgtggagttcaggggaatacctcaacagcaaccttgcaaaacaaaatcatgcgcttcatgatttcctgaaataaaattgggaattcttatcggctttggttagattaaaactgcagcaaaagtgaactgtgaaaaatcaactgaaagatagaagcatcacctgcctacttcccccatatatgtcatcttgacggtgccggaaaagaggggcatcaatgaacacaaagtcgactccatcaataaatgcatggaaatagttcacttctaggtcctgcaaatcaaaacaaaatctaataatcgtttgaaaataaacaaaattcaaaactaactccatcagaaagtgcatactagcctgcaaagaacttttgctcagagattgtgataatctaatgatgtaatagtgcaggatgcttatcaggattatggttttttttctcttttgatgctggaattccaagataaacagttgcactaaaatctattgctttcttgaaagcaaaaaaataaaaggcaatgtgtgctaaaaaggcaactagattgaatacattgcaatttcaggccttggcatttcctatgccaagctcccttttacctag

SEQ ID NO: 62128 - DNA, 1157 bp, Zea Mays
cagcaaactgcaaaccagcaacgcatcagccgagccaagcggcagatcgttttcaggcggcgtgacgcgctcacgcctgtctccttgcccccttcggtcctccctcctcccggcgagctcctctaccacgggtgtaccaaccaaccaccagtccaccaagcgcgcgggcgccatcaggtagaccggcccctgcgttagacccaacccaaccctagctaccgtgacgctcgatcggcttcgggttagtttgcggaggaggcgtggaggtggaccgcctgtgccgtgaggctgagtcatggaagtgccgccactgccaacggcgtcggaaggggagcgccgaagcgtagcgacggggtcgtgcctccccaggctggtctccggcgtcctctcgggggccctcaccggcatcttcgccgttgctggaggcctgacgggggcgttcaccggcgcattggccggccgagcttccgacagcggcgtcctccggggagccggcctgggggcctttgcgggggcggtactatccatcgaggttctcgaggcttcgcgcgcctactggagcgcggaccgatcgagcccgcagagcacgtcctccatggtccgtgagctacttcttcaattcgtcagggggatttcatagaacagctccttcatgctcgatttgtgcaagaccagtatgagccatcggcatatatggcctatcgttggcaggttggcattgccgacaatgatgatatgtttgatgtccttgaagatgttttatccgaagggctctcacaagatactctaaagaagttgccacatcatgtggttcctgcaccaattggtgaaagcttgtcttgcgctatttgcctgcaggatgttattagcggagagacagcgaggaagttgccaaagtgctctcacaccttccatcagccttgtgtggacagatggttcattgaccatggttcatgcccagtatgtagacaggatgtgtaggtagatcatgatcgattctgggttatcatgcctttgtaaagttgctaccctcgtcatatagaagaaaatacagtacgtagcatgtaaaaagtcctgcacttgttcctattatgaaaaatggtttacacatcagtaattgagttccatgttttctctttttactcggtttgcgtata

SEQ ID NO: 62129 - DNA, 1142 bp, Zea Mays
cagcaaactgcaaaccagcaacgcatcagccgagccaagcggcagatcgttttcaggcggcgtgacgcgctcacgcctgtctccttgcccccttcggtcctccctcctcccggcgagctcctctaccacgggtgtaccaaccaaccaccagtccaccaagcgcgcgggcgccatcaggtagaccggcccctgcgttagacccaacccaaccctagctaccgtgacgctcgatcggcttcgggttagtttgcggaggaggcgtggaggtggaccgcctgtgccgtgaggctgagtcatggaagtgccgccactgccaacggcgtcggaaggggagcgccgaagcgtagcgacggggtcgtgcctccccaggctggtctccggcgtcctctcgggggccctcaccggcatcttcgccgttgctggaggcctgacgggggcgttcaccggcgcattggccggccgagcttccgacagcggcgtcctccggggagccggcctgggggcctttgcgggggcggtactatccatcgaggttctcgaggcttcgcgcgcctactggagcgcggaccgatcgagcccgcagagcacgtcctccatgggggatttcatagaacagctccttcatgctcgatttgtgcaagaccagtatgagccatcggcatatatggcctatcgttggcagatattttccaacaggttggcattgccgacaatgatgatatgtttgatgtccttgaagatgttttatccgaagggctctcacaagatactctaaagaagttgccacatcatgtggttcctgcaccaattggtgaaagcttgtcttgcgctatttgcctgcaggatgttattagcggagagacagcgaggaagttgccaaagtgctctcacaccttccatcagccttgtgtggacagatggttcattgaccatggttcatgcccagtatgtagacaggatgtgtaggtagatcatgatcgattctgggttatcatgcctttgtaaagttgctaccctcgtcatatagaagaaaatacagtacgtagcatgtaaaaagtcctgcacttgttcctattatgaaaaatggtttacacatcagtaattgagttccatgttttctctttttactcggtttgcgtata

SEQ ID NO: 62130 - DNA, 1169 bp, Zea Mays
cagcaaactgcaaaccagcaacgcatcagccgagccaagcggcagatcgttttcaggcggcgtgacgcgctcacgcctgtctccttgcccccttcggtcctccctcctcccggcgagctcctctaccacgggtgtaccaaccaaccaccagtccaccaagcgcgcgggcgccatcaggtagaccggcccctgcgttagacccaacccaaccctagctaccgtgacgctcgatcggcttcgggttagtttgcggaggaggcgtggaggtggaccgcctgtgccgtgaggctgagtcatggaagtgccgccactgccaacggcgtcggaaggggagcgccgaagcgtagcgacggggtcgtgcctccccaggctggtctccggcgtcctctcgggggccctcaccggcatcttcgccgttgctggaggcctgacgggggcgttcaccggcgcattggccggccgagcttccgacagcggcgtcctccggggagccggcctgggggcctttgcgggggcggtactatccatcgaggttctcgaggcttcgcgcgcctactggagcgcggaccgatcgagcccgcagagcacgtcctccatgtggttcatgggggccgcgaatttaagaaaaattacctgcagggggatttcatagaacagctccttcatgctcgatttgtgcaagaccagtatgagccatcggcatatatggcctatcgttggcaggttggcattgccgacaatgatgatatgtttgatgtccttgaagatgttttatccgaagggctctcacaagatactctaaagaagttgccacatcatgtggttcctgcaccaattggtgaaagcttgtcttgcgctatttgcctgcaggatgttattagcggagagacagcgaggaagttgccaaagtgctctcacaccttccatcagccttgtgtggacagatggttcattgaccatggttcatgcccagtatgtagacaggatgtgtaggtagatcatgatcgattctgggttatcatgcctttgtaaagttgctaccctcgtcatatagaagaaaatacagtacgtagcatgtaaaaagtcctgcacttgttcctattatgaaaaatggtttacacatcagtaattgagttccatgttttctctttttactcggtttgcgtata

SEQ ID NO: 62131 - DNA, 949 bp, Zea Mays
cagcaaactgcaaaccagcaacgcatcagccgagccaagcggcagatcgttttcaggcggcgtgacgcgctcacgcctgtctccttgcccccttcggtcctccctcctcccggcgagctcctctaccacgggtgtaccaaccaaccaccagtccaccaagcgcgcgggcgccatcaggtagaccggcccctgcgttagacccaacccaaccctagctaccgtgacgctcgatcggcttcgggttagtttgcggaggaggcgtggaggtggaccgcctgtgccgtgaggctgagtcatggaagtgccgccactgccaacggcgtcggaaggggagcgccgaagcgtagcgacggggtcgtgcctccccaggctggtctccggcgtcctctcgggggccctcaccggcatcttcgccgttgggggatttcatagaacagctccttcatgctcgatttgtgcaagaccagtatgagccatcggcatatatggcctatcgttggcaggttggcattgccgacaatgatgatatgtttgatgtccttgaagatgttttatccgaagggctctcacaagatactctaaagaagttgccacatcatgtggttcctgcaccaattggtgaaagcttgtcttgcgctatttgcctgcaggatgttattagcggagagacagcgaggaagttgccaaagtgctctcacaccttccatcagccttgtgtggacagatggttcattgaccatggttcatgcccagtatgtagacaggatgtgtaggtagatcatgatcgattctgggttatcatgcctttgtaaagttgctaccctcgtcatatagaagaaaatacagtacgtagcatgtaaaaagtcctgcacttgttcctattatgaaaaatggtttacacatcagtaattgagttccatgttttctctttttactcggtttgcgtata

SEQ ID NO: 62132 - DNA, 1126 bp, Zea Mays
cagcaaactgcaaaccagcaacgcatcagccgagccaagcggcagatcgttttcaggcggcgtgacgcgctcacgcctgtctccttgcccccttcggtcctccctcctcccggcgagctcctctaccacgggtgtaccaaccaaccaccagtccaccaagcgcgcgggcgccatcaggtagaccggcccctgcgttagacccaacccaaccctagctaccgtgacgctcgatcggcttcgggttagtttgcggaggaggcgtggaggtggaccgcctgtgccgtgaggctgagtcatggaagtgccgccactgccaacggcgtcggaaggggagcgccgaagcgtagcgacggggtcgtgcctccccaggctggtctccggcgtcctctcgggggccctcaccggcatcttcgccgttgctggaggcctgacgggggcgttcaccggcgcattggccggccgagcttccgacagcggcgtcctccggggagccggcctgggggcctttgcgggggcggtactatccatcgaggttctcgaggcttcgcgcgcctactggagcgcggaccgatcgagcccgcagagcacgtcctccatgtggttcatgggggccgcgaatttaagaaaaattacctgcagggggatttcatagaacagctccttcatgctcgatttgtgcaagaccagtatgagccatcggcatatatggcctatcgttggcagatgttttatccgaagggctctcacaagatactctaaagaagttgccacatcatgtggttcctgcaccaattggtgaaagcttgtcttgcgctatttgcctgcaggatgttattagcggagagacagcgaggaagttgccaaagtgctctcacaccttccatcagccttgtgtggacagatggttcattgaccatggttcatgcccagtatgtagacaggatgtgtaggtagatcatgatcgattctgggttatcatgcctttgtaaagttgctaccctcgtcatatagaagaaaatacagtacgtagcatgtaaaaagtcctgcacttgttcctattatgaaaaatggtttacacatcagtaattgagttccatgttttctctttttactcggtttgcgtata

SEQ ID NO: 62133 - DNA, 1086 bp, Zea Mays
cagcaaactgcaaaccagcaacgcatcagccgagccaagcggcagatcgttttcaggcggcgtgacgcgctcacgcctgtctccttgcccccttcggtcctccctcctcccggcgagctcctctaccacgggtgtaccaaccaaccaccagtccaccaagcgcgcgggcgccatcaggtagaccggcccctgcgttagacccaacccaaccctagctaccgtgacgctcgatcggcttcgggttagtttgcggaggaggcgtggaggtggaccgcctgtgccgtgaggctgagtcatggaagtgccgccactgccaacggcgtcggaaggggagcgccgaagcgtagcgacggggtcgtgcctccccaggctggtctccggcgtcctctcgggggccctcaccggcatcttcgccgttgctggaggcctgacgggggcgttcaccggcgcattggccggccgagcttccgacagcggcgtcctccggggagccggcctgggggcctttgcgggggcggtactatccatcgaggttctcgaggcttcgcgcgcctactggagcgcggaccgatcgagcccgcagagcacgtcctccatgggggatttcatagaacagctccttcatgctcgatttgtgcaagaccagtatgagccatcggcatatatggcctatcgttggcaggatgttttatccgaagggctctcacaagatactctaaagaagttgccacatcatgtggttcctgcaccaattggtgaaagcttgtcttgcgctatttgcctgcaggatgttattagcggagagacagcgaggaagttgccaaagtgctctcacaccttccatcagccttgtgtggacagatggttcattgaccatggttcatgcccagtatgtagacaggatgtgtaggtagatcatgatcgattctgggttatcatgcctttgtaaagttgctaccctcgtcatatagaagaaaatacagtacgtagcatgtaaaaagtcctgcacttgttcctattatgaaaaatggtttacacatcagtaattgagttccatgttttctctttttactcggtttgcgtata

SEQ ID NO: 62134 - DNA, 1087 bp, Zea Mays
cagcaaactgcaaaccagcaacgcatcagccgagccaagcggcagatcgttttcaggcggcgtgacgcgctcacgcctgtctccttgcccccttcggtcctccctcctcccggcgagctcctctaccacgggtgtaccaaccaaccaccagtccaccaagcgcgcgggcgccatcaggtagaccggcccctgcgttagacccaacccaaccctagctaccgtgacgctcgatcggcttcgggttagtttgcggaggaggcgtggaggtggaccgcctgtgccgtgaggctgagtcatggaagtgccgccactgccaacggcgtcggaaggggagcgccgaagcgtagcgacggggtcgtgcctccccaggctggtctccggcgtcctctcgggggccctcaccggcatcttcgccgttgctggaggcctgacgggggcgttcaccggcgcattggccggccgagcttccgacagcggcgtcctccggggagccggcctgggggcctttgcgggggcggtactatccatcgaggttctcgaggcttcgcgcgcctactggagcgcggaccgatcgagcccgcagagcacgtcctccatgggggatttcatagaacagctccttcatgctcgatttgtgcaagaccagtatgagccatcggcatatatggcctatcgttggcagagatgttttatccgaagggctctcacaagatactctaaagaagttgccacatcatgtggttcctgcaccaattggtgaaagcttgtcttgcgctatttgcctgcaggatgttattagcggagagacagcgaggaagttgccaaagtgctctcacaccttccatcagccttgtgtggacagatggttcattgaccatggttcatgcccagtatgtagacaggatgtgtaggtagatcatgatcgattctgggttatcatgcctttgtaaagttgctaccctcgtcatatagaagaaaatacagtacgtagcatgtaaaaagtcctgcacttgttcctattatgaaaaatggtttacacatcagtaattgagttccatgttttctctttttactcggtttgcgtata

SEQ ID NO: 62135 - DNA, 1125 bp, Zea Mays
agaaatttagagttgtatgagtgcggatagccttgcgcagcagcaaactgcaaaccagcaacgcatcagccgagccaagcggcagatcgttttcaggcggcgtgacgcgctcacgcctgtctccttgcccccttcggtcctccctcctcccggcgagctcctctaccacgggtgtaccaaccaaccaccagtccaccaagcgcgcgggcgccatcaggtagaccggcccctgcgttagacccaacccaaccctagctaccgtgacgctcgatcggcttcgggttagtttgcggaggaggcgtggaggtggaccgcctgtgccgtgaggctgagtcatggaagtgccgccactgccaacggcgtcggaaggggagcgccgaagcgtagcgacggggtcgtgcctccccaggctggtctccggcgtcctctcgggggccctcaccggcatcttcgccgttgctggaggcctgacgggggcgttcaccggcgcattggccggccgagcttccgacagcggcgtcctccggggagccggcctgggggcctttgcgggggcggtactatccatcgaggttctcgaggcttcgcgcgcctactggagcgcggaccgatcgagcccgcagagcacgtcctccatgggggatttcatagaacagctccttcatgctcgatttgtgcaagaccagtatgagccatcggcatatatggcctatcgttggcagatgttttatccgaagggctctcacaagatactctaaagaagttgccacatcatgtggttcctgcaccaattggtgaaagcttgtcttgcgctatttgcctgcaggatgttattagcggagagacagcgaggaagttgccaaagtgctctcacaccttccatcagccttgtgtggacagatggttcattgaccatggttcatgcccagtatgtagacaggatgtgtaggtagatcatgatcgattctgggttatcatgcctttgtaaagttgctaccctcgtcatatagaagaaaatacagtacgtagcatgtaaaaagtcctgcacttgttcctattatgaaaaatggtttacacatcagtaattgagttccatgttttctctttttactcggtttgcgtata

SEQ ID NO: 62136 - DNA, 1145 bp, Zea Mays
cacgggtcagataagcttttctctccccttcgcagctgcaaccgctcgccgcgtgctccctttgtactgaaccgcatcctccccgcgccgacctgctccggcgagttaaacatggccgtcctcctccgcagcacctccgccgccgcctcgactgctggcccctcctcggcgctgctcgccaccaccttccgccgctcccgcggctgccttctgccccgtgccgcgccgcagcgccgcttgtatgtggcccgcgcctcggcccagcccctcgaggtctgcgctaaggagtccatcaccatccctggccgcctcggagactgtcctttcacacagagggttttgttgactatagaggagaagcatctgccttatgatctgaagctagttgatctagctaataagccagattggttatttgaaatcaacccagaaggtaaagtgcctatcgtgaagctcgaggaaaaatggattggtgattctgatgttataacacaagcattagaggagaaataccctgaaccacccttggcaactccaccagaaaaagcttcagttggatcaaaaatattttccactttcattggtttcctcaaaagcaaagatccaagcgatggaacagaagaggcactacttaatgagcttacttcatttgatagttatctaaaagacaatggtccatttattaatggtggaataatttctgctgctgatctctctctgggtcctaaactatatcacatggagataactctgggccactacaagaattggtctgttccagattcactttcttatgtaaaaacatatatgaagtcgattttctcaatggattcttttgtcaaaactcaagctctgacagaggatgtaattgctggatggcgcccaaaagtcatgggttaaattcatttctaaagttagacgttaaggagagggagagaggtgtcgattggcgaatggagggtctagatgcaaagaatgaactgttgatgttggtgcgttagtgattggaggcgagattttcatggctggtgcgagcacaataccctacgctcggcggcacgggcgaagggccagcgcgccaactcaggtgccgcgtcggcgtgtaggtgcgtttgggcgtagggctggaaaaaagttcgagctcg

SEQ ID NO: 62137 - DNA, 1097 bp, Zea Mays
cacgggtcagataagcttttctctccccttcgcagctgcaaccgctcgccgcgtgctccctttgtactgaaccgcatcctccccgcgccgacctgctccggcgagttaaacatggccgtcctcctccgcagcacctccgccgccgcctcgactgctggcccctcctcggcgctgctcgccaccaccttccgccgctcccgcggctgccttctgccccgtgccgcgccgcagcgccgcttgtatgtggcccgcgcctcggcccagcccctcgaggtctgcgctaaggagtccatcaccatccctggccgcctcggagactgtcctttcacacagagggttttgttgactatagaggagaagcatctgccttatgatctgaagctagttgatctagctaataagccagattggttatttgaaatcaacccagaaggtaaagtgcctatcgtgaagctcgaggaaaaatggattggtgattctgatgttataacacaagcattagaggagaaataccctgaaccacccttggcaactccaccagaaaaagcttcagttggatcaaaaatattttccactttcattggtttcctcaaaagcaaagatccaagcgatggaacagaagaggcactacttaatgagcttacttcatttgatagttatctaaaagacaatggtccatttattaatggtggaataatttctgctgctgatctctctctgggtcctaaactatatcacatggagataactctgggccactacaagaattggtctgttccagattcactttcttatgtaaaaacatatatgaagtcgattttctcaatggattcttttgtcaaaactcaagctctgacagaggatgtaattgctggatggcgcccaaaagtcatgggttaaattcatttctaaagttagacgttaagaatgaactgttgatgttggtgcgttagtgattggaggcgagattttcatggctggtgcgagcacaataccctacgctcggcggcacgggcgaagggccagcgcgccaactcaggtgccgcgtcggcgtgtaggtgcgtttgggcgtagggctggaaaaaagttcgagctcg

SEQ ID NO: 62138 - DNA, 1368 bp, Zea Mays
cacgggtcagataagcttttctctccccttcgcagctgcaaccgctcgccgcgtgctccctttgtactgaaccgcatcctccccgcgccgacctgctccggcgagttaaacatggccgtcctcctccgcagcacctccgccgccgcctcgactgctggcccctcctcggcgctgctcgccaccaccttccgccgctcccgcggctgccttctgccccgtgccgcgccgcagcgccgcttgtatgtggcccgcgcctcggcccagcccctcgaggtctgcgctaaggagtccatcaccatccctggccgcctcggagactgtcctttcacacagagggttttgttgactatagaggagaagcatctgccttatgatctgaagctagttgatctagctaataagccagattggttatttgaaatcaacccagaaggtaaagtgcctatcgtgaagctcgaggaaaaatggattggtgattctgatgttataacacaagcattagaggagaaataccctgaaccacccttggcaactccaccagaaaaagcttcagttggatcaaaaatattttccactttcattggtttcctcaaaagcaaagatccaagcgatggaacagaagaggcactacttaatgagcttacttcatttgatagttatctaaaagacaatggtccatttattaatggtggaataatttctgctgctgatctctctctgggtcctaaactatatcacatggagataactctgggccactacaagaattggtctgttccagattcactttcttatgtaaaaacatatatgaagtcgattttctcaatggattcttttgtcaaaactcaagctctgacagaggatgtaattgctggatggcgcccaaaagtcatgggttaaattcatttctaaagttagacgttaaggggcggatgtagtacaggtgcatggggatacaggtacaagcagaacagaacaggctcttgatcagttcattaaggataacaaagaagcaaaaaaactcatatgcttacggtgacattggcaatggctatacttgtggataaatgagagggagagaggtgtcgattggcgaatggagggtctagatgcaaaggtttgtcgcatggctgtaatatgtacatgaaatgtggtggattttgttaggaattttctagggcatagcatatctggtattcatatccaatctcctttgctttgtatgtcaaatggaaaactccttcgagactcaggtttaatttctttagtggcaaattttttggattggttaaaaaaatctctcattgtgtctcatccactttcgggttacaatgtcatatatgttactctttggttggaccgctgcag

SEQ ID NO: 62139 - DNA, 1112 bp, Zea Mays
cacgggtcagataagcttttctctccccttcgcagctgcaaccgctcgccgcgtgctccctttgtactgaaccgcatcctccccgcgccgacctgctccggcgagttaaacatggccgtcctcctccgcagcacctccgccgccgcctcgactgctggcccctcctcggcgctgctcgccaccaccttccgccgctcccgcggctgccttctgccccgtgccgcgccgcagcgccgcttgtatgtggcccgcgcctcggcccagcccctcgaggtctgcgctaaggagtccatcaccatccctggccgcctcggagactgtcctttcacacagagggttttgttgactatagaggagaagcatctgccttatgatctgaagctagttgatctagctaataagccagattggttatttgaaatcaacccagaaggtaaagtgcctatcgtgaagctcgaggaaaaatggattggtgattctgatgttataacacaagcattagaggagaaataccctgaaccacccttggcaactccaccagaaaaagcttcagttggatcaaaaatattttccactttcattggtttcctcaaaagcaaagatccaagcgatggaacagaagaggcactacttaatgagcttacttcatttgatagttatctaaaagacaatggtccatttattaatggtggaataatttctgctgctgatctctctctgggtcctaaactatatcacatggagataactctgggccactacaagaattggtctgttccagattcactttcttatgtaaaaacatatatgaaggagagggagagaggtgtcgattggcgaatggagggtctagatgcaaaggtttgtcgcatggctgtaatatgtacatgaaatgtggtggattttgttaggaattttctagggcatagcatatctggtattcatatccaatctcctttgctttgtatgtcaaatggaaaactccttcgagactcaggtttaatttctttagtggcaaattttttggattggttaaaaaaatctctcattgtgtctcatccactttcgggttacaatgtcatatatgttactctttggttggaccgctgcag

SEQ ID NO: 62140 - DNA, 1258 bp, Zea Mays
cacgggtcagataagcttttctctccccttcgcagctgcaaccgctcgccgcgtgctccctttgtactgaaccgcatcctccccgcgccgacctgctccggcgagttaaacatggccgtcctcctccgcagcacctccgccgccgcctcgactgctggcccctcctcggcgctgctcgccaccaccttccgccgctcccgcggctgccttctgccccgtgccgcgccgcagcgccgcttgtatgtggcccgcgcctcggcccagcccctcgaggtctgcgctaaggagtccatcaccatccctggccgcctcggagactgtcctttcacacagagggttttgttgactatagaggagaagcatctgccttatgatctgaagctagttgatctagctaataagccagattggttatttgaaatcaacccagaaggtaaagtgcctatcgtgaagctcgaggaaaaatggattggtgattctgatgttataacacaagcattagaggagaaataccctgaaccacccttggcaactccaccagaaaaagcttcagttggatcaaaaatattttccactttcattggtttcctcaaaagcaaagatccaagcgatggaacagaagaggcactacttaatgagcttacttcatttgatagttatctaaaagacaatggtccatttattaatggtggaataatttctgctgctgatctctctctgggtcctaaactatatcacatggagataactctgggccactacaagaattggtctgttccagattcactttcttatgtaaaaacatatatgaagtcgattttctcaatggattcttttgtcaaaactcaagctctgacagaggatgtaattgctggatggcgcccaaaagtcatgggttaaattcatttctaaagttagacgttaaggggcggatgtagtacaggtgcatggggatacaggagagggagagaggtgtcgattggcgaatggagggtctagatgcaaaggtttgtcgcatggctgtaatatgtacatgaaatgtggtggattttgttaggaattttctagggcatagcatatctggtattcatatccaatctcctttgctttgtatgtcaaatggaaaactccttcgagactcaggtttaatttctttagtggcaaattttttggattggttaaaaaaatctctcattgtgtctcatccactttcgggttacaatgtcatatatgttactctttggttggaccgctgcag

SEQ ID NO: 62141 - DNA, 1318 bp, Zea Mays
cagaaaagttaggcaaaatgtgacaattgaggtaacaaaccaaacatgccctagatatccacggttatcgaacgcagccaaacaagcccgtgccacgggtcagataagcttttctctccccttcgcagctgcaaccgctcgccgcgtgctccctttgtactgaaccgcatcctccccgcgccgacctgctccggcgagttaaacatggccgtcctcctccgcagcacctccgccgccgcctcgactgctggcccctcctcggcgctgctcgccaccaccttccgccgctcccgcggctgccttctgccccgtgccgcgccgcagcgccgcttgtatgtggcccgcgcctcggcccagcccctcgaggtctgcgctaaggagtccatcaccatccctggccgcctcggagactgtcctttcacacagagggttttgttgactatagaggagaagcatctgccttatgatctgaagctagttgatctagctaataagccagattggttatttgaaatcaacccagaaggtaaagtgcctatcgtgaagctcgaggaaaaatggattggtgattctgatgttataacacaagcattagaggagaaataccctgaaccacccttggcaactccaccagaaaaagcttcagttggatcaaaaatattttccactttcattggtttcctcaaaagcaaagatccaagcgatggaacagaagaggcactacttaatgagcttacttcatttgatagttatctaaaagacaatggtccatttattaatggtggaataatttctgctgctgatctctctctgggtcctaaactatatcacatggagataactctgggccactacaagaattggtctgttccagattcactttcttatgtaaaaacatatatgaagtcgattttctcaatggattcttttgtcaaaactcaagctctgacagaggatgtaattgctggatggcgcccaaaagtcatgggttaaattcatttctaaagttagacgttaaggagagggagagaggtgtcgattggcgaatggagggtctagatgcaaaggtttgtcgcatggctgtaatatgtacatgaaatgtggtggattttgttaggaattttctagggcatagcatatctggtattcatatccaatctcctttgctttgtatgtcaaatggaaaactccttcgagactcaggtttaatttctttagtggcaaattttttggattggttaaaaaaatctctcattgtgtctcatccactttcgggttacaatgtcatatatgttactctttggttggaccgctgcag

SEQ ID NO: 62142 - DNA, 1421 bp, Zea Mays
cacgggtcagataagcttttctctccccttcgcagctgcaaccgctcgccgcgtgctccctttgtactgaaccgcatcctccccgcgccgacctgctccggcgagttaaacatggccgtcctcctccgcagcacctccgccgccgcctcgactgctggcccctcctcggcgctgctcgccaccaccttccgccgctcccgcggctgccttctgccccgtgccgcgccgcagcgccgcttgtatgtggcccgcgcctcggcccagcccctcgaggtctgcgctaaggagtccatcaccatccctggccgcctcggagactgtcctttcacacagagggttttgttgactatagaggagaagcatctgccttatgatctgaagctagttgatctagctaataagccagattggttatttgaaatcaacccagaaggtaaagtgcctatcgtgaagctcgaggaaaaatggattggtgattctgatgttataacacaagcattagaggagaaataccctgaaccacccttggcaactccaccagaaaaagcttcagtgttcactggtgcagagaccccgaccaaagaggcctccatcgagcgggcccggcattgaggggccgcgccaggcggcaacggaacgacaaagacttcgctacatcccgggagcgaagtccttgtcacccttggcgacgcatcgaaaggggagcccttgctaaacctccgttcagcccagccggccaaagggcatctggggactccatcatactccggaggcgactctttccctaccccttgtctagccgttgactgataggaagctcgcacaaagactcttgaggacaccgtcagcagttatgcttcgtaggcccacctgtcggcgtaacgcgcgagtgtgtaaattagtgtgtgccgtctgctgcatggatggcgctgtaattactctgttacatggaatattctttggatatagttggtagataggggtagggtcgtactttggaccaccttcccccggacgggcctataaatacgcccgtcctatagccaaataagacacgcacaacgagaagctatcattcccaccaaccgtcgtgttaccctctcatgctctgctttttgtcactgagtgtttgggtccacatgacggcgcgtcagtgcccaacaatcatccttgtcgagagcttatggttgtcacctcgaagcaacaggtgtgccatcaggcagtgtagtgagatcagcccccctcaacagctcctctagtttgtgtagttcctctaacacccgtggctagaactggtgtaggagacagtgtggtactgttcctatttactctaacaaccctctgcagttacaatggcagcactgcaggcggtgagactagagaagaagctgacaggctaatatccccctgtggtcataatg

SEQ ID NO: 62143 - DNA, 2405 bp, Zea Mays
ccgttgtccgcttcacttggagtctccgccgccgacgccgcctccgtctccacctgaccaccaccacctcgccgcgcgcggacctgaccgatcgaggtcgacgacgatggccgctggcggcgccggcgcgtgccctccgccggggctgggcttcggcggggagtactactcggtggtggacggcgcgtgcagccgcgacggcagcttcttcggcgggaagccggtgctggcgcaggccgttgggtacgccgtcgtccttggcttcggcgccttcttcgcgctcttcacctcattcctggtgtggctagagaagcggtatgttggatcgcagcacacctcggagtggttcaacacggccggacggagtgtcaagaccggcctcatcgccagcgtcatcgtctcccagtggacatgggcggcaacgatcctgcagagctcgaacgtggcgtggcagtacggcgtgagcgggcctttctggtacgcgagcggcgccaccatccaggtgctcctgttcggagtcatggccatcgagatcaagcggaaggcgcccaaagcgcacaccgtctgcgagatcgttcgcgcccggtggggtcgagcggcgcacgctgtgttcctggcgttctgcctcgccaccaacgtcatcgtcacggccatgcttctgctcggtggctccgccgtggtgaacgcgctcacggccatcaacgtctacgccgccagcttcctcatccctctgggcgtggtcgtgtacacgctcgcgggcgggctcaaggccacgttcctcgcgagctacatccactccgtcgtcgtgcacgtcgtcctcgtcgtcttcgtcttcctcgtctacacctccggcaaccggctcggcagcccccgggtggtgcacgaccacctcactgccgtggccagcgcggtgcggaactgctccgccccgctctcgcaccctgaccaggcatgcggccccgtgcacggcaacttcaagggctcctacctcaccatgctcagctccggaggcctcgtcttcggcatcatcaacatcgtcggcaatttcggcacggtcttcgtcgacaacggctactggatgagcgcgatcgctgcgcgtccgtcgtcgacgcacaaggggtaccttctgggtgggctggtatggttcgcggtgcccttctcgctggccacctcgctgggtctcggcgcgctggctctggacctccccatcacggcagccgaggcggcgaaggggcttgtcccggccgccactgccaccgcgctcatgggcaagtccggctccgtcctcctcctcatcatgctcttcatggctgtgacctcagccggctcggccgagctggtggccgtctcctccctttgcacctacgacatctacaggacctacatcaacccggatgccacaggcgagcagatcctgcgtgtgtccagggccaccgtcctcgtcttcggttgcctcatgggtgtcctggccgtcatcctcaatctggtgggtgtctccctcggatggctgtacctggccatgggcgtcatcattggctccgccgtcatccccatcgcgctgctgctgctgtggagaaaggccaatgccttgggcgccatcctcggcgctgtcagtggctgcgtcctcggcgtcaccgtctggctctcggtcgccaaggtgcagtacgggcgcgtggacctggacagcaccggccggaacgcgccgatgctggcaggaaaacctggtgtccatccctgcctggcgtggccgcagcaatacgactgggagagcagccggcagatcaccacggtggagagcgtccctgccgacagtgacctggcggaggaactcaaggaggagcggctggtgcacgcgaagcggtggatcatcaagtggggtgtggccttcacggctgtgatcgcggtggtgtggcccgtgctgtcgctaccggcggggaggtacagcgccggctacttcaccatgtgggctgtcatcgcgatcgcctggggcacagtcggctcagcggtgatcatcttcctgccgctggtggagagttgggacactatctgcaaggccatcatgggagacatgcccgaggcggaggagcgttaccaggagatgcagaaggagaaggaccttggcaccatggagatggtgcatcctgcatccggtacccgcccatccattgtcgccaatgacgatgaagataatctttcgctagcttaaaattaaatattaaagctattcttccgtactgatgaatccgcagattcagtgtatatatatatcaggctagcagaagctatatatctttgtgtatatcctaccgcatagtatttgtgcactcaataaatctcaaacggaacaaaccgtaaacttgttcgattaggtgtatttcattttagtccataaattactgaataag

SEQ ID NO: 62144 - DNA, 1894 bp, Zea Mays
atactgaagcgattcgtttgctgaccgcctcaccggccctcctcctgctgttaagcccagaggccagagctcccgtcccgagggtttcagagatcgcatccctggtccgcgggatccgatgagatgcgtgggtactcccgcagtccgaactcgtagcaggcatggctgaagcggccgcatcttcgtcttcgtccggatcctgcgccccgcgccgcctccatggcgccggcatcgtcagggacgcgctcacgtacaatggcctcgccgcactcccgccgcctctgccgccggcgcaggtgcaggttacggcttacggcagcggcggcggaggaggaggaggaggaggaggaggaggagggaagattatccccgcggtgcttttcatcatcgtgattctcgcggtggttttcttcatctccggcctgctccacctcctggtgcgtgtcctcatgaagaagcagcgccgccgagggggcacggcgtcagcagcggcgcgggggtctggaggggagggcggcggggcggacgctgcgttgcagcggcagctgcagcagctgttccacctccacgactccgggctggaccaggccttcatcgacgcgctgccggtcttcgcctaccgcgagatcgtcgtgggcggcggcggcgacggggacaaggagccgttcgactgcgcggtgtgcctgtgcgagttcgacgccgaggaccggctccggttgctgccgctgtgcgggcacgccttccacctcaattgcatcgacacgtggctgctctccaactcgacctgcccgctctgccgcggggtgctcttcgtcccggggctcatgggcgaggacagcccgatgttcgatttcgaggagggcctggaggaagggcggttgtccgaggactgtgacgacggatttggattgcctgggctgaaggcttcagggttggcacagacaccggtggccgagaagaaggtattccctgtgaggttggggaagttcaagaatgtcggaacccatggtgcggtggaaggtggccatgccaatgccaatgccaatgccaatgctaatcccagggtgttgactagggatgaaggggagagtagcagcagcaggttggatggaaggagatgcttctccatgggcacctatcagtatgttcttggcacatctgagctccgggtagctctccagcctggctgtatcaggaatggcactggtggtgcaatgaggggaatgcctcctggtttaagttcaatcaatgctgatattatggaggggaagaagatctgtgcacgcaacaaaggggagagtttctccgtgtcaaaaatttggcaatggtctaatcttaagggcaagctacctgctggttctgatgaatgttcggatgctgggagccttccatggatgaagaaaggaggtgctgtggatacatcgaacttatgactctctgtactggtataatgtgatagtggcctttctttagttagtgttgctcaccgaagttcttacctgtagtcatttttcttatctagttttcatgtgctgattttgattggagtgccaacctcatcgggggcttaacttttggtaatcttgccatgttagtatgttgcgccatgtacattgtgatgacttagaatgatctgattctggtctgcctaatactttgtgttgggtctcatgtatcatttgttccctccatccaaaactataggtcagtttggttatgcatctagatatgcaatgtctagatcagagtatagcttacatcgacatgtgacttctgcactccattcatttgacaaatatgcaacggaaaacatgtactgctatttcgagttactattagatgtatcacagcacaatttaactgttcatgcactagtagagtgattggcttcttt

SEQ ID NO: 62145 - DNA, 1566 bp, Zea Mays
atactgaagcgattcgtttgctgaccgcctcaccggccctcctcctgctgttaagcccagaggccagagctcccgtcccgagggtttcaggtctgttggcccctagctcctcgtctgcttgccggaccgccgctttttggtgcgacttccacatcttgtcctgacggggatcgctggtttcttcctccagagatcgcatccctggtccgcgggatccgatgagatgcgtgggtactcccgcagtccgaactcgtagcaggccttcatcgacgcgctgccggtcttcgcctaccgcgagatcgtcgtgggcggcggcggcgacggggacaaggagccgttcgactgcgcggtgtgcctgtgcgagttcgacgccgaggaccggctccggttgctgccgctgtgcgggcacgccttccacctcaattgcatcgacacgtggctgctctccaactcgacctgcccgctctgccgcggggtgctcttcgtcccggggctcatgggcgaggacagcccgatgttcgatttcgaggagggcctggaggaagggcggttgtccgaggactgtgacgacggatttggattgcctgggctgaaggcttcagggttggcacagacaccggtggccgagaagaaggtattccctgtgaggttggggaagttcaagaatgtcggaacccatggtgcggtggaaggtggccatgccaatgccaatgccaatgccaatgctaatcccagggtgttgactagggatgaaggggagagtagcagcagcaggttggatggaaggagatgcttctccatgggcacctatcagtatgttcttggcacatctgagctccgggtagctctccagcctggctgtatcaggaatggcactggtggtgcaatgaggggaatgcctcctggtttaagttcaatcaatgctgatattatggaggggaagaagatctgtgcacgcaacaaaggggagagtttctccgtgtcaaaaatttggcaatggtctaatcttaagggcaagctacctgctggttctgatgaatgttcggatgctgggagccttccatggatgaagaaaggaggtgctgtggatacatcgaacttatgactctctgtactggtataatgtgatagtggcctttctttagttagtgttgctcaccgaagttcttacctgtagtcatttttcttatctagttttcatgtgctgattttgattggagtgccaacctcatcgggggcttaacttttggtaatcttgccatgttagtatgttgcgccatgtacattgtgatgacttagaatgatctgattctggtctgcctaatactttgtgttgggtctcatgtatcatttgttccctccatccaaaactataggtcagtttggttatgcatctagatatgcaatgtctagatcagagtatagcttacatcgacatgtgacttctgcactccattcatttgacaaatatgcaacggaaaacatgtactgctatttcgagttactattagatgtatcacagcacaatttaactgttcatgcactagtagagtgattggcttcttt

SEQ ID NO: 62146 - DNA, 678 bp, Zea Mays
gtatgccgttggaaaatttatatttattcatgaaatagtataatagagggcaagcctggtgcagtggtgagagttgtctcactgagtcactactcgctaggtcacggatttgaagcgtcaccgagtcaccagggtcaaaagtctctctcactggagactgctattggaatgtggcagttgctatttgctgaaaggaactggcctcttctggatcattggtgtcagtttttacaggtcagacacaataaagccatatctagagacacatggtcccagctgctggaatttgtgaagacgaccgatccacagttatccaactacgacgacgaaggtgcctggccctacctcatagacgaatttgtggaatatctgactgagaacggactcgtccagcgtaaaagatgaacaacggggagatgcatctccaaacaatggttgggctgtacaaacatgatttatctcggtcagctcgacgcccagggcctgatattggcactcctgctcaattcattcaccaaactgttggcatatcattgaatttgcttataaacgtggggaaacataacttgcctgggaagtggtggctgtcagcctgcgatcgtgaactgtaacttatcgaaaatgcaacggagtttgggactctactatatgatttgtttcagtttttcttagggcttg

SEQ ID NO: 62147 - DNA, 974 bp, Zea Mays
agaatactggattttcataatgtgagaaggttgcccttcaggcactgaaagctagtgattggcacttggaaggagcttttgacttcttctatagccaacctcaggtttctgtggtcaatactcggcatcttgaagatattttcaacagatataaagaacctgatgctgatatgataatggtggaaggaatatctcaattttgcaatgatctgcaggttgatcctcaggatattgtcatgcttgtcatatcatggcacatgaaagccgccacaatgtgtgaatttactcgtcaggaattcattggtggactgcaatcaattggggtagattcaatcgagaagtttcgtggaaaattaccatcattacgagctgagctaaaagatgacaataaattccgtgatatatacaactttgcattcacttgggcaagggaaaagtctctctcactggagactgctattggaatgtggcagttgctatttgctgaaaggaactggcctcttctggatcattggtgtcagtttttacaggtcagacacaataaagccatatctagagacacatggtcccagctgctggaatttgtgaagacgaccgatccacagttatccaactacgacgacgaaggtgcctggccctacctcatagacgaatttgtggaatatctgactgagaacggactcgtccagcgtaaaagatgaacaacggggagatgcatctccaaacaatggttgggctgtacaaacatgatttatctcggtcagctcgacgcccagggcctgatattggcactcctgctcaattcattcaccaaactgttggcatatcattgaatttgcttataaacgtggggaaacataacttgcctgggaagtggtggctgtcagcctgcgatcgtgaactgtaacttatcgaaaatgcaacggagtttgggactctactatatgatttgtttcagtttttcttagggcttg

SEQ ID NO: 62148 - DNA, 1034 bp, Zea Mays
aaattcagaaacctgggtcctctgggtatcacaaattataatggcatctttagaatactggattttcataatgtgagaaggttgcccttcaggcactgaaagctagtgattggcacttggaaggagcttttgacttcttctatagccaacctcaggtttctgtggtcaatactcggcatcttgaagatattttcaacagatataaagaacctgatgctgatatgataatggtggaaggaatatctcaattttgcaatgatctgcaggttgatcctcaggatattgtcatgcttgtcatatcatggcacatgaaagccgccacaatgtgtgaatttactcgtcaggaattcattggtggactgcaatcaattggggtagattcaatcgagaagtttcgtggaaaattaccatcattacgagctgagctaaaagatgacaataaattccgtgatatatacaactttgcattcacttgggcaagggaaaagggtcaaaagtctctctcactggagactgctattggaatgtggcagttgctatttgctgaaaggaactggcctcttctggatcattggtgtcagtttttacaggtcagacacaataaagccatatctagagacacatggtcccagctgctggaatttgtgaagacgaccgatccacagttatccaactacgacgacgaaggtgcctggccctacctcatagacgaatttgtggaatatctgactgagaacggactcgtccagcgtaaaagatgaacaacggggagatgcatctccaaacaatggttgggctgtacaaacatgatttatctcggtcagctcgacgcccagggcctgatattggcactcctgctcaattcattcaccaaactgttggcatatcattgaatttgcttataaacgtggggaaacataacttgcctgggaagtggtggctgtcagcctgcgatcgtgaactgtaacttatcgaaaatgcaacggagtttgggactctactatatgatttgtttcagtttttcttagggcttg

SEQ ID NO: 62149 - DNA, 1175 bp, Zea Mays
tccagtcattgtggttatcgggttgggtcgggccgtatcttcgtctgcatacacacacacacgcgctggtttagactcagcacacagcattcattcagctagcgagcgagagagaggggaacaaaaaggaggggcgaggaggacagggagccgagcgcaagagctgaggcttcgccgcgaaaccccagacctcgcgccgccccttcccctccgcggcgtcgtcctcgcacgctctccgatccaagatgtataagctggggagaggaaaccgcgacaaggtgcagcagttcatgaccattaccggcgccagccaacctcaggtttctgtggtcaatactcggcatcttgaagatattttcaacagatataaagaacctgatgctgatatgataatggtggaaggaatatctcaattttgcaatgatctgcagcttgtcatatcatggcacatgaaagccgccacaatgtgtgaatttactcgtcaggaattcattggtggactgcaatcaattggggtagattcaatcgagaagtttcgtggaaaattaccatcattacgagctgagctaaaagatgacaataaattccgtgatatatacaactttgcattcacttgggcaagggaaaagggtcaaaagtctctctcactggagactgctattggaatgtggcagttgctatttgctgaaaggaactggcctcttctggatcattggtgtcagtttttacaggtcagacacaataaagccatatctagagacacatggtcccagctgctggaatttgtgaagacgaccgatccacagttatccaactacgacgacgaaggtgcctggccctacctcatagacgaatttgtggaatatctgactgagaacggactcgtccagcgtaaaagatgaacaacggggagatgcatctccaaacaatggttgggctgtacaaacatgatttatctcggtcagctcgacgcccagggcctgatattggcactcctgctcaattcattcaccaaactgttggcatatcattgaatttgcttataaacgtggggaaacataacttgcctgggaagtggtggctgtcagcctgcgatcgtgaactgtaacttatcgaaaatgcaacggagtttgggactctactatatgatttgtttcagtttttcttagggcttg

SEQ ID NO: 62150 - DNA, 1773 bp, Zea Mays
atgccaatgcaccagaattagttaggagggagatggatgcttacttgaaaaataattcaaggactgttcttgtggagatgcctgaagaaggtgaaagagatgcaaatgaacagaaacaagctgttgcagaagaacctgcagctgtagcagtaccaagttctggaacaaaagttaagcaaacaaagaagattgctcaggctgccatcacttctttcactgtttctgctgcagcaaaaccacaaactcaaaaacagtccgggtcagcgacttccatgcgggcgggagatacaagcagaggggcgatgaggagcttaattgtcttcaagagcttcttccctgtcccgtttcagattttccgtagctgtgaacagaacatcagtgatgagaataagcatgaggaggcttggaaggaatatggctgcaccataatatctgatgaatggactgacacaagccaccaccatcttatcaatttccttgctaacattccagcagggacattcttcctagagtctgttgatgcttcaagtgagacagaaaatgaaaatatgttgggtgacatgttggagaagcaaattgataaggttgggaaggaacatgtggtgcagattgtcactgacaatggagccaacttcaaggcagcagagatgcttctaatggagaggatccaacatttagacacaagacaccttgtactgctcattgcttagatgtgatgttggacattgggaagatcaaagaattcaacactcatcaacaaggcaaaggtatgtggattcgtctacaagcatgggaaggttcttgatctaatgagcgacaaaaaaaggtggagatcttgtgaagtcagctgttactcgctctgctacttcatttatcacattggcaagcatgcgtaatcacaggaatggattgagaaatttattcgttagtgatgaatggcatgctaccagcttatctacctctcataaaggccggcaagttgagaacattgttgtttcaatgccattttggaataaagtggaatattgcctaagagcttcacaaccacttcttgatgctctaaggatagcagatggaaattaggcacaagcagctcttgagattatggcagccatggatgttacgaagactgtcattaaggattctttgaaagacaaatcaagttcatttaaaagaagtactagaatactatgagaagagatgggaaaaccaaatggagcaaaagatgtatggagcagccctattcttgaatccaagcaagtactttgccataagggcctgtttgtttagtcggaattgggctgaattagaatttgatacctggccaaacctgtttggcgtacgtggaattggaattcaactttccactcactttcccggcccgaatatgaagtccacgagtgattcctagcctctaaacgtggaaaaggattcttctcaccctcccgacatgtctccgccgctgttgtgacgtccgacatacgacgccgacgatctgcgcactgcatcgctcccgtcgatcctccctaggtaaaccttctcaactagatcgtgctcttcgatccattgtagggagtgtgtgggctagctaggtttgggtctaggcggggcggcggcgtcgtgcagtcgcccatggcgagccccaggaggagggcgccccgggagggagccgcggccagaggaacgctgttagcgagtccagcgtcgcgaacgcgacagacggcgaccgcatcggcacggggtccttggtgcggtggacgggatctcccacac

SEQ ID NO: 62151 - DNA, 4513 bp, Zea Mays
gtcgattgggtgtggctccgtctcctccaccgactgacatactcacaggagtttcgatccaagggtaagcttgggtcacgctaagccggccccttctaggtgctggagcgtgttgggcaggttgctcttaatggaaattcttatcacaaatcatgctttcgctgcacccatggtggttgtacgctcagcccatccaatcatatcacacatgaaggcaaactttattgcaagacccaccattctcaactgtttatggttaagggaaatttcagtcagtttgaggacaattctgggaatgcaaaagttactattgagaaactgccagaaacagaagaagccaccaagaatcctgatcaaggtgatgaagccacaaggaaaccggtagaaaatgagcctacagatgagaaaacttcaaaaaataatgttgcagctgagaaacaattgcaaagtggtgttgatgtcacaaaaccatctgagagtaccacagcagaaaatgaacgaggtactgagggtgagtcaaagagtaatgttgtcaacaagaagccgtcagaaagtattgtagaaaagccactacagaacagtgtggttgatgtaaagccatcaggaaacagtgcagccatgagaaaaccctggcaacgaagtatgcaaacagataaaccgtttctgagtagcacaagcactgtgaatccatcatcgagcagtgataccactgagaagctatcatcaagtaatggggttgatatgaaacagtctgaaagcagcacattagtaaaaacaacatgtaaacaaaattcaccaactgagaatccaccacagagcgttttaccatcggataagccatcagcgaccagtgtagatgatgcaaagccatcagaaagcagcaaagtgataaaaaaaccatggcaacgcaatatggctgccgagaagcaattacagaacagtgcaccatcacagaaaagtgtagctactgataaaccatcaccaacaaccggcatgaagtcattagataacaccacagaagttaaaagtccatgggggcgcaggatgttcaataacaagtcactaaagcgcagtgtagatactgagaaatcttctgaaaccagtgtggttgatgtgagacctggggaaaccagtacagtagcccctgtgccacagcaacaaactgaaaatgttgagaaaccttcagctaccagtgcagatgatgcgaagagtgcagatgatacgaagagtgcagatgatgtgaagccatcggttgccagtccagatgcgaagagcacagatgatgtaaagtcatcggagaataatgcggcagtagttagaaagccatggcaacgcaacataggcactgggaagcaacccctgaccactgtagttggtccaaagacgactgaaacaagtggaactgtcaaaaggttgtggcagcgcagtgctgcaactgcatcaaaaagtggtacggctgttgtgacaccattgcaaagcagtgtggttgtctccaagccgttccaaagcaacgtagctgtgaaaaagacatggcaaagaagtgtaactccagaaaaccagctagagagtaatatgtctagcaataagccattgccaagcaaggtggttgttgagagtctactgcaaagcaacaccgttgagaaagtgtttcagagtactgtacctactgaggaaccacagaaaggcatcatggccactgaaaatcaatcgcagaccatcaaagttacaaagaagagcaatgaaacatccatggagctatcagtaacaagtgagacaaccaaaccgccaccacttgctgcaaccgtgttgcaaagtgatgtttccacagaacaaccatcacaaactgatatgcctaccatggcacctagtcagatccctgagcccaccgagaagccatcagaaagtgattttaatgctgagaagttatcagaaagtgttgttaaagctgagaagtcatcaacgactgacactgctgctgagaaaccacttccaagtatgatcactgagaaggtagaaagtgtagcaggcacattgaagccatctcaaagtgatacagcccttcaggagatcttagagaggaatatggctactgaggaaatactgcaaactgccatggctgttgaggatgcacctccaaccaatttgatcaccgagaagtcattaatgaaagatgcttcagaggagccagttcaaactaacgaaccatctgagcagccactgaaaactgaagagattgagaagccacaacaaagtgaaaagattgctacggacacgagagggagtgaagtatctactgaggagatgctagagcttgaaagtaatgccactaaattaaacaaggatcaatcagaacttgaagggctttcatctggtaggaatcctccaaacttccaaagcaatccaaatgctgggcagcgatcagagtccaaaggcattgtggccgagaaggcagctgaccatataatggaagctgaagatgatgtggatgctgagcactcatcagaatctcaaagcgttgcacctgctgaggttcgaaaggagcaaccatcagaacatcaaaaggatgtggatatggagcagctattggaacctcaaaatcaggatcatccttggaatccactagatcctgttagtgatacagctgccaaggattcatcagagcctaaaagtgacatagctacagaaaaacctgcagaatctcaaaacaatgcagaacagtcagttgagcagcaatcagaaccgcaaagcgataaatcaactgagaggccagaagtgcatcaaagtaatacatctaatgatgagctttctaggcttcaaaacgatgcaggtactgataaactatcagtacagtcatcagatcctgagagcaatgcatctgtcagtaagccatcagagtctcaaactgatgtggctaccatggaggcactggaacctcaaattgatgctcctcctgataaggcaactgaccagccagtgaaacctcaagatgatgcatctgctaagaatccaatgggaactgaaagtgatgctgtttgtgataaaccttcagaaagcagctcagatactgaaacacttcttgtatgccatcagaacagcagcataaccactgatgaacctgtacaaggtggcatttcttatgatacaccacatcagagaagtgcacccatagaaacaacaccaggaagtgaaacagttgttgacgattgcatacatcacgaagataccagcagcaaaccatcagaggaaaacaaagctattgaggagccagaagaggtgagtgccaagctgccagatgaccatgtaacttctgagaagtcgtcagaggaagacaaagaaaacgcagaggcatcagtagacagtgctcccctggggaacccattggaggtcaatgaggagagctccaatccttcaggggatactgtaactcctgagaagccactggaggaggataagacgagcgcagagccatcagaaagcgatgcatcctttgggaaaatattggaggccgatgaagtgagtgccaacccatcagaggatattgcaactcctgagaagccactggaggaaggtgtgggaagtgtggaaccatcagaagacaattctgttcttgataaaccattggaggaagaagaggttgatgccaaaccggtgaaggacgttgtaactcccgagaagccattggaggaaggctcaacaactgcagagccattagaagacaatgctgcccatgaggaagcaaaagaagaagatgaggtgattgccaagcccctgtccagtgtggcacttgagaagtcactggagggaagtgaggcaagtgtagagccatcggaagacaatgctgctcttgagaaaccatcggaggacgacgaggcaaatgccaagtcatcagaggacagtgtatatgtggagaagccacaacaggaagaagatgacaacggtgtcaaggcattagaggagggcgtgtcccctgagaaatcagccgctggcaaaccattagaagaagacccagtccatgagaagccagcggacgcagtagctgagccgtcatctcaggacgacactgccactgaaaagccctcagctacaactgacactgcagaaactgcatgagacatcagttagctggttaaagttagttagcaacagttttaaacggagtgtggatcgaatactattggtcatagttcggcgtggcttctgtttgtttttttttttggtggggtgggggtggggtataatgcttgagttgtaaaatttgagggaaagaaactatagtattgatttggtttttttacaagcaataatcccctcctccacatgttaggaggaggataccattgaagttctatacataggatttgtgtgcggtttgattttttgtttggaagttgtactttgtaatcgattttgtgcaaatatgactgtgcttgctcattattcggttttctgcgtgtaaattgatctagcaagattttatgtgcaaatggtgtggctaagctttcaataatactag

SEQ ID NO: 62152 - DNA, 1173 bp, Zea Mays
tgacaatcatatgatatattaggtatagatcatgatcaatgtctggcaggtaaactacactaaacacatcaattatttcttatgcaatatcctcagatatccagatatctctgtgtgcgcgtgcgctaggtgatgatcacccacctttgaatgacttaacaaatttaagttattcgtgatctttttaagtcatttcaatgtgggtaatcatcacctaagtgttgtgtgtttatatagaactaaaattactaaaatatttttgtttctctggctacatgatagggagacattacatttcatgattgtcctgtgctctaatggagtagcgaataaggtacattcagttaccatagcatacttgtagtgtaggagttcaaaatctaagacactggagagaaatggcatcaagtgaaagacactacctcgagttcctgttaacgaactccctccctcataatctcagccattggacttctttgaacctcaaaaattaagaaacaacagtaacctatggttataccgttatagcagaaagaaacagcttaacagcatatcattagctgagggctactctaaacatatccctatgggtaactgcagatgtaatagcacatatgatttattaactgcttattcagctccccactgcaagtatcaagcagcattgttaactcagcctcgtcgtccttaatgctgcagcgatggttgctccggacatttgaaattccagtactgatctgcctgccaccagtggagtcgctgattggcctatcagccacagcgtcacaactcacaacagccagcagctggtggaagtggtggctcgggagactgcagaggcatggtggggccagagatagtaggagtcggtgatggaagcaaagactgtaggtggcggaggcgtgggagccgcactgggaatgcgctccagtgctgttgccgagacatggtgcccagcaccatttgccaaacaggacttcagcagcatactcttcagatcaagcaacatatcattttcaggacagttcatccagaaaatcaagtatgcatgtatattttggaggtcttgtcatggtaagaagctttcctacaaaactgtactgatagcactatataggatatgctatcatatgttcaaataaataaatggacaatagaaaatcaccaataatc

SEQ ID NO: 62153 - DNA, 958 bp, Zea Mays
ggaaacagcacttgtttcataagcaataacaatttgaagatagcaacataagcacaagtttcatggcagcaacccaacaaatatggcatgaatatccatggcaccaacacaagcagataatggtttacaatacaagcaaacaatggttctattgaaagaaaaaacatgggccaaccccagcatcaactctcctttacaaatatcaatgaatttcccccaattggtatcactgcactctgctttctcagccatgctttaatcaagcaaacaaatatttcactgaattcagttagcataacagatctcgcagccctgctctgaatatttttttttggtactagaataacatctagcaagcactaaaagaacatccatcaaaggatgacagagtcaaaaaaaatcaataggataacagtgttaaattctaataacaggttgtactatgcaagagatgccatggaaattaaaggatatcacctctatgcactagtatatttttctatattacattcacagcagtccaagacaaactgaaatttgatcacgtcaatgaaatcacctgaaaactataagccatatgacatcactgaaatcacttgacaattcaccgcattgaaaaaaaaagattggacaattcaccatcatggcttatcatgattgctgtatccagctatccatacatgatgcagattttgttggacagattgcaagatttgaggaggcagaaatcagaaagctgttattgaacagatgcagagattcggtgctttcctgtaaagctgacaaggggggaggacagcagcagggggagggcattgacgtacctgggggtggcctctggccagcagggcacagccgtgtggtcagccagcaagctgtgatgctcgctcgagcaagagacagccaattgtcgcgacatgcggagagggattgctggagatgggttgccaggaggtga

SEQ ID NO: 62154 - DNA, 656 bp, Zea Mays
gttaaaatgaattagttatggattttacaaagtttctagaattatttttatactaaaatcaattttcagatttaattctatatatatatatatatcagggatcctgagctgcgtgcactattttataaaagcttagggactaattcgagacaaataggaccggtttgcaagggttttacacaggagaggtactgcgggttgaatatgcaaaagaataggggctctttagcaaaagagcttggccgaatgggtacttgcatattttggctgcctgatcccgatctcacggtgcagcttagatttgggcgctatgaatcggtacgtgatacatgccattggattgaagatcgatggcccaggagacaaccacgcacgatctgacctaatccgtccgattgtaaataaacggcttggatcctattacgcgacgaagaggtatcctgctcctattctcgaccctccgtttgagtccaacgaccgctctctttctctcaccctccggtcaccatagcgacagcgcagaccccacaggcggaggtggacacgccggagaacatgcagtcggcgccacggagccccaactccctccccgaatggttctaaacgttctacgtaggaagatgagtcgattagggagtcacttactgcgattcata

SEQ ID NO: 62155 - DNA, 1230 bp, Zea Mays
gtgattgcgtccgcctccttcaaccctatccacatctggcacagaggaaaattggctacggtacaaaacaccgaggcatcgatggactcttccaccagctgacagctatgatttcccctgctcacctcgccttcgccgccgccttcctcctcgtcgtccggtcgtcggcgcctggcgctgctgccgcccgcccgatcttcgatggcaagccatccccctccgaggccaccgccactgcgaggtggctcgccgcccagaacacgtggggtgtcctcagcacaatatcaagtgacttaagtggagctccatttggcaatgtagtttcatatagtgatggagtaccaggcgagggccgtggaataccctacttttatctgacaactctggatcccagtgcaagagatgcactggaagatgaaaggacctcttttacccttagtgagttccctctgggaacttgtggggaaatagatcctgaaaaccccacttgtgcaaaacttactcttaaatggaaaggtactaaaaattacatccatgataagatgatcgatcactcgccgtttgtatgcatttagcctatttgtttagttgtgtttgaactgacaatgatctatttgggcctgaactggttttctacctataaatttcacagctgatgtttctgtagaatgaatacacgctgatgggcttgaactgtcactatttgggccatgggctgtatacttatagctgcatgtgtgttttcatttcatttgaagatggttgaccttcagtcatctgaagcagatttggccaagtcagcactttttaccaaacatcctgaaatgaaggattggccaaagaatcatcatttcaaaatcttcaaaatggaaatcgaaaacatattcttgattgattggtttgggggtcctaaacccatatccccctcccagtaccttgaatttggaagaaatcagggctcattgatgtactcataagcgaagaatgcttcatcgatcaatatcccgtctgtgtatgctcttctcaaaaatgaaatccatattgcacatattgtaaagacatctctgtgcacggaataaacctgtagtgttattaaaatgaaatccatatggcacatattgtaaagacatctctttgcatagaataaagttttagtgttattattattgattatgttgtttaattatcacatcttcgtgaacaattactttacaaaaaagaagtctacag

SEQ ID NO: 62156 - DNA, 1682 bp, Zea Mays
gtgattgcgtccgcctccttcaaccctatccacatctggcacagaggaaaattggctacggtacaaaacaccgaggcatcgatggactcttccaccagctgacagctatgatttcccctgctcacctcgccttcgccgccgccttcctcctcgtcgtccggtcgtcggcgcctggcgctgctgccgcccgcccgatcttcgatggcaagccatccccctccgaggccaccgccactgcgaggtggctcgccgcccagaacacgtggggtgtcctcagcacaatatcaagtgacttaagtggagctccatttggcaatgtagtttcatatagtgatggagtaccaggcgagggccgtggaataccctacttttatctgacaactctggatcccagtgcaagagatgcactggaagatgaaaggacctcttttacccttagtgagttccctctgggaacttgtggggaaatagatcctgaaaaccccacttgtgcaaaacttactcttaaatggaaaggtactaaaaattacatccatgataagatgatcgatcactcgccgtttgtatgcatttagcctatttgtttagttgtgtttgaactgacaatgatctatttgggcctgaactggttttctacctataaatttcacagctgatgtttctgtagaatgaatacacgctgatgggcttgaactgtcactatttgggccatgggctgtatacttatagctgcatgtgtgttttcatttcatgttagtaatgctaatgccttatgtatttctcataattaaacttttcgactggatcatgaagttttcaataaaaagaagggacaactcggtggtatcaatttctacaatcatgaaaaaccacatggaagtagcaaattcttataaattataattgtcacgacaactcggtggtatcaatttctacaatcatgaaaacatgtatttgaggctgtctcctcttaatttatctcttatggtaaaataatagaaagttaaagagtatatttttttatcacatgttagatttaacgcagtacgattcatcagagaagaaaatccttccctttactcctctcccacaatagacataagttgaatactataacatatggtttacaaactattatatattgtggatgccacattgctgtactcgtttttttccatatgataggcatttgctatttttgcagttgaagatggttgaccttcagtcatctgaagcagatttggccaagtcagcactttttaccaaacatcctgaaatgaaggattggccaaagaatcatcatttcaaaatcttcaaaatggaaatcgaaaacatattcttgattgattggtttgggggtcctaaacccatatccccctcccagtaccttgaatttggaagaaatcagggctcattgatgtactcataagcgaagaatgcttcatcgatcaatatcccgtctgtgtatgctcttctcaaaaatgaaatccatattgcacatattgtaaagacatctctgtgcacggaataaacctgtagtgttattaaaatgaaatccatatggcacatattgtaaagacatctctttgcatagaataaagttttagtgttattattattgattatgttgtttaattatcacatcttcgtgaacaattactttacaaaaaagaagtctacag

SEQ ID NO: 62157 - DNA, 994 bp, Zea Mays
gtgattgcgtccgcctccttcaaccctatccacatctggcacagaggaaaattggctacggtacaaaacaccgaggcatcgatggactcttccaccagctgacagctatgatttcccctgctcacctcgccttcgccgccgccttcctcctcgtcgtccggtcgtcggcgcctggcgctgctgccgcccgcccgatcttcgatggcaagccatccccctccgaggccaccgccactgcgaggtggctcgccgcccagaacacgtggggtgtcctcagcacaatatcaagtgacttaagtggagctccatttggcaatgtagtttcatatagtgatggagtaccaggcgagggccgtggaataccctacttttatctgacaactctggatcccagtgcaagagatgcactggaagatgaaaggacctcttttacccttagtgagttccctctgggaacttgtggggaaatagatcctgaaaaccccacttgtgcaaaacttactcttaaatggaaagttgaagatggttgaccttcagtcatctgaagcagatttggccaagtcagcactttttaccaaacatcctgaaatgaaggattggccaaagaatcatcatttcaaaatcttcaaaatggaaatcgaaaacatattcttgattgattggtttgggggtcctaaacccatatccccctcccagtaccttgaatttggaagaaatcagggctcattgatgtactcataagcgaagaatgcttcatcgatcaatatcccgtctgtgtatgctcttctcaaaaatgaaatccatattgcacatattgtaaagacatctctgtgcacggaataaacctgtagtgttattaaaatgaaatccatatggcacatattgtaaagacatctctttgcatagaataaagttttagtgttattattattgattatgttgtttaattatcacatcttcgtgaacaattactttacaaaaaagaagtctacag

SEQ ID NO: 62158 - DNA, 764 bp, Zea Mays
catgctcctcataatggcgccttggaaggagtacctgcatgggaccaatggaaaatgtttcagattacagaaatttctaaaatgcgatgttttttcatggtcgcacatgcatggagatacctggaaggcgcgggtacttttttggagtggcacgttctttgacgtatagaacagctgttcgttgaccatgaggtcccattgattcaactgagaacagaaaaaggtttaccatgttaccagctttatgtttattgcaacctgaaaggctggaaaagatgttgcagcaaaataatggagtacagtaatgaccacaactgcacagggataggtcaacatttgtgtttcacttcaaccaacataatcgtatgatatattacctctattctcaaatatttgtcgctagtttatttttaaaataaaatataacaaataaaaaagaacggagggagtatttttttttctctcgaacactagcattgggtatcccattccagaatttacagatgaaatgacaaataaaaggcataaaaatgcaaagcagcaatagtatcgcatgacgttgaaagtacataggcaagttattataactcagaaataactcactaaagaaagccatcgcttagtcaaacaggagtggaaatcgctatagacaacatgagctagtattaactcagctacttatttatttattttggtctgtagaacactcagggggtgtttgggaacaaagtttttctgcagttttggaagaatactgcagtatt

SEQ ID NO: 62159 - DNA, 529 bp, Zea Mays
cacagttgggaaggcattcattactgcaacttttatggtgtttggaggagcaacagctgtgctgttgtacacagcagataagctacagttgcattcagtagatgatgttaaaactaaaggaaaagatgcactgcagccacgagctgatatgattaaagaacaaatagctccattaagaagttgggctgaagaaatgtcccgaaaatggcatttcgaaggtggtaaagaagctaaggagaagtctggcatcgttaaagaactttcaagaattttgggctccaggactccccctggttgatcaacaatgacatacggctgttgtaaatccaccgtccactttgttgtatgcgtccttatcgtttccatatgtttgtgtataggaaacaaaacatcctgacatctagtttggatgtatatattggagtatagaattggaattggaatcagcttttctaaattttgttgtttggttgcacttggaatttagatttggaatcataggcctaattcactgaaattggactataac

SEQ ID NO: 62160 - DNA, 1052 bp, Zea Mays
ccggccattctcaatcgggaaagcgtcgaaaacccaaatccaaacgtcgccgcaaaccgcgcgatccccaggcccaaagcgccgccgttcatgagcttcctcgccggccgcctcgccgccaaggagggcgcgtacttcctccaggagtcaaagactgccgtcggccgcctcgcggagaagctcccgccctccgcttcggcgcccgggggtgcgtcggcgcagccctcccccgacgtgctaccggagatcctccgccactccgtgcccatcaaggggacgccgcccccggccgaagcctccctctccgcgtcctcccgctgggccctcccgccgggcggcggcgaggctgcgggcttgcaccccgacgcgctcaacccgctccgctcctacgtctcgctgccgcaggccaccttcggccccaaaagatggcagcttccgaacgaacaacctaactacttggcgtcaacagcaaatgaaaggcggcgagatcgggccccacctcccttggaccctgagaatttgaaagccttgggaaggcattcattactgcaacttttatggtgtttggaggagcaacagctgtgctgttgtacacagcagataagctacagttgcattcagtagatgatgttaaaactaaaggaaaagatgcactgcagccacgagctgatatgattaaagaacaaatagctccattaagaagttgggctgaagaaatgtcccgaaaatggcatttcgaaggtggtaaagaagctaaggagaagtctggcatcgttaaagaactttcaagaattttgggctccaggactccccctggttgatcaacaatgacatacggctgttgtaaatccaccgtccactttgttgtatgcgtccttatcgtttccatatgtttgtgtataggaaacaaaacatcctgacatctagtttggatgtatatattggagtatagaattggaattggaatcagcttttctaaattttgttgtttggttgcacttggaatttagatttggaatcataggcctaattcactgaaattggactataac

SEQ ID NO: 62161 - DNA, 2903 bp, Zea Mays
cctagtgcagtcagccaggccaggatggcgctgacgagcggcagcatgaagctgacgccgttccagcccgccaccgggctgcagccagcagcctacatgcaaatctatactctcgcccctggctccgatctgctgagctcaggccgcaattacgaataaaaaattagcctctacatcaaactgcagcttaaactaatcgcacggcgatcgcaggatccgacgagccaccccgcatctcgtgctcctcttcgcttcccaccgaaccccgcttatcgagatccaaatccagcgccagaatgcccgaggcggcgccgcccccgccgctgccgctcctggcggcggcgagctccccggcggctgctgcactgccgcgggcgaggcggcggcagcagcggagggggtggcggcgcccgcgcaggttgctggtctggggcgtcctcgtggcattcttcttcatcatgaactggtggatgttctcccgacttcaggacccctcggcgcgcccgcacttccggttgaggcgccacccaccccgcgcgcccgctactgtcaattcgtcgctctcgactctgaggtggctaatgctgctaaggggaagagggcacatagggttatgctcactcgattgcttgctttggcaggccatgctttggcagaggcagagaccaggcctgaacctaaggatttgtgggaagagccgataaatgctactttgtggcgaccgtgttctgaccaaagggattggaaagcctcagagggaaccaatggctacatcatgatcagtgcgaatggtggcataaaccaacaaagggttgcgatttgtaatgcagttacaatctcgcggttgctcaatgcaactcttgtcctcccaaaattcttgtacagtaatgtttggctggacaaaagtcagtttggcgatatatatcaggaggaatattttatcaaatatctgaaatctgatattcagattgttaaggatcttccagtagagctgcagtcattagacttggaggcgattggtagcctagttaatgatacagatgtcatgaaagaggcgaagcccagtttatacatgaaaaaaatactgccaattttactgagaaacagagttgtgcactttataggattcggcaatcgcttatcttttgacccaataccttctgaccttcagagattgcgatgcagatgtaattttcatgctcttcgttttgtatacaaaattcaagaaactggtgcagttcttgtagagaggttgcatggccatagggcctcttcgtcacctttgaaggataatcttttaggccagtttgccgttaagtctgaccccagggcgaacaagagtgatgcatccaaatatctggctgttcatctccggtttgagattgatatggttgcatactcattgtgttactttggtggtggcaaagatgaggaagacgaactagaagcttatcgccaaattcactttcctgtgttgtcagaactcaagaagatgacaaagttgccctctgctgctttcttacggtccgaaggcaaatgtccccttgcacctgaagaggctgtgcttatgctagcagctattggtttcaagcgcagcacaaatatatacgttgcaggtgctgaaatttatggagggaaggataggatggctgccataagtcgtctttatcctgctttagtaactaaagaaacccttctgtctccatcagagctcgaaccatttaggaacttctcatctcagttggcagccctggacttcattgcatgcgcagctgccgatgcatttgctatgactgacccaggaagtcaattctcttcccttgttcaaggttaccgcatgtactacggtggtggggatcttcccacgataaggccaaacaagcgccggctagccagcatacttgtgaagaatgccacaattgagtggaatggatttgaaaatagagtaagaaaactcatacagcaaactaagcaagttcacgagaggcctgttgcaagaagcgtatttagacatccacggtgtccagagtgcatgtgcagaacagagcactaagatctttttttatagtttcttgtgtctataccaatactcctttttcacaagaaacactataccaatgagatcgccaaaggtagttcttttgtgctttggccgaaatctggatatgtctcttgctcttgaactactttggaaccaaaccataaaagaaaagaaaatacagtgattgagctcttgtttgtatcagagaagcaatatagcagactagcccatccattctcttactgacatgatctactgctaggcatcatgttggattttgagtattaggcagaattttgtttcatgtttgacagaagaagtggaccggggactgatttttgcatctggacaacaatgctgccatattttttttattgagatcagctataccattctgtgtatgaaggtgcatcatctgcagttgactgtcgaagtaatatattggccaaactgagcaacagcattctcatcttttaagagtgcttcaattctactcgggctaccattcaacaaatcaggctgccagagttctgtcaaccgtgtattgccatctccattgttgctaccgttgtgatggagctaagtggcatattgaccccttttttaccattcttttgcccattgtagtaccataaagagatgtatttagttaggtcgtaagtttatatcaactgaaagctttcattatcagcgagagaaacgttccttttttgtgcatgctttatacgtgctcgtccaagggcactcttgcatattaatgctttgactattttctttggtttccaatctttctttggcaatgccccgaaactgcgaatgaactcggtcagattcgtggttcgcagagtgatttacagaacca

SEQ ID NO: 62162 - DNA, 2885 bp, Zea Mays
cctagtgcagtcagccaggccaggatggcgctgacgagcggcagcatgaagctgacgccgttccagcccgccaccgggctgcagccagcagcctacatgcaaatctatactctcgcccctggctccgatctgctgagctcaggccgcaattacgaataaaaaattagcctctacatcaaactgcagcttaaactaatcgcacggcgatcgcaggatccgacgagccaccccgcatctcgtgctcctcttcgcttcccaccgaaccccgcttatcgagatccaaatccagcgccagaatgcccgaggcggcgccgcccccgccgctgccgctcctggcggcggcgagctccccggcggctgctgcactgccgcgggcgaggcggcggcagcagcggagggggtggcggcgcccgcgcaggttgctggtctggggcgtcctcgtggcattcttcttcatcatgaactggtggatgttctcccgacttcaggacccctcggcgcgcccgcacttccggttgaggcgccacccaccccgcgcgcccgctactgtcaattcgtcgctctcgactctggaagaggtggctaatgctgctaaggggaagagggcacatagggttatgctcactcgattgcttgctttggcaggccatgctttggcagaggcagagaccaggcctgaacctaaggatttgtgggaagagccgataaatgctactttgtggcgaccgtgttctgaccaaagggattggaaagcctcagagggaaccaatggctacatcatgatcagtgcgaatggtggcataaaccaacaaagggttgcgatttgtaatgcagttacaatctcgcggttgctcaatgcaactcttgtcctcccaaaattcttgtacagtaatgtttggctggacaaaaggaggaatattttatcaaatatctgaaatctgatattcagattgttaaggatcttccagtagagctgcagtcattagacttggaggcgattggtagcctagttaatgatacagatgtcatgaaagaggcgaagcccagtttatacatgaaaaaaatactgccaattttactgagaaacagagttgtgcactttataggattcggcaatcgcttatcttttgacccaataccttctgaccttcagagattgcgatgcagatgtaattttcatgctcttcgttttgtatacaaaattcaagaaactggtgcagttcttgtagagaggttgcatggccatagggcctcttcgtcacctttgaaggataatcttttaggccagtttgccgttaagtctgaccccagggcgaacaagagtgatgcatccaaatatctggctgttcatctccggtttgagattgatatggttgcatactcattgtgttactttggtggtggcaaagatgaggaagacgaactagaagcttatcgccaaattcactttcctgtgttgtcagaactcaagaagatgacaaagttgccctctgctgctttcttacggtccgaaggcaaatgtccccttgcacctgaagaggctgtgcttatgctagcagctattggtttcaagcgcagcacaaatatatacgttgcaggtgctgaaatttatggagggaaggataggatggctgccataagtcgtctttatcctgctttagtaactaaagaaacccttctgtctccatcagagctcgaaccatttaggaacttctcatctcagttggcagccctggacttcattgcatgcgcagctgccgatgcatttgctatgactgacccaggaagtcaattctcttcccttgttcaaggttaccgcatgtactacggtggtggggatcttcccacgataaggccaaacaagcgccggctagccagcatacttgtgaagaatgccacaattgagtggaatggatttgaaaatagagtaagaaaactcatacagcaaactaagcaagttcacgagaggcctgttgcaagaagcgtatttagacatccacggtgtccagagtgcatgtgcagaacagagcactaagatctttttttatagtttcttgtgtctataccaatactcctttttcacaagaaacactataccaatgagatcgccaaaggtagttcttttgtgctttggccgaaatctggatatgtctcttgctcttgaactactttggaaccaaaccataaaagaaaagaaaatacagtgattgagctcttgtttgtatcagagaagcaatatagcagactagcccatccattctcttactgacatgatctactgctaggcatcatgttggattttgagtattaggcagaattttgtttcatgtttgacagaagaagtggaccggggactgatttttgcatctggacaacaatgctgccatattttttttattgagatcagctataccattctgtgtatgaaggtgcatcatctgcagttgactgtcgaagtaatatattggccaaactgagcaacagcattctcatcttttaagagtgcttcaattctactcgggctaccattcaacaaatcaggctgccagagttctgtcaaccgtgtattgccatctccattgttgctaccgttgtgatggagctaagtggcatattgaccccttttttaccattcttttgcccattgtagtaccataaagagatgtatttagttaggtcgtaagtttatatcaactgaaagctttcattatcagcgagagaaacgttccttttttgtgcatgctttatacgtgctcgtccaagggcactcttgcatattaatgctttgactattttctttggtttccaatctttctttggcaatgccccgaaactgcgaatgaactcggtcagattcgtggttcgcagagtgatttacagaacca

SEQ ID NO: 62163 - DNA, 2843 bp, Zea Mays
cctagtgcagtcagccaggccaggatggcgctgacgagcggcagcatgaagctgacgccgttccagcccgccaccgggctgcagccagcagcctacatgcaaatctatactctcgcccctggctccgatctgctgagctcaggccgcaattacgaataaaaaattagcctctacatcaaactgcagcttaaactaatcgcacggcgatcgcaggatccgacgagccaccccgcatctcgtgctcctcttcgcttcccaccgaaccccgcttatcgagatccaaatccagcgccagaatgcccgaggcggcgccgcccccgccgctgccgctcctggcggcggcgagctccccggcggctgctgcactgccgcgggcgaggcggcggcagcagcggagggggtggcggcgcccgcgcaggttgctggtctggggcgtcctcgtggcattcttcttcatcatgaactggtggatgttctcccgacttcaggacccctcggcgcgcccgcacttccggttgaggcgccacccaccccgcgcgcccgctactgtcaattcgtcgctctcgactctggaagaggtggctaatgctgctaaggggaagagggcacatagggttatgctcactcgattgcttgctttggcaggccatgctttggcagaggcagagaccaggcctgaacctaaggatttgtgggaagagccgataaatgctactttgtggcgaccgtgttctgaccaaagggattggaaagcctcagagggaaccaatggctacatcatgatcagtgcgaatggtggcataaaccaacaaagggttgcgatttgtaatgcagttacaatctcgcggttgctcaatgcaactcttgtcctcccaaaattcttgtacagtaatgtttggctggacaaaaggaggaatattttatcaaatatctgaaatctgatattcagattgttaaggatcttccagtagagctgcagtcattagacttggaggcgattggtagcctagttaatgatacagatgtcatgaaagaggcgaagcccagtttatacatgaaaaaaatactgccaattttactgagaaacagagttgtgcactttataggattcggcaatcgcttatcttttgacccaataccttctgaccttcaggtattgctccaactagttacgtgacttcttgtagagaggttgcatggccatagggcctcttcgtcacctttgaaggataatcttttaggccagtttgccgttaagtctgaccccagggcgaacaagagtgatgcatccaaatatctggctgttcatctccggtttgagattgatatggttgcatactcattgtgttactttggtggtggcaaagatgaggaagacgaactagaagcttatcgccaaattcactttcctgtgttgtcagaactcaagaagatgacaaagttgccctctgctgctttcttacggtccgaaggcaaatgtccccttgcacctgaagaggctgtgcttatgctagcagctattggtttcaagcgcagcacaaatatatacgttgcaggtgctgaaatttatggagggaaggataggatggctgccataagtcgtctttatcctgctttagtaactaaagaaacccttctgtctccatcagagctcgaaccatttaggaacttctcatctcagttggcagccctggacttcattgcatgcgcagctgccgatgcatttgctatgactgacccaggaagtcaattctcttcccttgttcaaggttaccgcatgtactacggtggtggggatcttcccacgataaggccaaacaagcgccggctagccagcatacttgtgaagaatgccacaattgagtggaatggatttgaaaatagagtaagaaaactcatacagcaaactaagcaagttcacgagaggcctgttgcaagaagcgtatttagacatccacggtgtccagagtgcatgtgcagaacagagcactaagatctttttttatagtttcttgtgtctataccaatactcctttttcacaagaaacactataccaatgagatcgccaaaggtagttcttttgtgctttggccgaaatctggatatgtctcttgctcttgaactactttggaaccaaaccataaaagaaaagaaaatacagtgattgagctcttgtttgtatcagagaagcaatatagcagactagcccatccattctcttactgacatgatctactgctaggcatcatgttggattttgagtattaggcagaattttgtttcatgtttgacagaagaagtggaccggggactgatttttgcatctggacaacaatgctgccatattttttttattgagatcagctataccattctgtgtatgaaggtgcatcatctgcagttgactgtcgaagtaatatattggccaaactgagcaacagcattctcatcttttaagagtgcttcaattctactcgggctaccattcaacaaatcaggctgccagagttctgtcaaccgtgtattgccatctccattgttgctaccgttgtgatggagctaagtggcatattgaccccttttttaccattcttttgcccattgtagtaccataaagagatgtatttagttaggtcgtaagtttatatcaactgaaagctttcattatcagcgagagaaacgttccttttttgtgcatgctttatacgtgctcgtccaagggcactcttgcatattaatgctttgactattttctttggtttccaatctttctttggcaatgccccgaaactgcgaatgaactcggtcagattcgtggttcgcagagtgatttacagaacca

SEQ ID NO: 62164 - DNA, 2903 bp, Zea Mays
cctagtgcagtcagccaggccaggatggcgctgacgagcggcagcatgaagctgacgccgttccagcccgccaccgggctgcagccagcagcctacatgcaaatctatactctcgcccctggctccgatctgctgagctcaggccgcaattacgaataaaaaattagcctctacatcaaactgcagcttaaactaatcgcacggcgatcgcaggatccgacgagccaccccgcatctcgtgctcctcttcgcttcccaccgaaccccgcttatcgagatccaaatccagcgccagaatgcccgaggcggcgccgcccccgccgctgccgctcctggcggcggcgagctccccggcggctgctgcactgccgcgggcgaggcggcggcagcagcggagggggtggcggcgcccgcgcaggttgctggtctggggcgtcctcgtggcattcttcttcatcatgaactggtggatgttctcccgacttcaggacccctcggcgcgcccgcacttccggttgaggcgccacccaccccgcgcgcccgctactgtcaattcgtcgctctcgactctggaagaggtggctaatgctgctaaggggaagagggcacatagggttatgctcactcgattgcttgctttggcaggccatgctttggcagaggcagagaccaggcctgaacctaaggatttgtgggaagagccgataaatgctactttgtggcgaccgtgttctgaccaaagggattggaaagcctcagagggaaccaatggctacatcatgatcagtgcgaatggtggcataaaccaacaaagggttgcgatttgtaatgcagttacaatctcgcggttgctcaatgcaactcttgtcctcccaaaattcttgtacagtaatgtttggctggacaaaagtttggcgatatatatcaggaggaatattttatcaaatatctgaaatctgatattcagattgttaaggatcttccagtagagctgcagtcattagacttggaggcgattggtagcctagttaatgatacagatgtcatgaaagaggcgaagcccagtttatacatgaaaaaaatactgccaattttactgagaaacagagttgtgcactttataggattcggcaatcgcttatcttttgacccaataccttctgaccttcagagattgcgatgcagatgtaattttcatgctcttcgttttgtatacaaaattcaagaaactggtgcagttcttgtagagaggttgcatggccatagggcctcttcgtcacctttgaaggataatcttttaggccagtttgccgttaagtctgaccccagggcgaacaagagtgatgcatccaaatatctggctgttcatctccggtttgagattgatatggttgcatactcattgtgttactttggtggtggcaaagatgaggaagacgaactagaagcttatcgccaaattcactttcctgtgttgtcagaactcaagaagatgacaaagttgccctctgctgctttcttacggtccgaaggcaaatgtccccttgcacctgaagaggctgtgcttatgctagcagctattggtttcaagcgcagcacaaatatatacgttgcaggtgctgaaatttatggagggaaggataggatggctgccataagtcgtctttatcctgctttagtaactaaagaaacccttctgtctccatcagagctcgaaccatttaggaacttctcatctcagttggcagccctggacttcattgcatgcgcagctgccgatgcatttgctatgactgacccaggaagtcaattctcttcccttgttcaaggttaccgcatgtactacggtggtggggatcttcccacgataaggccaaacaagcgccggctagccagcatacttgtgaagaatgccacaattgagtggaatggatttgaaaatagagtaagaaaactcatacagcaaactaagcaagttcacgagaggcctgttgcaagaagcgtatttagacatccacggtgtccagagtgcatgtgcagaacagagcactaagatctttttttatagtttcttgtgtctataccaatactcctttttcacaagaaacactataccaatgagatcgccaaaggtagttcttttgtgctttggccgaaatctggatatgtctcttgctcttgaactactttggaaccaaaccataaaagaaaagaaaatacagtgattgagctcttgtttgtatcagagaagcaatatagcagactagcccatccattctcttactgacatgatctactgctaggcatcatgttggattttgagtattaggcagaattttgtttcatgtttgacagaagaagtggaccggggactgatttttgcatctggacaacaatgctgccatattttttttattgagatcagctataccattctgtgtatgaaggtgcatcatctgcagttgactgtcgaagtaatatattggccaaactgagcaacagcattctcatcttttaagagtgcttcaattctactcgggctaccattcaacaaatcaggctgccagagttctgtcaaccgtgtattgccatctccattgttgctaccgttgtgatggagctaagtggcatattgaccccttttttaccattcttttgcccattgtagtaccataaagagatgtatttagttaggtcgtaagtttatatcaactgaaagctttcattatcagcgagagaaacgttccttttttgtgcatgctttatacgtgctcgtccaagggcactcttgcatattaatgctttgactattttctttggtttccaatctttctttggcaatgccccgaaactgcgaatgaactcggtcagattcgtggttcgcagagtgatttacagaacca

SEQ ID NO: 62165 - DNA, 2848 bp, Zea Mays
ggcggtcctagtgcagtcagccaggccaggatggcgctgacgagcggcagcatgaagctgacgccgttccagcccgccaccgggctgcagccagcagcctacatgcaaatctatactctcgcccctggctccgatctgctgagctcaggccgcaattacgaataaaaaattagcctctacatcaaactgcagcttaaactaatcgcacggcgatcgcaggatccgacgagccaccccgcatctcgtgctcctcttcgcttcccaccgaaccccgcttatcgagatccaaatccagcgccagaatgcccgaggcggcgccgcccccgccgctgccgctcctggcggcggcgagctccccggcggctgctgcactgccgcgggcgaggcggcggcagcagcggagggggtggcggcgcccgcgcaggttgctggtctggggcgtcctcgtggcattcttcttcatcatgaactggtggatgttctcccgacttcaggacccctcggcgcgcccgcacttccggttgaggcgccacccaccccgcgcgcccgctactgtcaattcgtcgctctcgactctggaagaggtggctaatgctgctaaggggaagagggcacatagggttatgctcactcgattgcttgctttggcaggccatgctttggcagagagaccaggcctgaacctaaggatttgtgggaagagccgataaatgctactttgtggcgaccgtgttctgaccaaagggattggaaagcctcagagggaaccaatggctacatcatgatcagtgcgaatggtggcataaaccaacaaagggttgcgatttgtaatgcagttacaatctcgcggttgctcaatgcaactcttgtcctcccaaaattcttgtacagtaatgtttggctggacaaaagattgttaaggatcttccagtagagctgcagtcattagacttggaggcgattggtagcctagttaatgatacagatgtcatgaaagaggcgaagcccagtttatacatgaaaaaaatactgccaattttactgagaaacagagttgtgcactttataggattcggcaatcgcttatcttttgacccaataccttctgaccttcagagattgcgatgcagatgtaattttcatgctcttcgttttgtatacaaaattcaagaaactggtgcagttcttgtagagaggttgcatggccatagggcctcttcgtcacctttgaaggataatcttttaggccagtttgccgttaagtctgaccccagggcgaacaagagtgatgcatccaaatatctggctgttcatctccggtttgagattgatatggttgcatactcattgtgttactttggtggtggcaaagatgaggaagacgaactagaagcttatcgccaaattcactttcctgtgttgtcagaactcaagaagatgacaaagttgccctctgctgctttcttacggtccgaaggcaaatgtccccttgcacctgaagaggctgtgcttatgctagcagctattggtttcaagcgcagcacaaatatatacgttgcaggtgctgaaatttatggagggaaggataggatggctgccataagtcgtctttatcctgctttagtaactaaagaaacccttctgtctccatcagagctcgaaccatttaggaacttctcatctcagttggcagccctggacttcattgcatgcgcagctgccgatgcatttgctatgactgacccaggaagtcaattctcttcccttgttcaaggttaccgcatgtactacggtggtggggatcttcccacgataaggccaaacaagcgccggctagccagcatacttgtgaagaatgccacaattgagtggaatggatttgaaaatagagtaagaaaactcatacagcaaactaagcaagttcacgagaggcctgttgcaagaagcgtatttagacatccacggtgtccagagtgcatgtgcagaacagagcactaagatctttttttatagtttcttgtgtctataccaatactcctttttcacaagaaacactataccaatgagatcgccaaaggtagttcttttgtgctttggccgaaatctggatatgtctcttgctcttgaactactttggaaccaaaccataaaagaaaagaaaatacagtgattgagctcttgtttgtatcagagaagcaatatagcagactagcccatccattctcttactgacatgatctactgctaggcatcatgttggattttgagtattaggcagaattttgtttcatgtttgacagaagaagtggaccggggactgatttttgcatctggacaacaatgctgccatattttttttattgagatcagctataccattctgtgtatgaaggtgcatcatctgcagttgactgtcgaagtaatatattggccaaactgagcaacagcattctcatcttttaagagtgcttcaattctactcgggctaccattcaacaaatcaggctgccagagttctgtcaaccgtgtattgccatctccattgttgctaccgttgtgatggagctaagtggcatattgaccccttttttaccattcttttgcccattgtagtaccataaagagatgtatttagttaggtcgtaagtttatatcaactgaaagctttcattatcagcgagagaaacgttccttttttgtgcatgctttatacgtgctcgtccaagggcactcttgcatattaatgctttgactattttctttggtttccaatctttctttggcaatgccccgaaactgcgaatgaactcggtcagattcgtggttcgcagagtgatttacagaacca

SEQ ID NO: 62166 - DNA, 1380 bp, Zea Mays
gtcgaaggggcctccctgtcgtatatttttacagcccgtgttgggctgccaaatgtcttcattcgtcctgagggtcatgcatgtcgaagacttgaggcccatctaaactgtttaaaacccctctgaagcgtcaattgtccgagagcccattccttcttcgaccatctctgatctcctctcccggcgggaaaagaaaaaacaaacctcccttctgagctgagcctctccagaagctccagaagagccttccacggagccgatggctgcagcggcgtcaggcggcgacaccccgaagcagctcctctccatcatccgcgacttcgcctacgagaaatcgcacggcgagcgcagggtgtccgacctcaggcggcgcctcgctgatgcgcgcgccgcggcagacgtggccgcggcggagctcgacgccgcgaagcgcgcgcgggaggctgcggagcaggagtttcgcgggagccaagtgcaagacgcgatcgccgccgactccatccttgcgctagaggcgacgatctcgtgtctccatgaggagatctcgaaggccagcactgatctggacgcgctcaaaagcaaggaagacagtgagagagaagacttcattagcaagatgtatgagatgaacgcaaagataaggcaatttcaacagatggtatctctagaattagcagagtacaatcattgtgagctgccatctacagatggtgaacatgtcaaagacaagagtaaaaccgtggactcggaaggcatttcggaagagttgtcagataaggtgagcaacattgaagctgaggtgcagctcttggaagaagagtataaaaaggatctgctttatcatgataaggtccgtcaggagctggccgaagtccaagcaaagagagctcttatggaggctgttatggaagagacaaagcagttgcaggagctcggcgagcgggcagctgaactggagaaggtgcacgcttcacttgcagtggagctgcagcgtcggtacgtatgccccggctgcggagtcaataacatgcctgggctggaggaggccgcgaactagaggaggcgtcagatgatgtgcagtgcatacacaatttggtcagatgtttgacgtggggcggataggtgaacttgttaatgaggcatttgatcatactcctagtcagtagaagccttagacgagcttgtcatacacatcggcgagatgtgggttcctgtctggagttgagctataaaaagtttgaggaattactggtcctgtctgaacctatatttcctattcatataatggttgctatcttaggctatttccagtgagtgcacagtgtcaaatacatttaggctctgtttgtttggtttgagaaatgagttagtcaatcatct

SEQ ID NO: 62167 - DNA, 3386 bp, Zea Mays
taggactgataccgaatttcattgtttctccttgcccacattgtgatctcaaatcttagggaggcaaactcccactactttgccatcatagaacagatgatggaggggaatatgtggctcaatgatactattggagttattcctaaaaattcttggtcaattgacccatttggttattcatctacaatggcttatttgcttaggagaatgggttttcataacatgttaatccaaagaacacactatgaggtgaaaaaggagcttgcaatgaaaaagaatcttgaatatttgtggaggcagaactgggatattgaagaaacaactgacatatttgttcacatgatgcccttctattcttatgatattccacacacgtgtggaccagaaccagcaatctgctgccagtttgactttgctcgaatgcgtggtttcagctatgaatcctgcccatggagatctgatcctgttgagataaatcctgacaatgtggaggagagagcaacaacgcttctagaccagtataggaaaaagtcaaccctgtacagaacgaatacacttctcattcctttgggcgatgattttcgatatgttagtatggaggaagcagaggtacaattccgcaattatgagaaactttttgattacataaactcaaatcctcatcttaatgctgaagtcaaatttggtaccctggaggattacttctccacattgagagatgaagctgaaaagataaactattcacggccaggtgaactgggttctgctgagctgcaaggttttccaacactttcaggagatttttttacctatgcagatagaaatcaggattactggagtggttactatgtatcaaggccattcttcaaagctgttgaccgtgtactcgaacagacgcttcgtgccgcagagattctgggttcatttgttctaggatactgtcagaagtttcagtgtgcgaagctccccatcagtttctcacacaaactgacagcagcaaggaggaatttggcgctttttcagcatcatgatggggtaactggcacagctaaagatcatgttgtggtggactacgggactcgaatgcacacttcactgcaagatctgcaattatttatgtccagggcagtcgaagtgcttttaggagatttccatgatagatctgaccctacattattatcacattttgagtccgtgcaggaacggtcaaagtatgatgttcagctggtacataaggttcttcaccctcttgaagggaaggcacagtcagttgtcttttttaaccctttagaacagacaagggatgagattgttatggttgttgtaagtagccccgatgtttctgttctcaattcaaatggatcttgtttgccaagtcaactttcccctgagtggcagtttgtcagcgatgaaaatatttcgactggtcgtcatcgcctttattggagagcttatgttcctccactaggtttggagacctactatgtggttactgggcaggattgtgaaaaggctattcctgctgcagtgaaaacatacacaactgaacaggaattttcttgccctcaaccatatgattgttcaaagctggaagccaaaacagtggaaatgaagaactccaattacactctttcttttgatacaagtcgtggtctcctccagacagtaactcgtcacaaggacgggcaacaaactgtgataggtgaagaaattggcatgtacaaaagccatggaagcggggcatacttatttaaaccagttggggatgctcgctcaattgtcgaggaaggaggacatttcatccttactgaagggccattggttcaagaagcccattctcttccaaagacagagtggcgtaagtcacctctctcacatagtacacgcatctacaattgtggggacgctatacaggacatgctgatcgagaaggaataccatgttgagcttgttggccatgcttttaatgatagggaattgattgtcagatacaagacagatattgacaaccaaaggatcttctattctgatctaaatggctttcagatgagtaagaggcagacatatgataagattcctctacagggaaattattacccaatgccatcacttgccttcttgcaggattcacatggtaatcgattttctgtacactccaagcaatcattgggcgcagcaagcttgaaaaatggatggctagagattatgttggatcgtaggttggttcaggatgatggccgtggtctggggcagggagtaatggacaacaagcccatgaatgttatatttcatctcctcacagaatccaatgtctcagctttgcctaaaacccatagtttgcatactcttcaaccttccatcctctcgcatcgtgttggggcgcacctgaactacccgatgcatgcttttatgagcaaaaaacctcatgaaaaatccttcaagcgggctcaacagtcatttgctccattaactgcttctttgccatgtgatatacatattgtgaacctgaaggtccctcggcccctaagatttcctcacaccgaatcagcagagccaaaatttgctgttctgttgcagaggagaggctgggacgcatcatactgcaaaaggggtggactgcagtgtacaacagttggggaagagccagtaaatctgttctacatgttcaaagatttgtcagctgtgaatgtgaaggcgacttcgctgaacctcttacacgatgacccagaaatgctaggttaccttgagcagaccggtgatgttgctcaggagggagacgttcttatctcaccaatggagattctggcatacaagttggacctacaaccaccatcatcgcaggaagagtagttttagtttgtgaaaacagtacatgcatattgaacagtcctacatgacagtgaagatggatcttcccgaaatacttgatagcggcagttagatagtactggaacagcaatgctgcaatgctgcatgtatacgtgtcattttcttggcatacagttagtgcttgaacctctagaatttgctggcagttgcagccttgtcatccacgaaggtacatacacttgttcttggtattatgctcaacagatcggaagatttggggcacattgaagcagagctaacttgattacggtaaaaatgtgtgttaacacaactgtgttgctccggccaacgataacttgtatcagagcaagttttgtataattctgttttgcttgcatcctttttgtagtgccatcatcctactgtcaaaaacctgagatagtttagatacatggttcttgctttcgagatctttatattgtatgtacacaattctgcttctatgcatgcggggattgctgggaatgcttcgcccgttttctttttcagggcatttt

SEQ ID NO: 62168 - DNA, 4181 bp, Zea Mays
cgcgcacccacagacccactcgagacgacagacgatcccgcgcgaggtcagtcaggccactccatcccgaccccgaaaccggcggcgatgcatttcttctccggcagtggcggggcccgctccggcgcgctactccccaccacctccaagccgaaggcgcaccaccacctccgttccaagtcctccctctccgtgcccgccttctcccgccgccgcggggggctctactccgcgtcctccccctactcccggcgcgccctctgcctcgcggcgacggccttcgcggcgctcttcatcctagccttcatccgtctcggtttcccctcatcccgctccgctgcgctgtcttcccccacccgtcgccgcgcgcgcctcacccgcagccccgcctttcgccaccgggactcggccgcggcagccgccgtatcggctcggataggacgcgaggcgcccgtggatatcacgacgagagacctctacgacgggatcgagttcagcgacgttgacggtggtgcgtggaagcaggggtgggaggtcaagtacaggggcgacgagtgggacaccgagaagctcaaggtcttcgtcgcgcctcactcgcacaacgaccccggctggatccgcaccgtggaggagtactaccagcgccagtcgcgccacattcttgataccatcgtcgagtccctctccaaggattctgctgtggtataggattcgcgaaggaaattcatatgggaggagatgtcatacctggagaggtggtggcgcgacgcgacgcccaagatgcgagaggcattcgctaagcttgtccgtgacgggcagctcgaaattgtgagcggtggatgggtcatgaacgatgaggcaaactcccactactttgccatcatagaacagatgatggaggggaatatgtggctcaatgatactattggagttattcctaaaaattcttggtcaattgacccatttggttattcatctacaatggcttatttgcttaggagaatgggttttcataacatgttaatccaaagaacacactatgaggtgaaaaaggagcttgcaatgaaaaagaatcttgaatatttgtggaggcagaactgggatattgaagaaacaactgacatatttgttcacatgatgcccttctattcttatgatattccacacacgtgtggaccagaaccagcaatctgctgccagtttgactttgctcgaatgcgtggtttcagctatgaatcctgcccatggagatctgatcctgttgagataaatcctgacaatgtggaggagagagcaacaacgcttctagaccagtataggaaaaagtcaaccctgtacagaacgaatacacttctcattcctttgggcgatgattttcgatatgttagtatggaggaagcagaggtacaattccgcaattatgagaaactttttgattacataaactcaaatcctcatcttaatgctgaagtcaaatttggtaccctggaggattacttctccacattgagagatgaagctgaaaagataaactattcacggccaggtgaactgggttctgctgagctgcaaggttttccaacactttcaggagatttttttacctatgcagatagaaatcaggattactggagtggttactatgtatcaaggccattcttcaaagctgttgaccgtgtactcgaacagacgcttcgtgccgcagagattctgggttcatttgttctaggatactgtcagaagtttcagtgtgcgaagctccccatcagtttctcacacaaactgacagcagcaaggaggaatttggcgctttttcagcatcatgatggggtaactggcacagctaaagatcatgttgtggtggactacgggactcgaatgcacacttcactgcaagatctgcaattatttatgtccagggcagtcgaagtgcttttaggagatttccatgatagatctgaccctacattattatcacattttgagtccgtgcaggaacggtcaaagtatgatgttcagctggtacataaggttcttcaccctcttgaagggaaggcacagtcagttgtcttttttaaccctttagaacagacaagggatgagattgttatggttgttgtaagtagccccgatgtttctgttctcaattcaaatggatcttgtttgccaagtcaactttcccctgagtggcagtttgtcagcgatgaaaatatttcgactggtcgtcatcgcctttattggagagcttatgttcctccactaggtttggagacctactatgtggttactgggcaggattgtgaaaaggctattcctgctgcagtgaaaacatacacaactgaacaggaattttcttgccctcaaccatatgattgttcaaagctggaagccaaaacagtggaaatgaagaactccaattacactctttcttttgatacaagtcgtggtctcctccagacagtaactcgtcacaaggacgggcaacaaactgtgataggtgaagaaattggcatgtacaaaagccatggaagcggggcatacttatttaaaccagttggggatgctcgctcaattgtcgaggaaggaggacatttcatccttactgaagggccattggttcaagaagcccattctcttccaaagacagagtggcgtaagtcacctctctcacatagtacacgcatctacaattgtggggacgctatacaggacatgctgatcgagaaggaataccatgttgagcttgttggccatgcttttaatgatagggaattgattgtcagatacaagacagatattgacaaccaaaggatcttctattctgatctaaatggctttcagatgagtaagaggcagacatatgataagattcctctacagggaaattattacccaatgccatcacttgccttcttgcaggattcacatggtaatcgattttctgtacactccaagcaatcattgggcgcagcaagcttgaaaaatggatggctagagattatgttggatcgtaggttggttcaggatgatggccgtggtctggggcagggagtaatggacaacaagcccatgaatgttatatttcatctcctcacagaatccaatgtctcagctttgcctaaaacccatagtttgcatactcttcaaccttccatcctctcgcatcgtgttggggcgcacctgaactacccgatgcatgcttttatgagcaaaaaacctcatgaaaaatccttcaagcgggctcaacagtcatttgctccattaactgcttctttgccatgtgatatacatattgtgaacctgaaggtccctcggcccctaagatttcctcacaccgaatcagcagagccaaaatttgctgttctgttgcagaggagaggctgggacgcatcatactgcaaaaggggtggactgcagtgtacaacagttggggaagagccagtaaatctgttctacatgttcaaagatttgtcagctgtgaatgtgaaggcgacttcgctgaacctcttacacgatgacccagaaatgctaggttaccttgagcagaccggtgatgttgctcaggagggagacgttcttatctcaccaatggagattctggcatacaagttggacctacaaccaccatcatcgcaggaagagtagttttagtttgtgaaaacagtacatgcatattgaacagtcctacatgacagtgaagatggatcttcccgaaatacttgatagcggcagttagatagtactggaacagcaatgctgcaatgctgcatgtatacgtgtcattttcttggcatacagttagtgcttgaacctctagaatttgctggcagttgcagccttgtcatccacgaaggtacatacacttgttcttggtattatgctcaacagatcggaagatttggggcacattgaagcagagctaacttgattacggtaaaaatgtgtgttaacacaactgtgttgctccggccaacgataacttgtatcagagcaagttttgtataattctgttttgcttgcatcctttttgtagtgccatcatcctactgtcaaaaacctgagatagtttagatacatggttcttgctttcgagatctttatattgtatgtacacaattctgcttctatgcatgcggggattgctgggaatgcttcgcccgttttctttttcagggcatttt

SEQ ID NO: 62169 - DNA, 831 bp, Zea Mays
aaattcttgtggatataattcccaatgagaatatgtgaactccaacaaagacccatggaatgatggaagttgctggttctcactagattattagatgcaaatattttgttttatcctaaacactaactgtggcgggaataccgagggtaaaatcaaatccatcggaaagccctttgctctgaagttttaggcatttaggaactagtataagcatttattacagcaaacgaaactactgcagaactcataaatgaacaatgggggcagagggagagccgaaaaacgtagtacagattctaaatagcatcaatccatgacagatttcactggttaagcaatctgtgaatggctgcctaaaagtaacaagcgggctattgtcttacaggtgaaagcctgaaaggggaaagaagatgacgattgtcgaaagtggaaagtaagcataggaacctggagtaatggagcgaccaatagaaatactggcagatcttctcgaggatgttggtggggatctctgggaagcggacctcgccctggcgcgtctcagagaagccgcctgtggggaagacgagagggatggatgtgatgcgaggacggcgcgctgatgggaatggaagaggtgaagagtaccctacctggggatgtgagcatgttgcggagggtgttggagaccatggcggccttcctgtcaacaacgaattcgaagccctcggcgctgatgagcttgacaacgcctgcggtatcgtcgtcctcttcgtcctggggctggtggtgctcacgcggcggcggcatcctgcgaccttgagtgtctgcgacggattggtttggggttga

SEQ ID NO: 62170 - DNA, 1866 bp, Zea Mays
ctgatttcagttgtttaattttggaactatctacaggagcgtgcaaaaggcagcaccttgtatggatttaagggaggcccagctgggatcatgaagtgcaagtatgtagaactcacttcagactttgtgtatccctacagaaatcagggtggatttgatatgatctgcagtggaagggacaagattgaaacaccggagcagtttaagcaagctgaagacacggccaacaagcttgatttggatggacttgttgtcattggtggtgatgattcaaacaccaatgcctgcctccttggtgaatactttaggtcaaggaacatgaaaacccgtgttattggttgcccaaagactatcgatggggatctgaaatgtaaggaggttccgacaagctttggatttgatacagcttgcaagatatactctgaaatgattggcaatgttatgactgatgcgagatccactggaaaatactaccactttgtgaggcttatgggtcgtgctgcttctcacattacgctggaatgcgctttgcaaacacaccccaatgctgcactcattggggaagaggttgctgcaaagaagcaaacccttaagaatgtcacaaactacattactgatatcatctgcaagcgtgcagatcttggttacaactatggtgttatccttataccagaaggcctgattgatttcatcccagaggttcaaaaactcatcgcggaattgaatgaaattttggcacatgatgttgttgatgaggcaggggcctggaaaagcaagcttcagcctgaatcaagggagctgtttgagtttttgcccaatactattcaggagcaacttatgcttgaaagggatccccatggcaatgttcaggtcgcaaaaattgaaaccgagaaaatgctcattagcatggtggaaactgaactggagaagagaaaggcagaggggagatactctgcacatttcagagggcaagctcatttctttgggtacgaaggaagatgcggccttcctactaattttgattctaactattgctatgcattaggctatggcgctggtgcccttctccaaagtgggaagacaggacttatttcctcgatctgtgaggagctctccgacgcaacagaaaagataggcaccggtgttcaattatgttggcaaccttgcggctccagttgaagaatggactgttggtggaacagcattaacatcactgatggatgttgagaggaggcacggcaagttcaagccagtgatcaagaaggctatggtcgaacttgatgctgcacctttcaagaaatatgcatcgatgcgtgatgagtgggccctcaagaacagatacatcagccctggccccatccagttcagtggccctggaagtaatgactcgaaccatactttgatgctggaactcggtgctgcgctatagagatgcgtcctttactttgttcttacagtttttgggagtggagactggccactggagcagcctgcaggtctccatattgtgtgtgaaattgtttaataagaggtttgatgggagttttttgcgtagccgactggatgtagtagcaaaataagaacagggttttttagttttttttgtatgatttacgcaccaactgaccggtcttgtagctccgattctgttccccctggttggctggttgcaatctcttgagaatgaacaaaatgaagttgaaccatgagactgattcagttcgcttgcttccagtagcaggttattacacattgtcgtttctgaggtccagagatagtacgtgtcctactcttgaataatgtattcactctgttttaagttataagtcgagacttcactttacattatggaactagttgcatagt

SEQ ID NO: 62171 - DNA, 1814 bp, Zea Mays
gttatggtgctaatggaggcgatttgagactatctacaggagcgtgcaaaaggcagcaccttgtatggatttaagggaggcccagctgggatcatgaagtgcaagtatgtagaactcacttcagactttgtgtatccctacagaaatcagggtggatttgatatgatctgcagtggaagggacaagattgaaacaccggagcagtttaagcaagctgaagacacggccaacaagcttgatttggatggacttgttgtcattggtggtgatgattcaaacaccaatgcctgcctccttggtgaatactttaggtcaaggaacatgaaaacccgtgttattggttgcccaaagactatcgatggggatctgaaatgtaaggaggttccgacaagctttggatttgatacagcttgcaagatatactctgaaatgattggcaatgttatgactgatgcgagatccactggaaaatactaccactttgtgaggcttatgggtcgtgctgcttctcacattacgctggaatgcgctttgcaaacacaccccaatgctgcactcattggggaagaggttgctgcaaagaagcaaacccttaagaatgtcacaaactacattactgatatcatctgcaagcgtgcagatcttggttacaactatggtgttatccttataccagaaggcctgattgatttcatcccagaggttcaaaaactcatcgcggaattgaatgaaattttggcacatgatgttgttgatgaggcaggggcctggaaaagcaagcttcagcctgaatcaagggagctgtttgagtttttgcccaatactattcaggagcaacttatgcttgaaagggatccccatggcaatgttcaggtcgcaaaaattgaaaccgagaaaatgctcattagcatggtggaaactgaactggagaagagaaaggcagaggggagatactctgcacatttcagagggcaagctcatttctttgggtacgaaggaagatgcggccttcctactaattttgattctaactattgctatgcattaggctatggcgctggtgcccttctccaaagtgggaagacaggacttatttcctcggttggcaaccttgcggctccagttgaagaatggactgttggtggaacagcattaacatcactgatggatgttgagaggaggcacggcaagttcaagccagtgatcaagaaggctatggtcgaacttgatgctgcacctttcaagaaatatgcatcgatgcgtgatgagtgggccctcaagaacagatacatcagccctggccccatccagttcagtggccctggaagtaatgactcgaaccatactttgatgctggaactcggtgctgcgctatagagatgcgtcctttactttgttcttacagtttttgggagtggagactggccactggagcagcctgcaggtctccatattgtgtgtgaaattgtttaataagaggtttgatgggagttttttgcgtagccgactggatgtagtagcaaaataagaacagggttttttagttttttttgtatgatttacgcaccaactgaccggtcttgtagctccgattctgttccccctggttggctggttgcaatctcttgagaatgaacaaaatgaagttgaaccatgagactgattcagttcgcttgcttccagtagcaggttattacacattgtcgtttctgaggtccagagatagtacgtgtcctactcttgaataatgtattcactctgttttaagttataagtcgagacttcactttacattatggaactagttgcatagt

SEQ ID NO: 62172 - DNA, 2340 bp, Zea Mays
ccgcgatcgccatcgcctcacgcactcgcatcctcccggtcccggactacccataaaaccaccgcgacggcgacgggtccttcgcttcgcctacggcatattcccccgaggccccgaaccaaaccaaaccaaaccaaaccaaaccagcccagatcagcgaaacacactccgctctcccgagaccggacacatggcggcggcggcggtgacgtccaacggcggcgcagtggccgcaaatgggccggcgcccggccggctggcctccgtgtacagcgaggtgcagacgaaccggctcctgcacgcccttcccctcccctccgtcctccgctccaacttctcggtcgtcgtcggccccgccagctccgccgcgggcaaccccgatgagatcgccaagctcttccccaacctgttcggccagccctcggcgtcgctggtgccgtcggccgagcccgcggcgaccaggccgctcaagatcggcgttgtgctctccggtggacaggcgccgggcggccacaatgtcatctgcggcatctttgactatctacaggagcgtgcaaaaggcagcaccttgtatggatttaagggaggcccagctgggatcatgaagtgcaagtatgtagaactcacttcagactttgtgtatccctacagaaatcagggtggatttgatatgatctgcagtggaagggacaagattgaaacaccggagcagtttaagcaagctgaagacacggccaacaagcttgatttggatggacttgttgtcattggtggtgatgattcaaacaccaatgcctgcctccttggtgaatactttaggtcaaggaacatgaaaacccgtgttattggttgcccaaagactatcgatggggatctgaaatgtaaggaggttccgacaagctttggatttgatacagcttgcaagatatactctgaaatgattggcaatgttatgactgatgcgagatccactggaaaatactaccactttgtgaggcttatgggtcgtgctgcttctcacattacgctggaatgcgctttgcaaacacaccccaatgctgcactcattggggaagaggttgctgcaaagaagcaaacccttaagaatgtcacaaactacattactgatatcatctgcaagcgtgcagatcttggttacaactatggtgttatccttataccagaaggcctgattgatttcatcccagaggttcaaaaactcatcgcggaattgaatgaaattttggcacatgatgttgttgatgaggcaggggcctggaaaagcaagcttcagcctgaatcaagggagctgtttgagtttttgcccaatactattcaggagcaacttatgcttgaaagggatccccatggcaatgttcaggtcgcaaaaattgaaaccgagaaaatgctcattagcatggtggaaactgaactggagaagagaaaggcagaggggagatactctgcacatttcagagggcaagctcatttctttggcttctttgctatttgcaggtacgaaggaagatgcggccttcctactaattttgattctaactattgctatgcattaggctatggcgctggtgcccttctccaaagtgggaagacaggacttatttcctcggttggcaaccttgcggctccagttgaagaatggactgttggtggaacagcattaacatcactgatggatgttgagaggaggcacggcaagttcaagccagtgatcaagaaggctatggtcgaacttgatgctgcacctttcaagaaatatgcatcgatgcgtgatgagtgggccctcaagaacagatacatcagccctggccccatccagttcagtggccctggaagtaatgactcgaaccatactttgatgctggaactcggtgctgcgctatagagatgcgtcctttactttgttcttacagtttttgggagtggagactggccactggagcagcctgcaggtctccatattgtgtgtgaaattgtttaataagaggtttgatgggagttttttgcgtagccgactggatgtagtagcaaaataagaacagggttttttagttttttttgtatgatttacgcaccaactgaccggtcttgtagctccgattctgttccccctggttggctggttgcaatctcttgagaatgaacaaaatgaagttgaaccatgagactgattcagttcgcttgcttccagtagcaggttattacacattgtcgtttctgaggtccagagatagtacgtgtcctactcttgaataatgtattcactctgttttaagttataagtcgagacttcactttacattatggaactagttgcatagt

SEQ ID NO: 62173 - DNA, 2220 bp, Zea Mays
gccaacccacacgctgccacgcacccacggtccgcggaccgcgacccacccgacccgcgatcgccatcgcctcacgcactcgcatcctcccggtcccggactacccataaaaccaccgcgacggcgacgggtccttcgcttcgcctacggcatattcccccgaggccccgaaccaaaccaaaccaaaccaaaccaaaccagcccagatcagcgaaacacactccgctctcccgagaccggacacatggcggcggcggcggtgacgtccaacggcggcgcagtggccgcaaatgggccggcgcccggccggctggcctccgtgtacagcgaggtgcagacgaaccggctcctgcacgcccttcccctcccctccgtcctccgctccaacttctcggtcgtcgtcggccccgccagctccgccgcgggcaaccccgactatctacaggagcgtgcaaaaggcagcaccttgtatggatttaagggaggcccagctgggatcatgaagtgcaagtatgtagaactcacttcagactttgtgtatccctacagaaatcagggtggatttgatatgatctgcagtggaagggacaagattgaaacaccggagcagtttaagcaagctgaagacacggccaacaagcttgatttggatggacttgttgtcattggtggtgatgattcaaacaccaatgcctgcctccttggtgaatactttaggtcaaggaacatgaaaacccgtgttattggttgcccaaagactatcgatggggatctgaaatgtaaggaggttccgacaagctttggatttgatacagcttgcaagatatactctgaaatgattggcaatgttatgactgatgcgagatccactggaaaatactaccactttgtgaggcttatgggtcgtgctgcttctcacattacgctggaatgcgctttgcaaacacaccccaatgctgcactcattggggaagaggttgctgcaaagaagcaaacccttaagaatgtcacaaactacattactgatatcatctgcaagcgtgcagatcttggttacaactatggtgttatccttataccagaaggcctgattgatttcatcccagaggttcaaaaactcatcgcggaattgaatgaaattttggcacatgatgttgttgatgaggcaggggcctggaaaagcaagcttcagcctgaatcaagggagctgtttgagtttttgcccaatactattcaggagcaacttatgcttgaaagggatccccatggcaatgttcaggtcgcaaaaattgaaaccgagaaaatgctcattagcatggtggaaactgaactggagaagagaaaggcagaggggagatactctgcacatttcagagggcaagctcatttctttgggtacgaaggaagatgcggccttcctactaattttgattctaactattgctatgcattaggctatggcgctggtgcccttctccaaagtgggaagacaggacttatttcctcggttggcaaccttgcggctccagttgaagaatggactgttggtggaacagcattaacatcactgatggatgttgagaggaggcacggcaagttcaagccagtgatcaagaaggctatggtcgaacttgatgctgcacctttcaagaaatatgcatcgatgcgtgatgagtgggccctcaagaacagatacatcagccctggccccatccagttcagtggccctggaagtaatgactcgaaccatactttgatgctggaactcggtgctgcgctatagagatgcgtcctttactttgttcttacagtttttgggagtggagactggccactggagcagcctgcaggtctccatattgtgtgtgaaattgtttaataagaggtttgatgggagttttttgcgtagccgactggatgtagtagcaaaataagaacagggttttttagttttttttgtatgatttacgcaccaactgaccggtcttgtagctccgattctgttccccctggttggctggttgcaatctcttgagaatgaacaaaatgaagttgaaccatgagactgattcagttcgcttgcttccagtagcaggttattacacattgtcgtttctgaggtccagagatagtacgtgtcctactcttgaataatgtattcactctgttttaagttataagtcgagacttcactttacattatggaactagttgcatagt

SEQ ID NO: 62174 - DNA, 825 bp, Zea Mays
gttttcgcttgcatttggggccgctcgtcagtcgttgctcacgtgggtgcgggattgaagtgtcactgcgcccatggccccaccagtcatcccgttcgtgcgcaaacagcccgcgcaacgcgcgcaccgtgcgtgagtccgtcgccgcggactccgtgggcgcgagctcaaccacctccgcggatctcgctgctcaccccggctcggactccgattcctccggccatgctcctcggggtataaaagtggagccgctcctccccaaacaacggcgcgcagaaacaaagggagagcaggggagaaaagaagaaggttgccgccgccgcgtcgtttcctcggaacgccgtcatcctggctcggagtagtcgcaattgaggttcgcgggagcacgcgggtcgtcttcaggcttgccgccaggtgtggcgttctccagaatccagctaattcgtcgccggagtgtttttcgcggcggaaattgtggtcggccgtggccggctgttttgggcgccagatcgaccgtgaggtcacgagaatctgaaaatcaccctggtacctggaatctcaagtctcaggcaagttgtgcccttgatcacttctttttacccactcatgttctaattaatcataatgatctgcataggttaatttgatgggacccaataggttaccctagtttgtctatctttataccttgtttaccactgaactttttgggtagtacttgctagtgctttatgtggttttgggtatgaagatacattactcatgatcacacttttattatctgtttattatcactgttcatgataagatcattatgttaat

SEQ ID NO: 62175 - DNA, 838 bp, Zea Mays
ggggctgcctgttttcgcttgcatttggggccgctcgtcagtcgttgctcacgtgggtgcgggattgaagtgtcactgcgcccatggccccaccagtcatcccgttcgtgcgcaaacagcccgcgcaacgcgcgcaccgtgcgtgagtccgtcgccgcggactccgtgggcgcgagctcaaccacctccgcggatctcgctgctcaccccggctcggactccgattcctccggccatgctcctcggggtataaaagtggagccgctcctccccaaacaacggcgcgcagaaacaaagggagagcaggggagaaaagaagaaggttgccgccgccgcgtcgtttcctcggaacgccgtcatcctggctcggagtagtcgcaattgaggttcgcgggagcacgcgggtcgtcttcaggcttgccgccaggtgtggcgttctccagaatccagctaattcgtcgccggagtgtttttcgcggcggaaattgtggtcggccgtggccggctgttttgggcgccagatcgaccgcagtgaggtcacgagaatctgaaaatcaccctggtacctggaatctcaagtctcaggcaagttgtgcccttgatcacttctttttacccactcatgttctaattaatcataatgatctgcataggttaatttgatgggacccaataggttaccctagtttgtctatctttataccttgtttaccactgaactttttgggtagtacttgctagtgctttatgtggttttgggtatgaagatacattactcatgatcacacttttattatctgtttattatcactgttcatgataagatcattatgttaat

SEQ ID NO: 62176 - DNA, 528 bp, Zea Mays
tgtataccctcatgttgagacacacagctagctacactacaggtttggactggaacaatgacggaggctccctctggtctggaccctggactgctacagtttactcgggtattttgttttctcggaagttggaacaagaagaatgtgcctcgtgaggccggccttcctgcctgcctggcgcctgccttgctgcgagcctgcgaccaagatcagagctccacgtctccgtcgcgccgggccaaagccgtgcagcacgcgacgacgaaattcagggcacatcgcgtaggcagtagtaggaccgagagagttgtgcaagactagccagtatgatctgtctcttgatcgaagtgtaactggctagttgcggttgcctactactacatgcttgacctagctggataattgattggtactaggaatttatagtcaaatcttatgtacacaggcatggtcaaaacgccacacgattttggcctataccatggtctactcttcacctgtagctgtaggcagggtacctgccgtccg

SEQ ID NO: 62177 - DNA, 1289 bp, Zea Mays
ctggagatagcctaagctcatgttgatgttaggcctaactcaagaaattggaagaggtgctgtacaccgtacagttaagagactgaaacaagaaaatttttcttctcttgtttgcctactttccaagagctgtgcatgcgaggtaccgtaagaaaattctcatgtggatgtcagagctacataccagagtcttagccttccaaatgtcaacaaactgaacatcatcgctgttagtttgggtgcacttctgacacaaatcacgcctcagagcgacaactcatgcagcagtacacaggccacagctctctccctatacaggtgagcaaaatctgtatcatgttcaaacgttgtaaaatcccaggagtaacgtgtgagctcatcttctgcagggcaggaccagcaaaaaaaggagaactccagcaccacggacgacagttcaaactggagcagagatcgaatgtagactggaaccatggcaaggccgtcggtggtgtgcacatttttcgtcagctgatgacttgtccagggaggtggcaagccaagttgacaaccaagcagctagcgcccttcaatttgtcggaaggaaccagaactgagtccagtcaactgtatgtaactttctggagctagaagaattcccttgtttgtacagttcagccgggcgtttcgatgttggtataatagttctgatggaaggaactcgtgccgtaatgacgggccaataaggagcaagacggggagccgtacaagtcactgcctttgcgtgattgcgtccccctttaatttgaagtgttcgtcgtagggtttggactggaacaatgacggaggctccctctggtctggaccctggactgctacagtttactcgggtattttgttttctcggaagttggaacaagaagaatgtgcctcgtgaggccggccttcctgcctgcctggcgcctgccttgctgcgagcctgcgaccaagatcagagctccacgtctccgtcgcgccgggccaaagccgtgcagcacgcgacgacgaaattcagggcacatcgcgtaggcagtagtaggaccgagagagttgtgcaagactagccagtatgatctgtctcttgatcgaagtgtaactggctagttgcggttgcctactactacatgcttgacctagctggataattgattggtactaggaatttatagtcaaatcttatgtacacaggcatggtcaaaacgccacacgattttggcctataccatggtctactcttcacctgtagctgtaggcagggtacctgccgtccg

SEQ ID NO: 62178 - DNA, 1144 bp, Zea Mays
tttggtgattgagcaaagtctggtgagccgatcaactgaatttgaagctgctattcagaatggcgacaaaagttcgctatgtgctctgtgtgaaaaaataccaagaatctttatctgacgaggagagagaaacctggggcttcttaagggttatgtttgaggacgatgattttgcaaggacaaaattgcttgctcatcttggcttcgaaccacctcaggcaccgcctgcaagttcaactgatgaattgagccaaatattggcagatacacttaatattgatcatgctgcagtaaccgataatgcggatgcccagtttcttattgataatggggatgattttttcaacaatcctcaaccttcagaggctagcttggctgaagaatcagtttctacaaatggtcaacagatagaacaggaagtttctggagatgctgtgccatcagatccatcaattgacaaaagcattcaacatgcgttggtggttggagactacaaaggggcagttaaccagtgtcttgcttctaatcgtatggctgatgctttggttatagcccatgcaggtggttctgctctctgggaaagcacaagaaatcattatctcaagaacagtatctcaccctacttaaaggttgtctctgctatggtgggtaatgatttaatgagttttgtgagtacctggccactaagttcatggaaagaaactcacgcccacctatggacctaccccctcgcctcccagcatggccgccggcttggtgtcgcccccgaccaaggttattaaggcgttaaggcgagacatggcgacccacccccttccaaacgcctaggcgagttaggcgtgcggcgaggcgacgtcatacgagcatgggcactcgagtcaaagaggtggtacctgtcggcttgtcactgtgatgaggtagcagagaagtaggatgccataacatttggtgttctgaagaagcgacaaaaggacttgctgagcggtttgagtatttgtaatgtgcctaaacttaaatcagagacaaggctgctgttatgagggataagtgagccattcatattttagtgatgtggcatggtattctttgcagaaatctcatctttgtgtatagattatgaaacattttcttataacaatgtaac

SEQ ID NO: 62179 - DNA, 2741 bp, Zea Mays
gggtcgaagcggagggtggcggaggaggagtcctcggaggaggagtacgaggtggaggtggtccgcgaccacatcgcctcctcccgcggcagccgcctcgcgctcttcggctccgagctccgcctcggccgcttccgcccgcgccgccgcaggcgcctcccgctcgccgggggaaggcgccgccgagggcttcttccacggcctcgtcatccaccccgacaacaagtggtaccggttatggaccaagttcatactggtttgggcggtgtacagctccttcttcacgcccctggaattcggcttcttcagaggcctccccaagaacctcttcttcctggacgtagctgggcagactgcattcctcatcgacatcgtcgtcaggtttttcgtggcgtaccgtgacccagacacgtaccgggtcgtctacagccccgccgccattgcgctccgctactgcaaatcgagcttcgttttcgaccttcttggttgcctcccgtgggacgctatctacaaggcttgtgggagcaaagaggaagtaaggtacctgctgtggattcgcttgacacgggtcaccaaggtcacggagttcttctggcgtttagagaaggacatacgcgtcaactacctcttcaccaggatagtgaagctcatagtcgtggagctctactgcacgcacacagcggcctgcatcttctattacctggctacgacgcttcccgaatccatggaagggcacacgtggatcgggagcttgcagctgggggactacaggttcacacatttcagggagatcgatctcgccaagcgctacataacgtccttatatttcgccatcgtcaccatggcaaccgttggctacggggacatccatgccgtcaacatcagggagatgatattcatcatgatctacgtgtccttcgacatgattctaggagcctacctgatcggcaacatgaccgcgctcatcgtcaagggctccaggaccgagcggtttagggacaagatgaaggaggtgatcaggtacatgaacagaaacaaacttgggaaggaaataagggagcagatcaagggacacctgaggttgcagtatgagagcagctacaccgaagcatccgtccttcaggatatcccgatttctatccgtgcaaagatttctcaaacgctgtataagccatatatcgaaagcattccactgttcaagggatgttccgcagagttcattcaacagattgtgatcaggttgcaagaggagttcttcctaccaggagaagttatattggagcagggaagtgcagtcgatcagctgtacttcgtctgccacggtgcactggaaggtgtaggcatcggtgaagacgggcaagaggagactctgctaatgctggagccagagagctccttcggcgagatctcaatcctctgcaacatcccgcagccctacacggtccgcgtctgcgagctctgccggctcctgcgtctcgacaagcagtccttcaccaatatcctggagatctacttcgtcgacgggaggaggatcctgagcaatctctccgagagcgagtatggcggacgggtgaagcagctggaatcggacatcacgttccacatcgggaagcaggaggcggagctcacactgcgggtcaacagcgccgccttctatggcgacctgcaccagctgaaaagcctgatccgggcaggggctgatcccaagaacaccgactacgacggccgctcccctctgcatctcgcggcttccagagggtacgaggacgtcgtgcagttcctcatcaacgaaggcgtcgacatcgaccttaccgaccagttcgggaacacgccgttgctggaggcggtgaagcaggggcacgaacgggtggcagcgctgctgttcgccaagggtgcgaagctgagcctcaagaacgccggcagccacctgtgcacggcagttgccaagggggactcggacttcatccggcgcgccctggcctacggcgccgacccaaactgcagggactacgaccaccgcacgccgctccacatcgccgccgccgagggcctctacctcatcgccaagatgctcgtcgaggccggcgccagcgtgttcaccacggacagtgcagatggggcaccactccgctcgacgaagcgcgcaagtgcggcggccgcacgctgggggcgctgctggaggaggcgcgggccagcgagctgtccatgttcccggagcgcggcgaggaagtcagggacaaggtgcacccgcgacggtgctcggtgttcccgtaccacccgtggcgggcgagcgcaggcgaagagcggcgcgcggagggggtggtgctgtggatcccgcacaccatcgagagcctggtcgcgtcggcgcaggagaagctcggcttgcctggcccggcggcgtcgcggctgcggctgctgtgcgaggacggggccagggtgctcgacgtcgacatggtcaatgacggccagaagctctacctggtcggaggcgaggacggcgatcaggaaggtggtcagtagattgggcatccctgtgtggcatttgcatgctgcttttttttcaaccttgtatgccggttgttgtttttttggctatatatacgtgtgcagtagaagaaaatgtaatcaagtccatcatccgtgctggacactgtacagaactacaaattgggaataatgtaagatgtgaaatgaaaatgcaatgttaagtcgccccaggtcgggcggctctagccgccgcc

SEQ ID NO: 62180 - DNA, 2734 bp, Zea Mays
ctggggtcgaagcggagggtggcggaggaggagtcctcggaggaggagtacgaggtggaggtggtccgcgaccacatcgcctcctcccgcggcagccgcctcgcgctcttcggctccgagctccgcctcggccgcttccgcccgcgccgccgcaggcgcctcccgctcgccgggggaaggcgccgccgagggcttcttccacggcctcgtcatccaccccgacaacaagtggtaccggttatggaccaagttcatactggtttgggcggtgtacagctccttcttcacgcccctggaattcggcttcttcagaggcctccccaagaacctcttcttcctggacgtagctgggcagactgcattcctcatcgacatcgtcgtcaggtttttcgtggcgtaccgtgacccagacacgtaccgggtcgtctacagccccgccgccattgcgctccgctactgcaaatcgagcttcgttttcgaccttcttggttgcctcccgtgggacgctatctacaaggcttgtgggagcaaagaggaagtaaggtacctgctgtggattcgcttgacacgggtcaccaaggtcacggagttcttctggcgtttagagaaggacatacgcgtcaactacctcttcaccaggatagtgaagctcatagtcgtggagctctactgcacgcacacagcggcctgcatcttctattacctggctacgacgcttcccgaatccatggaagggcacacgtggatcgggagcttgcagctgggggactacaggttcacacatttcagggagatcgatctcgccaagcgctacataacgtccttatatttcgccatcgtcaccatggcaaccgttggctacggggacatccatgccgtcaacatcagggagatgatattcatcatgatctacgtgtccttcgacatgattctaggagcctacctgatcggcaacatgaccgcgctcatcgtcaagggctccaggaccgagcggtttagggacaagatgaaggaggtgatcaggtacatgaacagaaacaaacttgggaaggaaataagggagcagatcaagggacacctgaggttgcagtatgagagcagctacaccgaagcatccgtccttcaggatatcccgatttctatccgtgcaaagatttctcaaacgctgtataagccatatatcgaaagcattccactgttcaagggatgttccgcagagttcattcaacagattgtgatcaggttgcaagaggagttcttcctaccaggagaagttatattggagcagggaagtgcagtcgatcagctgtacttcgtctgccacggtgcactggaaggtgtaggcatcggtgaagacgggcaagaggagactctgctaatgctggagccagagagctccttcggcgagatctcaatcctctgcaacatcccgcagccctacacggtccgcgtctgcgagctctgccggctcctgcgtctcgacaagcagtccttcaccaatatcctggagatctacttcgtcgacgggaggaggatcctgagcaatctctccgagagcgagtatggcggacgggtgaagcagctggaatcggacatcacgttccacatcgggaagcaggaggcggagctcacactgcgggtcaacagcgccgccttctatggcgacctgcaccagctgaaaagcctgatccgggcaggggctgatcccaagaacaccgactacgacggccgctcccctctgcatctcgcggcttccagagggtacgaggacgtcgtgcagttcctcatcaacgaaggcgtcgacatcgaccttaccgttcgggaacacgccgttgctggaggcggtgaagcaggggcacgaacgggtggcagcgctgctgttcgccaagggtgcgaagctgagcctcaagaacgccggcagccacctgtgcacggcagttgccaagggggactcggacttcatccggcgcgccctggcctacggcgccgacccaaactgcagggactacgaccaccgcacgccgctccacatcgccgccgccgagggcctctacctcatcgccaagatgctcgtcgaggccggcgccagcgtgttcaccacggacagatggggcaccactccgctcgacgaagcgcgcaagtgcggcggccgcacgctgggggcgctgctggaggaggcgcgggccagcgagctgtccatgttcccggagcgcggcgaggaagtcagggacaaggtgcacccgcgacggtgctcggtgttcccgtaccacccgtggcgggcgagcgcaggcgaagagcggcgcgcggagggggtggtgctgtggatcccgcacaccatcgagagcctggtcgcgtcggcgcaggagaagctcggcttgcctggcccggcggcgtcgcggctgcggctgctgtgcgaggacggggccagggtgctcgacgtcgacatggtcaatgacggccagaagctctacctggtcggaggcgaggacggcgatcaggaaggtggtcagtagattgggcatccctgtgtggcatttgcatgctgcttttttttcaaccttgtatgccggttgttgtttttttggctatatatacgtgtgcagtagaagaaaatgtaatcaagtccatcatccgtgctggacactgtacagaactacaaattgggaataatgtaagatgtgaaatgaaaatgcaatgttaagtcgccccaggtcgggcggctctagccgccgcc

SEQ ID NO: 62181 - DNA, 2818 bp, Zea Mays
ttcaaacgcacgctgcacgctcgcaggcggccgaccgtggcccccaccaccgcctgccgccgccactgcccccctctccactcgggatcccgtcctatcgcggccgccgcaagccataatggtgagggggctggggtcgaagcggagggtggcggaggaggagtcctcggaggaggagtacgaggtggaggtggtccgcgaccacatcgcctcctcccgcggcagccgcctcgcgctcttcggctccgagctccgcctcggccgcttccgcccgcgccgccgcaggcgcctcccgctcgccgggggaaggcgccgccgagggcttcttccacggcctcgtcatccaccccgacaacaagtggtaccggttatggaccaagttcatactggtttgggcggtgtacagctccttcttcacgcccctggaattcggcttcttcagaggcctccccaagaacctcttcttcctggacgtagctgggcagactgcattcctcatcgacatcgtcgtcaggtttttcgtggcgtaccgtgacccagacacgtaccgggtcgtctacagccccgccgccattgcgctccgctactgcaaatcgagcttcgttttcgaccttcttggttgcctcccgtgggacgctatctacaaggcttgtgggagcaaagaggaagtaaggtacctgctgtggattcgcttgacacgggtcaccaaggtcacggagttcttctggcgtttagagaaggacatacgcgtcaactacctcttcaccaggatagtgaagctcatagtcgtggagctctactgcacgcacacagcggcctgcatcttctattacctggctacgacgcttcccgaatccatggaagggcacacgtggatcgggagcttgcagctgggggactacaggtcgccagctgttaattttttcccctcttcaggctacggggacatccatgccgtcaacatcagggagatgatattcatcatgatctacgtgtccttcgacatgattctaggagcctacctgatcggcaacatgaccgcgctcatcgtcaagggctccaggaccgagcggtttagggacaagatgaaggaggtgatcaggtacatgaacagaaacaaacttgggaaggaaataagggagcagatcaagggacacctgaggttgcagtatgagagcagctacaccgaagcatccgtccttcaggatatcccgatttctatccgtgcaaagatttctcaaacgctgtataagccatatatcgaaagcattccactgttcaagggatgttccgcagagttcattcaacagattgtgatcaggttgcaagaggagttcttcctaccaggagaagttatattggagcagggaagtgcagtcgatcagctgtacttcgtctgccacggtgcactggaaggtgtaggcatcggtgaagacgggcaagaggagactctgctaatgctggagccagagagctccttcggcgagatctcaatcctctgcaacatcccgcagccctacacggtccgcgtctgcgagctctgccggctcctgcgtctcgacaagcagtccttcaccaatatcctggagatctacttcgtcgacgggaggaggatcctgagcaatctctccgagagcgagtatggcggacgggtgaagcagctggaatcggacatcacgttccacatcgggaagcaggaggcggagctcacactgcgggtcaacagcgccgccttctatggcgacctgcaccagctgaaaagcctgatccgggcaggggctgatcccaagaacaccgactacgacggccgctcccctctgcatctcgcggcttccagagggtacgaggacgtcgtgcagttcctcatcaacgaaggcgtcgacatcgaccttaccgaccagttcgggaacacgccgttgctggaggcggtgaagcaggggcacgaacgggtggcagcgctgctgttcgccaagggtgcgaagctgagcctcaagaacgccggcagccacctgtgcacggcagttgccaagggggactcggacttcatccggcgcgccctggcctacggcgccgacccaaactgcagggactacgaccaccgcacgccgctccacatcgccgccgccgagggcctctacctcatcgccaagatgctcgtcgaggccggcgccagcgtgttcaccacggacagatggggcaccactccgctcgacgaagcgcgcaagtgcggcggccgcacgctgggggcgctgctggaggaggcgcgggccagcgagctgtccatgttcccggagcgcggcgaggaagtcagggacaaggtgcacccgcgacggtgctcggtgttcccgtaccacccgtggcgggcgagcgcaggcgaagagcggcgcgcggagggggtggtgctgtggatcccgcacaccatcgagagcctggtcgcgtcggcgcaggagaagctcggcttgcctggcccggcggcgtcgcggctgcggctgctgtgcgaggacggggccagggtgctcgacgtcgacatggtcaatgacggccagaagctctacctggtcggaggcgaggacggcgatcaggaaggtggtcagtagattgggcatccctgtgtggcatttgcatgctgcttttttttcaaccttgtatgccggttgttgtttttttggctatatatacgtgtgcagtagaagaaaatgtaatcaagtccatcatccgtgctggacactgtacagaactacaaattgggaataatgtaagatgtgaaatgaaaatgcaatgttaagtcgccccaggtcgggcggctctagccgccgcc

SEQ ID NO: 62182 - DNA, 2923 bp, Zea Mays
cctccaagttcaaacgcacgctgcacgctcgcaggcggccgaccgtggcccccaccaccgcctgccgccgccactgcccccctctccactcgggatcccgtcctatcgcggccgccgcaagccataatggtgagggggctggggtcgaagcggagggtggcggaggaggagtcctcggaggaggagtacgaggtggaggtggtccgcgaccacatcgcctcctcccgcggcagccgcctcgcgctcttcggctccgagctccgcctcggccgcttccgcccgcgccgccgcaggcgcctcccgctcgccgggggaaggcgccgccgagggcttcttccacggcctcgtcatccaccccgacaacaagtggtaccggttatggaccaagttcatactggtttgggcggtgtacagctccttcttcacgcccctggaattcggcttcttcagaggcctccccaagaacctcttcttcctggacgtagctgggcagactgcattcctcatcgacatcgtcgtcaggtttttcgtggcgtaccgtgacccagacacgtaccgggtcgtctacagccccgccgccattgcgctccgctactgcaaatcgagcttcgttttcgaccttcttggttgcctcccgtgggacgctatctacaaggcttgtgggagcaaagaggaagtaaggtacctgctgtggattcgcttgacacgggtcaccaaggtcacggagttcttctggcgtttagagaaggacatacgcgtcaactacctcttcaccaggatagtgaagctcatagtcgtggagctctactgcacgcacacagcggcctgcatcttctattacctggctacgacgcttcccgaatccatggaagggcacacgtggatcgggagcttgcagctgggggactacaggttcacacatttcagggagatcgatctcgccaagcgctacataacgtccttatatttcgccatcgtcaccatggcaaccgttggctacggggacatccatgccgtcaacatcagggagatgatattcatcatgatctacgtgtccttcgacatgattctaggagcctacctgatcggcaacatgaccgcgctcatcgtcaagggctccaggaccgagcggtttagggacaagatgaaggaggtgatcaggtacatgaacagaaacaaacttgggaaggaaataagggagcagatcaagggacacctgaggttgcagtatgagagcagctacaccgaagcatccgtccttcaggatatcccgatttctatccgtgcaaagatttctcaaacgctgtataagccatatatcgaaagcattccactgttcaagggatgttccgcagagttcattcaacagattgtaagtgtcatctctttcatcccaactagctatgtgtgctgaatgaactacaaggttgcaagaggagttcttcctaccaggagaagttatattggagcagggaagtgcagtcgatcagctgtacttcgtctgccacggtgcactggaaggtgtaggcatcggtgaagacgggcaagaggagactctgctaatgctggagccagagagctccttcggcgagatctcaatcctctgcaacatcccgcagccctacacggtccgcgtctgcgagctctgccggctcctgcgtctcgacaagcagtccttcaccaatatcctggagatctacttcgtcgacgggaggaggatcctgagcaatctctccgagagcgagtatggcggacgggtgaagcagctggaatcggacatcacgttccacatcgggaagcaggaggcggagctcacactgcgggtcaacagcgccgccttctatggcgacctgcaccagctgaaaagcctgatccgggcaggggctgatcccaagaacaccgactacgacggccgctcccctctgcatctcgcggcttccagagggtacgaggacgtcgtgcagttcctcatcaacgaaggcgtcgacatcgaccttaccgaccagttcgggaacacgccgttgctggaggcggtgaagcaggggcacgaacgggtggcagcgctgctgttcgccaagggtgcgaagctgagcctcaagaacgccggcagccacctgtgcacggcagttgccaagggggactcggacttcatccggcgcgccctggcctacggcgccgacccaaactgcagggactacgaccaccgcacgccgctccacatcgccgccgccgagggcctctacctcatcgccaagatgctcgtcgaggccggcgccagcgtgttcaccacggacagatggggcaccactccgctcgacgaagcgcgcaagtgcggcggccgcacgctgggggcgctgctggaggaggcgcgggccagcgagctgtccatgttcccggagcgcggcgaggaagtcagggacaaggtgcacccgcgacggtgctcggtgttcccgtaccacccgtggcgggcgagcgcaggcgaagagcggcgcgcggagggggtggtgctgtggatcccgcacaccatcgagagcctggtcgcgtcggcgcaggagaagctcggcttgcctggcccggcggcgtcgcggctgcggctgctgtgcgaggacggggccagggtgctcgacgtcgacatggtcaatgacggccagaagctctacctggtcggaggcgaggacggcgatcaggaaggtggtcagtagattgggcatccctgtgtggcatttgcatgctgcttttttttcaaccttgtatgccggttgttgtttttttggctatatatacgtgtgcagtagaagaaaatgtaatcaagtccatcatccgtgctggacactgtacagaactacaaattgggaataatgtaagatgtgaaatgaaaatgcaatgttaagtcgccccaggtcgggcggctctagccgccgcc

SEQ ID NO: 62183 - DNA, 2200 bp, Zea Mays
ctcttcccccttcgccaccctagttttttttttaaaaaaaatcgctatctccaagtccaagactccaacagctctcgcacacagccgcagctgctactggctagaccaacacgcactctcgcacacagccgcgggcacagtgacgcaggcggaggagcggcgccggagctagggtttccctgatccggtggggccggggagggggtggaatatcttgctcgatttcggcgctggaggcgcagtgccggtgtccccgaagccggcgggcgcgaggcgggttggggagctggggtacggcgccgggggctcagatctggtatgaccgacggcggcgaagacgggaatgtggcgttgcccaggggccccgcgcgccggaggggccccgtgcgggccagcttcgacgccgacgagttcatcgcgctgatgcacgggtcggatcccgtcagggtcgagctcacgcgcctcgagaacgagctcagggacaaggagagggagcttggggaggcgcagacggagatacgcgcgctgcgcctatcggagagggcgcgggagaaggccgtcgaggagcttacagatgaattggagaagatggctgagaaactcaagctgacagaatctctcctcgaaagcaaaaatcttgaagttaaaaagataaatgatgagaaaaaagctgcattggctgcccagtttgcagcagaagcaactttgcgaagagtacatgcagcccagaaagatgatgacatgccaccaattgaagccattcttgcaccgcttgaagctgagctaaagctttctcgccaagagaatgcaaagctccaggatgataacagagctttggatcgtctaacaaaacaaaaggaggcagctctactagaagcggagaggaccgtgcaaattgccatggcaaaagctgctatggttgatgatttgcaaaacaagaaccaagagttgatcaaacaaattgagatctgccatgaagaaaataaaatcttagacaagctgcatcgccaaaagattgcagaagttgaaaagctgagccaaactgtgagagagttggaagaggctgttcttcaaggtggtgcaacggctaatgttgtccgtgattaccagcgcagatttcaagaaataaatgaagaaaagagaacacttgaccgtgaacttgcacgtgcaaaagttacagcaaacagagttgcttctgttgttgctaatgagtggaaagattctaatgacaaggtgatgccagttaaacagtggcttgaagagcgtaggttcttccagggggagatgcaacaacttcgtgacaagcttgccattacagaacgtacagcacgatctgaagctcaactgaaggaaaaatatcagttacgtctaaaagtactagaagatggactaagagggccaccaagtggctctattcgtccacctactgaaggaaagagctttagcaatgtcccttcccgccggttgtcactcggtggagctgataatatatcaagattgtctcctaatgggttattgtcaaggcgatctccttcttttaattcaagatcatctcttacgtcaaacagcagcttggtcctgaagcatgctaaaggcacttcaaagtcatttgatggcggaactaggtcactagataggagaaaggtacatggaaatggagctcatttactcaacagatctacagatgctgttagagataaagagactaatgatagttggaagggcgatatggatgagaaaactaatgagagtgcagacagcaacacagatgggaaaagtaatgaaaccatgaataataattcagctgagacagtttctggtttcctatatgatatgctgcaaaaagaggtaatttctttgagaaagacatgccatgagaaggatcagattctaaaagataaagatgatgctattgagatgttagcaaagaaagtagacaccttaactaaagcaatggaagtggaagctaaaaaggtcagacgggaggttgcatccatggagaaagaagttgcagcaatgcgtgccagtaaagaacaagaaatcagagccaagcggcttggtacgaaaggctctggtagttcacaactgcttcctggaagaggtattggagaggcagctactccttgctaatttttgttggagcacctctacaatgatgtagcttttctttgatccgtgtaaggatcaaatcatctctaag

SEQ ID NO: 62184 - DNA, 2323 bp, Zea Mays
aactttgaatatgtcccttgttctcgaagattggtactaatgtactccactcatcgggcattctatttgatcgaaaaatatggttgaacaacttggttagccaaacgatagcaatatccccaaggcatttccacacctctattgggataccattcgggcccatcttctgccccctttcatctgttgccacctgttattaattaattaaccaagcttacagatgaattggagaagatggctgagaaactcaagctgacagaatctctcctcgaaagcaaaaatcttgaagttaaaaagataaatgatgagaaaaaagctgcattggctgcccagtttgcagcagaagcaactttgcgaagagtacatgcagcccagaaagatgatgacatgccaccaattgaagccattcttgcaccgcttgaagctgagctaaagctttctcgccaagagaatgcaaagctccaggatgataacagagctttggatcgtctaacaaaacaaaaggaggcagctctactagaagcggagaggaccgtgcaaattgccatggcaaaagctgctatggttgatgatttgcaaaacaagaaccaagagttgatcaaacaaattgagatctgccatgaagaaaataaaatcttagacaagctgcatcgccaaaagattgcagaagttgaaaagctgagccaaactgtgagagagttggaagaggctgttcttcaaggtggtgcaacggctaatgttgtccgtgattaccagcgcagatttcaagaaataaatgaagaaaagagaacacttgaccgtgaacttgcacgtgcaaaagttacagcaaacagagttgcttctgttgttgctaatgagtggaaagattctaatgacaaggtgatgccagttaaacagtggcttgaagagcgtaggttcttccagggggagatgcaacaacttcgtgacaagcttgccattacagaacgtacagcacgatctgaagctcaactgaaggaaaaatatcagttacgtctaaaagtactagaagatggactaagagggccaccaagtggctctattcgtccacctactgaaggaaagagctttagcaatgtcccttcccgccggttgtcactcggtggagctgataatatatcaagattgtctcctaatgggttattgtcaaggcgatctccttcttttaattcaagatcatctcttacgtcaaacagcagcttggtcctgaagcatgctaaaggcacttcaaagtcatttgatggcggaactaggtcactagataggagaaaggtacatggaaatggagctcatttactcaacagatctacagatgctgttagagataaagagactaatgatagttggaagggcgatatggatgagaaaactaatgagagtgcagacagcaacacagatgggaaaagtaatgaaaccatgaataataattcagctgagacagtttctggtttcctatatgatatgctgcaaaaagaggtaatttctttgagaaagacatgccatgagaaggatcagattctaaaagataaagatgatgctattgagatgttagcaaagaaagtagacaccttaactaaagcaatggaagtggaagctaaaaaggtcagacgggaggttgcatccatggagaaagaagttgcagcaatgcgtgccagtaaagaacaagaaatcagagccaagcggcttggtacgaaaggctctggtagttcacaactgcttcctggaagaaacgcaccacgaagtgggtccatgcgcaacttccaatgatggcagcactaacaccaagcagcattcttggataggtcctctgttccaccatttgttctgttcctatcctattaattttgtggctaaaatcgtagcacagtgagatgacccaacaatacctagatctgggtaagagtaggctcggatctgatgagaccattgtgggagtgaagctgagcctgttgtctaaccttgtggcgcgccctcttgtttattttagtccaggcagtgcacctgatgcttgtataggccagggatcaccgcatggccaatctgtaatgtatagcctgagtgctcagttacatagacacccgttgcccaggttgtgaatactgtttcctcgcacatgcttctttgcgctgctctatttgccctgtgtttgggttggaatttttaacatggcttctagcctgtctgagttctgttgattataaatagtgacacatgttcatctgcatatgtacatctagtggcgactgtcaactgatgtttatcctcttccattatgtcatgcttttgggtcgggttggtgatgcaa

SEQ ID NO: 62185 - DNA, 2670 bp, Zea Mays
ctcttcccccttcgccaccctagttttttttttaaaaaaaatcgctatctccaagtccaagactccaacagctctcgcacacagccgcagctgctactggctagaccaacacgcactctcgcacacagccgcgggcacagtgacgcaggcggaggagcggcgccggagctagggtttccctgatccggtggggccggggagggggtggaatatcttgctcgatttcggcgctggaggcgcagtgccggtgtccccgaagccggcgggcgcgaggcgggttggggagctggggtacggcgccgggggctcagatctggtatgaccgacggcggcgaagacgggaatgtggcgttgcccaggggccccgcgcgccggaggggccccgtgcgggccagcttcgacgccgacgagttcatcgcgctgatgcacgggtcggatcccgtcagggtcgagctcacgcgcctcgagaacgagctcagggacaaggagagggagcttggggaggcgcagacggagatacgcgcgctgcgcctatcggagagggcgcgggagaaggccgtcgaggagatgaattggagaagatggctgagaaactcaagctgacagaatctctcctcgaaagcaaaaatcttgaagttaaaaagataaatgatgagaaaaaagctgcattggctgcccagtttgcagcagaagcaactttgcgaagagtacatgcagcccagaaagatgatgacatgccaccaattgaagccattcttgcaccgcttgaagctgagctaaagctttctcgccaagagaatgcaaagctccaggatgataacagagctttggatcgtctaacaaaacaaaaggaggcagctctactagaagcggagaggaccgtgcaaattgccatggcaaaagctgctatggttgatgatttgcaaaacaagaaccaagagttgatcaaacaaattgagatctgccatgaagaaaataaaatcttagacaagctgcatcgccaaaagattgcagaagttgaaaagctgagccaaactgtgagagagttggaagaggctgttcttcaaggtggtgcaacggctaatgttgtccgtgattaccagcgcagatttcaagaaataaatgaagaaaagagaacacttgaccgtgaacttgcacgtgcaaaagttacagcaaacagagttgcttctgttgttgctaatgagtggaaagattctaatgacaaggtgatgccagttaaacagtggcttgaagagcgtaggttcttccagggggagatgcaacaacttcgtgacaagcttgccattacagaacgtacagcacgatctgaagctcaactgaaggaaaaatatcagttacgtctaaaagtactagaagatggactaagagggccaccaagtggctctattcgtccacctactgaaggaaagagctttagcaatgtcccttcccgccggttgtcactcggtggagctgataatatatcaagattgtctcctaatgggttattgtcaaggcgatctccttcttttaattcaagatcatctcttacgtcaaacagcagcttggtcctgaagcatgctaaaggcacttcaaagtcatttgatggcggaactaggtcactagataggagaaaggtacatggaaatggagctcatttactcaacagatctacagatgctgttagagataaagagactaatgatagttggaagggcgatatggatgagaaaactaatgagagtgcagacagcaacacagatgggaaaagtaatgaaaccatgaataataattcagctgagacagtttctggtttcctatatgatatgctgcaaaaagaggtaatttctttgagaaagacatgccatgagaaggatcagattctaaaagataaagatgatgctattgagatgttagcaaagaaagtagacaccttaactaaagcaatggaagtggaagctaaaaaggtcagacgggaggttgcatccatggagaaagaagttgcagcaatgcgtgccagtaaagaacaagaaatcagagccaagcggcttggtacgaaaggctctggtagttcacaactgcttcctggaagaaacgcaccacgaagtgggtccatgcgcaacttccaatgatggcagcactaacaccaagcagcattcttggataggtcctctgttccaccatttgttctgttcctatcctattaattttgtggctaaaatcgtagcacagtgagatgacccaacaatacctagatctgggtaagagtaggctcggatctgatgagaccattgtgggagtgaagctgagcctgttgtctaaccttgtggcgcgccctcttgtttattttagtccaggcagtgcacctgatgcttgtataggccagggatcaccgcatggccaatctgtaatgtatagcctgagtgctcagttacatagacacccgttgcccaggttgtgaatactgtttcctcgcacatgcttctttgcgctgctctatttgccctgtgtttgggttggaatttttaacatggcttctagcctgtctgagttctgttgattataaatagtgacacatgttcatctgcatatgtacatctagtggcgactgtcaactgatgtttatcctcttccattatgtcatgcttttgggtcgggttggtgatgcaa

SEQ ID NO: 62186 - DNA, 2591 bp, Zea Mays
ctcttcccccttcgccaccctagttttttttttaaaaaaaatcgctatctccaagtccaagactccaacagctctcgcacacagccgcagctgctactggctagaccaacacgcactctcgcacacagccgcgggcacagtgacgcaggcggaggagcggcgccggagctagggtttccctgatccggtggggccggggagggggtggaatatcttgctcgatttcggcgctggaggcgcagtgccggtgtccccgaagccggcgggcgcgaggcgggttggggagctggggtacggcgccgggggctcagatctggtatgaccgacggcggcgaagacgggaatgtggcgttgcccaggggccccgcgcgccggaggggccccgtgcgggccagcttcgacgccgacgagttcatcgcgctgatgcacgggtcggatcccgtcagggtcgagctcacgcgcctcgagaacgagctcagggcttacagatgaattggagaagatggctgagaaactcaagctgacagaatctctcctcgaaagcaaaaatcttgaagttaaaaagataaatgatgagaaaaaagctgcattggctgcccagtttgcagcagaagcaactttgcgaagagtacatgcagcccagaaagatgatgacatgccaccaattgaagccattcttgcaccgcttgaagctgagctaaagctttctcgccaagagaatgcaaagctccaggatgataacagagctttggatcgtctaacaaaacaaaaggaggcagctctactagaagcggagaggaccgtgcaaattgccatggcaaaagctgctatggttgatgatttgcaaaacaagaaccaagagttgatcaaacaaattgagatctgccatgaagaaaataaaatcttagacaagctgcatcgccaaaagattgcagaagttgaaaagctgagccaaactgtgagagagttggaagaggctgttcttcaaggtggtgcaacggctaatgttgtccgtgattaccagcgcagatttcaagaaataaatgaagaaaagagaacacttgaccgtgaacttgcacgtgcaaaagttacagcaaacagagttgcttctgttgttgctaatgagtggaaagattctaatgacaaggtgatgccagttaaacagtggcttgaagagcgtaggttcttccagggggagatgcaacaacttcgtgacaagcttgccattacagaacgtacagcacgatctgaagctcaactgaaggaaaaatatcagttacgtctaaaagtactagaagatggactaagagggccaccaagtggctctattcgtccacctactgaaggaaagagctttagcaatgtcccttcccgccggttgtcactcggtggagctgataatatatcaagattgtctcctaatgggttattgtcaaggcgatctccttcttttaattcaagatcatctcttacgtcaaacagcagcttggtcctgaagcatgctaaaggcacttcaaagtcatttgatggcggaactaggtcactagataggagaaaggtacatggaaatggagctcatttactcaacagatctacagatgctgttagagataaagagactaatgatagttggaagggcgatatggatgagaaaactaatgagagtgcagacagcaacacagatgggaaaagtaatgaaaccatgaataataattcagctgagacagtttctggtttcctatatgatatgctgcaaaaagaggtaatttctttgagaaagacatgccatgagaaggatcagattctaaaagataaagatgatgctattgagatgttagcaaagaaagtagacaccttaactaaagcaatggaagtggaagctaaaaaggtcagacgggaggttgcatccatggagaaagaagttgcagcaatgcgtgccagtaaagaacaagaaatcagagccaagcggcttggtacgaaaggctctggtagttcacaactgcttcctggaagaaacgcaccacgaagtgggtccatgcgcaacttccaatgatggcagcactaacaccaagcagcattcttggataggtcctctgttccaccatttgttctgttcctatcctattaattttgtggctaaaatcgtagcacagtgagatgacccaacaatacctagatctgggtaagagtaggctcggatctgatgagaccattgtgggagtgaagctgagcctgttgtctaaccttgtggcgcgccctcttgtttattttagtccaggcagtgcacctgatgcttgtataggccagggatcaccgcatggccaatctgtaatgtatagcctgagtgctcagttacatagacacccgttgcccaggttgtgaatactgtttcctcgcacatgcttctttgcgctgctctatttgccctgtgtttgggttggaatttttaacatggcttctagcctgtctgagttctgttgattataaatagtgacacatgttcatctgcatatgtacatctagtggcgactgtcaactgatgtttatcctcttccattatgtcatgcttttgggtcgggttggtgatgcaa

SEQ ID NO: 62187 - DNA, 3358 bp, Zea Mays
gtggtggtttacaaagcgatatgaaacacgagcattcaagcccaacgcaccggcgatgcgcgtgcctccacgccagcgtaagccgccgagcggcggtgaaccgtgccgcctatgctctttactccgtcgtcctcgtcggacgctccacccttcacacctagggtcgccgccgcgctcctcgcccgctgcacttcccgcgtcgccgcggcagcgctgcacgcccgcctcctccgctgctcccgcgccttcttccgctccccgtacctctccaactgccttggcgctgcgtactcccgcctcggcgccgcaccgtacgccgttgcgctcctacgcgccgccgccaagcccaacattttctcacacaacatcctcctgtcggctctcgtcagctccggcctcctggaggatgcgcgaggactgttcgacgggatgccccagagggatgcggtcacctacaacgccatgctctccggctacgtcgccggcgcgcttctggacgaggcgttccatctcttctgctccatgaatgagcgtgacgttaggccaactcccttcaccttctccatagtatcgtcggcagttggctctgttcgccgcggccaacagcttcacgctgctgctgtccgccacggcctggcacacagtgatgttgtagtaggcaatgcgcttattgatatgtatggccgggttggcctcttggagtatgcagcgcgtgtcttctcttgcatggaacaagtagatgtcacatcctggaactctgtgatgtcagtttacaaggatcaggctctcaccagtactgtctttaagtgttttgggaccatgaggagcaaaggattttcagttgatggcttcactgtgtccatcgtgctcagtgcttgctcggatgtgaaggatcttgtcaagggtgaccagatgttggcactctgcattaagatgggcttccttacaaacttcatggtttctagtgctattattgacttcctctgcatgtctgacagactgtctgatgcgcttcagctcttcagagaaatgccaacatggggctcagagccatgcaatgcactgatatcaggctatgctaggagtggcctaatggaagaagccctcagcctgtttgcagtgtctatgcgaaatggtattgttccaaacgagttcagttttgctagtgtgctgaaatggagttcatgctttggtttaatggagcagggcactcaaattcattgcctggtttgcaagcttggatttcagaatgatgtaattgtttctacagccctcactgacatgtactgtaaattggggttaaccaagcatgccaggaaaattttcgatacagttggtgcaaaggatttggtgttatggaatacaatgctgcttggcctattgcaaaatggaagatctaaggaagcccttgtaatatttaaaaggatactcaagtgtggaatccaacctgatagaatcactctttttggagccttatctgcatgtggtttagaaggtttggtatctgaaggaatggaaataattaccctgtttaaagataggtaccatattatgcctagtctggagcactatacctgtgtggtcgacatgttatgctgcactgggatgttcagagaggcagtgaattatgtagagaacaagttggcaaagtttagtgctgctattttctctaatattctggaggcatgtatagtccaagggaacattggcatcgcagagctagttgctgaaaagatggtgatgcaaaaatcccgattgtcactaccatatattgttttggctcaaatatatggtgccagatgtaagtgggaaaaaatggctggagtgtggaggtcaatggaaaatcaaagagcaaagaaggttcagtcatgcagctggctttgcatcaagaatcatatttatgtttttacgtcggaacagatattgcaccatggaaaaggagccacctatgaggttttggatcttctattttgggacatgatgaatcataaatatgctcctagttttgtagagcccaataacttggactaggttgtgtccagctgtccctcgaccaacctgcttccttaacttaccttgcctgtactaaaggtttgcagtaagattttgctagactagtttctctgtgtgaactgcaatgtccgcaaagatttggagatatgggcagcatatttttcatctgtggttccaatatgcagtaggattgtaagacattgcaccgatgacaatgaagtatcaatgtgaagagttgacaattcaaagatgcagtgtggacaaatgcaacaaggtgatcaaggaaatcaacacctcaaataaagacattagaagacttattaagatcatgcaagagtataaggtacatgacaaaataagcccaagcaaaaaaacacgaaggcacaaagaaaacaggttgcacaaagctaccagatgtcttcgatggcacgctagatgtcacgtcgaacatatgtgttgcttgggctaaatattttgctgaagactgagtgcacaggacaccagagtgtacatcgaacatgaggcatcggacagggcgtgtagagagcactatagagcgaccctgagagttaaagggcacccgactccacatcagatgcgacacttagataggtttaaggcattgaacatgtctgatgtatcatcagtgatacgctggttacctagaggcttaatgggtggtatcggctagcttacaatggctagctgatgtggaaggcatcggactagtcagatgacacaccggtggcgcactagacatgtctggtgctgcacaaaaaagtttgtgacttttcaatgcctcttttgagtgttggagctattaataccatcacaatctgccatttctaagtctgggagataaggatgtgagttgagactccgtcttagagctcttaaacacttgagtgcttaataaaatgactcggtgattagtaggtgctttatgaataaattaggttagttagaccgcaactatatcacttgttctaggtttatccctaccgagagaattgaggaattgacatcccaaagctcttgatgcttgcacgtgtcattgtaattatattgagtgggacaagagtcttacgagatcacactaactatgtttatgttgtgactgccactgtatatcggagagaatgagaccatcagtgttttagctagaagcttgataattgagacgacgaggatgcatccaagagaggtcggaagtggagcaccacttgcgcatggagaagacacgtagttatctatggagttatctgactgggtgcttgaccctcatgtgggtttttctttgcataggggcaccaacacccttataaggatttgtaagaaccttgcg

SEQ ID NO: 62188 - DNA, 3270 bp, Zea Mays
gtggtggtttacaaagcgatatgaaacacgagcattcaagcccaacgcaccggcgatgcgcgtgcctccacgccagcgtaagccgccgagcggcggtgaaccgtgccgcctatgctctttactccgtcgtcctcgtcggacgctccacccttcacacctagggtcgccgccgcgctcctcgcccgctgcacttcccgcgtcgccgcggcagcgctgcacgcccgcctcctccgctgctcccgcgccttcttccgctccccgtacctctccaactgccttggcgctgcgtactcccgcctcggcgccgcaccgtacgccgttgcgctcctacgcgccgccgccaagcccaacattttctcacacaacatcctcctgtcggctctcgtcagctccggcctcctggaggatgcgcgaggactgttcgacgggatgccccagagggatgcggtcacctacaacgccatgctctccggctacgtcgccggcgcgcttctggacgaggcgttccatctcttctgctccatgaatgagcgtgacgttaggccaactcccttcaccttctccatagtatcgtcggcagttggctctgttcgccgcggccaacagcttcacgctgctgctgtccgccacggcctggcacacagtgatgttgtagtaggcaatgcgcttattgatatgtatggccgggttggcctcttggagtatgcagcgcgtgtcttctcttgcatggaacaagtagatgtcacatcctggaactctgtgatgtcagtttacaaggatcaggctctcaccagtactgtctttaagtgttttgggaccatgaggagcaaaggattttcagttgatggcttcactgtgtccatcgtgctcagtgcttgctcggatgtgaaggatcttgtcaagggtgaccagatgttggcactctgcattaagatgggcttccttacaaacttcatggtttctagtgctattattgacttcctctgcatgtctgacagactgtctgatgcgcttcagctcttcagagaaatgccaacatggggctcagagccatgcaatgcactgatatcaggctatgctaggagtggcctaatggaagaagccctcagcctgtttgcagtgtctatgcgaaatggtattgttccaaacgagttcagttttgctagtgtgctgaaatggagttcatgctttggtttaatggagcagggcactcaaattcattgcctggtttgcaagcttggatttcagaatgatgtaattgtttctacagccctcactgacatgtactgtaaattggggttaaccaagcatgccaggaaaattttcgatacagttggtgcaaaggatttggtgttatggaatacaatgctgcttggcctattgcaaaatggaagatctaaggaagcccttgtaatatttaaaaggatactcaagtgtggaatccaacctgatagaatcactctttttggagccttatctgcatgtggtttagaaggtttggtatctgaaggaatggaaataattaccctgtttaaagataggtaccatattatgcctagtctggagcactatacctgtgtggtcgacatgttatgctgcactgggatgttcagagaggcagtgaattatgtagagaacaagttggcaaagtttagtgctgctattttctctaatattctggaggcatgtatagtccaagggaacattggcatcgcagagctagttgctgaaaagatggtgatgcaaaaatcccgattgtcactaccatatattgttttggctcaaatatatggtgccagatgtaagtgggaaaaaatggctggagtgtggaggtcaatggaaaatcaaagagcaaagaaggttcagtcatgcagctggctttgcatcaagaatcatatttatgtttttacgtcggaacagatattgcaccatggaaaaggagccacctatgaggttttggatcttctattttgggacatgatgaatcataaatatgctcctagttttgtagagcccaataacttggactaggttgtgtccagctgtccctcgaccaacctgcttccttaacttaccttgcctgtactaaaggtttgcagtaagattttgctagactagtttctctgtgtgaactgcaatgtccgcaaagatttggagatatgggcagttcaaagatgcagtgtggacaaatgcaacaaggtgatcaaggaaatcaacacctcaaataaagacattagaagacttattaagatcatgcaagagtataaggtacatgacaaaataagcccaagcaaaaaaacacgaaggcacaaagaaaacaggttgcacaaagctaccagatgtcttcgatggcacgctagatgtcacgtcgaacatatgtgttgcttgggctaaatattttgctgaagactgagtgcacaggacaccagagtgtacatcgaacatgaggcatcggacagggcgtgtagagagcactatagagcgaccctgagagttaaagggcacccgactccacatcagatgcgacacttagataggtttaaggcattgaacatgtctgatgtatcatcagtgatacgctggttacctagaggcttaatgggtggtatcggctagcttacaatggctagctgatgtggaaggcatcggactagtcagatgacacaccggtggcgcactagacatgtctggtgctgcacaaaaaagtttgtgacttttcaatgcctcttttgagtgttggagctattaataccatcacaatctgccatttctaagtctgggagataaggatgtgagttgagactccgtcttagagctcttaaacacttgagtgcttaataaaatgactcggtgattagtaggtgctttatgaataaattaggttagttagaccgcaactatatcacttgttctaggtttatccctaccgagagaattgaggaattgacatcccaaagctcttgatgcttgcacgtgtcattgtaattatattgagtgggacaagagtcttacgagatcacactaactatgtttatgttgtgactgccactgtatatcggagagaatgagaccatcagtgttttagctagaagcttgataattgagacgacgaggatgcatccaagagaggtcggaagtggagcaccacttgcgcatggagaagacacgtagttatctatggagttatctgactgggtgcttgaccctcatgtgggtttttctttgcataggggcaccaacacccttataaggatttgtaagaaccttgcg

SEQ ID NO: 62189 - DNA, 2358 bp, Zea Mays
cactgcgtttgcatgttttgcttggcctcacgcttgttccatgtttgaacataccacaccacattgcacgcaggaggaccggccgccactctttctcgctctcttctcttctcttggctccagctccacccacctctagctgcctcccttcggcaatggaggaggcgccaccatcttcttctcccccctcccctcctgtgatgctactcttgctgctgctgcttatcgtctcctccccttgtagctctagcgccctcctctcccccaagggcgtcaaccctgaagtgcaagctctgatgacgatcaagaacacgctcaaggacccccacggcgtgctcaagaactgggaccaggactccgtggatccctgcagctggaccacagtcagctgctcgctagagaacttcgtcaccggactggaggtcccaggtcagaacctctctggcctgctctccccaagcatagggaacctgacgaatcttgagactattctcctgcagaacaacaacatcaccggcctaatcccagcagagatcggcaagcttacaaagctcaggacacttgatctctctagcaaccacctgtatggcgcaatccccacttctgtgggcaaccttgagagcctgcagtacttgaggctcaacaacaacaccctgtctggcccattcccttcagcatcagctaatttgtcccagcttgttttcctagacttgtcatataataatctgagtggtccagtgccgggatctttggcaagaacattcaacatagttgggaatcctctcatctgcggcaccaacaacgccgagagagattgctatgggactgccccaatgccgccatacaacctcaacagctcactgcctccggcaataatgtctaaaagccataagtttgcaattgcatttggtaccgcaattggctgcatcggcctcctcgtcctcgctgccgggtttctgttctggtggaggcatcgtagaaaccggcaggtcctttttgatgtcgatgatcaacacatggagaacgttagcctcgggaacgtgaagaggttccagttcagggagcttcagtctgcgacaggcaacttcagcagcaagaacatactgggaaaaggtggctttggatacgtctacagagggcagttccctgacggaactcttgtggccgtgaagcgactcaaggacggcaacgccgcgggcggcgaggcccagtttcaaaccgaggtcgagatgatcagcctggcactgcacagaaaccttctcaggctctatgggttctgcatgaccgccacagagaggttgctggtctatccatacatgtctaatggaagcgtcgcgtcgcgcctcaaagggaagccacctctggactgggtgacgaggaagaggatagctctcggggcagggagggggctgctgtacctgcacgagcagtgcgaccccaagatcatacacagggacgtcaaggctgccaacatcctgctagacgactgctgcgaggccattgtcggtgacttcgggctcgctaaactcctcgaccatcgggactcccatgtcaccactgcggtgcggggcactgtcggccacatcgcgcccgagtacctctccactggccagtcgtcggagaagaccgacgtcttcgggttcggcatcctgctgctggagctcgtcaccggtcagacggcgctggagtttgggaagacggcaaaccagaagggagccatgctggactgggtgaagaagacgcaccaggagaagaagctggacgtgctggtggaccaggggctgaggggcggctacgacaagatggagctagaggagatggtgcgagtagcgctgctgtgcacgcagtaccttcccggccaccggccgaagatgtcggaggtggtccggatgctggaagcaggggaagggctcgcagagcggtgggaagcctcgcactcgcagtcgcagagcgcggactcgcacgagttcaaggccgtcgagctgtcgggcccgagatgatgatgacgacgacgccgccgccagtttgcactttgtacagcatgcatattaaggaccgagaatcctgtgtggactaccatactagaatagctagctatagatgtgtattagattaactgtacaaaaagaagagcgtgtgaggtttgtactgatttggatatttacagaattagtagtcgagacaataagaccaagtaaaaaagagcttttcattgttcatttcagagtgcaacaggttctgaaatagtgaaatctcatcagagtccttagctgattttgacataaatgaaacattctgccgagccttcaaatttattcaatttttcgagcatgcgtttcaaagacctgagtgtttcat

SEQ ID NO: 62190 - DNA, 2723 bp, Zea Mays
ggctgccctgccctctgcactgcaccgcaccgcacccccacctgcactgcgtttgcatgttttgcttggcctcacgcttgttccatgtttgaacataccacaccacattgcacgcaggaggaccggccgccactctttctcgctctcttctcttctcttggctccagctccacccacctctagctgcctcccttcggcaatggaggaggcgccaccatcttcttctcccccctcccctcctgtgatgctactcttgctgctgctgcttatcgtctcctccccttgtagctctagcgccctcctctcccccaagggcgtcaaccctgaaggttctgtcatctctctctctccttttccttctttcctgtttcctcacgtactctgcgactacagcagtaccagtttctatctctgtttcgtttgcctcaaacagaatcgttgttttcgacggcgaatagaaatgaaaatcaaggactccactcactgtcagctgtcttcgtcgtcgcgttgcttcttagttgcattggtgggacctcagctcactgggttaattctctggtatatgtgtgtatgatgttgtgcagtgcaagctctgatgacgatcaagaacacgctcaaggacccccacggcgtgctcaagaactgggaccaggactccgtggatccctgcagctggaccacagtcagctgctcgctagagaacttcgtcaccggactggaggtcccaggtcagaacctctctggcctgctctccccaagcatagggaacctgacgaatcttgagactattctcctgcagaacaacaacatcaccggcctaatcccagcagagatcggcaagcttacaaagctcaggacacttgatctctctagcaaccacctgtatggcgcaatccccacttctgtgggcaaccttgagagcctgcagtacttgaggctcaacaacaacaccctgtctggcccattcccttcagcatcagctaatttgtcccagcttgttttcctagacttgtcatataataatctgagtggtccagtgccgggatctttggcaagaacattcaacatagttgggaatcctctcatctgcggcaccaacaacgccgagagagattgctatgggactgccccaatgccgccatacaacctcaacagctcactgcctccggcaataatgtctaaaagccataagtttgcaattgcatttggtaccgcaattggctgcatcggcctcctcgtcctcgctgccgggtttctgttctggtggaggcatcgtagaaaccggcaggtcctttttgatgtcgatgatcaacacatggagaacgttagcctcgggaacgtgaagaggttccagttcagggagcttcagtctgcgacaggcaacttcagcagcaagaacatactgggaaaaggtggctttggatacgtctacagagggcagttccctgacggaactcttgtggccgtgaagcgactcaaggacggcaacgccgcgggcggcgaggcccagtttcaaaccgaggtcgagatgatcagcctggcactgcacagaaaccttctcaggctctatgggttctgcatgaccgccacagagaggttgctggtctatccatacatgtctaatggaagcgtcgcgtcgcgcctcaaagctagcagtaccacaagcatacgattcctatcctcactttattccacaatgatcgctacgcctacagggaagccacctctggactgggtgacgaggaagaggatagctctcggggcagggagggggctgctgtacctgcacgagcagtgcgaccccaagatcatacacagggacgtcaaggctgccaacatcctgctagacgactgctgcgaggccattgtcggtgacttcgggctcgctaaactcctcgaccatcgggactcccatgtcaccactgcggtgcggggcactgtcggccacatcgcgcccgagtacctctccactggccagtcgtcggagaagaccgacgtcttcgggttcggcatcctgctgctggagctcgtcaccggtcagacggcgctggagtttgggaagacggcaaaccagaagggagccatgctggactgggtgaagaagacgcaccaggagaagaagctggacgtgctggtggaccaggggctgaggggcggctacgacaagatggagctagaggagatggtgcgagtagcgctgctgtgcacgcagtaccttcccggccaccggccgaagatgtcggaggtggtccggatgctggaagcaggggaagggctcgcagagcggtgggaagcctcgcactcgcagtcgcagagcgcggactcgcacgagttcaaggccgtcgagctgtcgggcccgagatgatgatgacgacgacgccgccgccagtttgcactttgtacagcatgcatattaaggaccgagaatcctgtgtggactaccatactagaatagctagctatagatgtgtattagattaactgtacaaaaagaagagcgtgtgaggtttgtactgatttggatatttacagaattagtagtcgagacaataagaccaagtaaaaaagagcttttcattgttcatttcagagtgcaacaggttctgaaatagtgaaatctcatcagagtccttagctgattttgacataaatgaaacattctgccgagccttcaaatttattcaatttttcgagcatgcgtttcaaagacctgagtgtttcat

SEQ ID NO: 62191 - DNA, 2631 bp, Zea Mays
ctcgctcggctttggttgcctagctgcctttctcccactctctctgtatggactcactgtggcgtgggggagagagaaggctgccctgccctctgcactgcaccgcaccgcacccccacctgcactgcgtttgcatgttttgcttggcctcacgcttgttccatgtttgaacataccacaccacattgcacgcaggaggaccggccgccactctttctcgctctcttctcttctcttggctccagctccacccacctctagctgcctcccttcggcaatggaggaggcgccaccatcttcttctcccccctcccctcctgtgatgctactcttgctgctgctgcttatcgtctcctccccttgtagctctagcgccctcctctcccccaagggcgtcaaccctgaagaatcgttgttttcgacggcgaatagaaatgaaaatcaaggactccactcactgtcagctgtcttcgtcgtcgcgttgcttcttagttgcattggtgggacctcagctcactgggttaattctctggtatatgtgtgtatgatgttgtgcagtgcaagctctgatgacgatcaagaacacgctcaaggacccccacggcgtgctcaagaactgggaccaggactccgtggatccctgcagctggaccacagtcagctgctcgctagagaacttcgtcaccggactggaggtcccaggtcagaacctctctggcctgctctccccaagcatagggaacctgacgaatcttgagactattctcctgcagaacaacaacatcaccggcctaatcccagcagagatcggcaagcttacaaagctcaggacacttgatctctctagcaaccacctgtatggcgcaatccccacttctgtgggcaaccttgagagcctgcagtacttgaggctcaacaacaacaccctgtctggcccattcccttcagcatcagctaatttgtcccagcttgttttcctagacttgtcatataataatctgagtggtccagtgccgggatctttggcaagaacattcaacatagttgggaatcctctcatctgcggcaccaacaacgccgagagagattgctatgggactgccccaatgccgccatacaacctcaacagctcactgcctccggcaataatgtctaaaagccataagtttgcaattgcatttggtaccgcaattggctgcatcggcctcctcgtcctcgctgccgggtttctgttctggtggaggcatcgtagaaaccggcaggtcctttttgatgtcgatgatcaacacatggagaacgttagcctcgggaacgtgaagaggttccagttcagggagcttcagtctgcgacaggcaacttcagcagcaagaacatactgggaaaaggtggctttggatacgtctacagagggcagttccctgacggaactcttgtggccgtgaagcgactcaaggacggcaacgccgcgggcggcgaggcccagtttcaaaccgaggtcgagatgatcagcctggcactgcacagaaaccttctcaggctctatgggttctgcatgaccgccacagagaggttgctggtctatccatacatgtctaatggaagcgtcgcgtcgcgcctcaaagggaagccacctctggactgggtgacgaggaagaggatagctctcggggcagggagggggctgctgtacctgcacgagcagtgcgaccccaagatcatacacagggacgtcaaggctgccaacatcctgctagacgactgctgcgaggccattgtcggtgacttcgggctcgctaaactcctcgaccatcgggactcccatgtcaccactgcggtgcggggcactgtcggccacatcgcgcccgagtacctctccactggccagtcgtcggagaagaccgacgtcttcgggttcggcatcctgctgctggagctcgtcaccggtcagacggcgctggagtttgggaagacggcaaaccagaagggagccatgctggactgggtgaagaagacgcaccaggagaagaagctggacgtgctggtggaccaggggctgaggggcggctacgacaagatggagctagaggagatggtgcgagtagcgctgctgtgcacgcagtaccttcccggccaccggccgaagatgtcggaggtggtccggatgctggaagcaggggaagggctcgcagagcggtgggaagcctcgcactcgcagtcgcagagcgcggactcgcacgagttcaaggccgtcgagctgtcgggcccgagatgatgatgacgacgacgccgccgccagtttgcactttgtacagcatgcatattaaggaccgagaatcctgtgtggactaccatactagaatagctagctatagatgtgtattagattaactgtacaaaaagaagagcgtgtgaggtttgtactgatttggatatttacagaattagtagtcgagacaataagaccaagtaaaaaagagcttttcattgttcatttcagagtgcaacaggttctgaaatagtgaaatctcatcagagtccttagctgattttgacataaatgaaacattctgccgagccttcaaatttattcaatttttcgagcatgcgtttcaaagacctgagtgtttcat

SEQ ID NO: 62192 - DNA, 405 bp, Zea Mays
atgcgtagacatcttagaaggagatgtcaggttcatggaagaagcaaagatatatacatggttgaaaaagatgtcatgcctatgcatgctcgtgctaaaggcgaagaatgggggggcgtgtacctggaaaaagatcagaaagcagaaattagagcatctcgtcgtcccaagcaggcacaaattggagcgctagccaggaagaacgtcccggtggtggcgaggagcagcgacgcccacaagatctctacccggggtggtgcgcctaggcccaggcagcgcggtccagattggggaaagggtggacggagaggacggaggcgatggggagcacggtgtagggtcccccgcggcgaggccatagcggtgcgcgaggagcgaggcgtcggagagaggacgaatctctag

SEQ ID NO: 62193 - DNA, 233 bp, Zea Mays
ctcaattgtcagctcttcttcaatcaggtagaattagaatgtttggtatcccatgaagtgcctttcgtggaggaacgtagagagagcaaagatgttgggaaatgtctttggcactggaacgtagagagagcgaagatgttgggaaatgtctttagcacagagagattgaagagaagaaaccgaaggaacttattagcatttctctctcaatatcttcagcttgagaagttggg

SEQ ID NO: 62194 - DNA, 3735 bp, Zea Mays
cagacaggcggacacatacctaagacctaacaaaatcccaaagccgataccggtgacgcggcggcgcggcccaccacggcatcgggcccgcggggcggagggcgtcgctttcgcgagccaccggccgcgcgtacggctccggcaccagcgcagcgcagcgcacgccgggctgcctggcgtccaggcgtattttccctcaaggttccgtcgccgtctcgccctccgacgctccacgcacgccggcaatctccggagagcgacggccgttacgatcagaccagacgtcagaccagaccagaggtgtcgatccgttcccggctcggttcttcctactttcttggacttttgatcgcgtcgcgtcgattagaaactgcctgcgagttaccgcgcgacgacttgctgatgacggtgtgtcatcgcctttccaattggaaaaccagaaaggtgaaagcttcggaatgagacgatggcggaatggaattggctgcagaaagcagcttatctttggcagcgatagtcacagccggagatcccacccgcggcggcacaggtctaaaaggagcaaccgcagatcaactttgccagtgatacgtccgtagtccctgccgaatactcgtacctgctgatactacctcaccacccacacactcccccctcccacgaccaaggttctaaaacttttttccccaagaacatccttgtctgtctccacctgctgacccttgcaaccgcagctataaaaagtacctacgcaggtctcgcgattgtaaaagattgctgcagagaagtttgggaggaacagggttacagtagaagccagtttttgccttttttccaatccctgttcttgcttgtcctggccccgctccttggacttggatttcgatttcttcctgaccatgagtggcaattgccaagtaaaaagctgcgagggttgaagcgagcacggcaagatctgttggttgttgcaggaggcttgccacaggaaggaaaggaggtgccgcttgcggactgtcctgcttgtcctctcacaagacgactccaagccgagaaatcttcgcccaaattctcgctcccccgctctcaattagcgtgcatgggcgcaggaaaggcggcgccttgagctgctgctgcgtcagggggggcgaatggatgcagagagcggccgcggcgccgcgggtgcgcgcaagaagtcatggcggtcagagctggtgctagcctaccagagcctcggcgtcgtgtacggcgatttggcgacgtcgccgctctacgtgtacaagagcgccttcgccggcggcgacatcgagcactctgagggcaacgaagagatctacggcgtgctgtcgctcgtgttctggacgctcaccctcattacgctcctcaagtacgtgctcgtcgtcctgcgcgccgccgatgacggcgagggcggcaccttcgcgctctactccctcatatgccgccgggtccgcgcggggctcctccctggcgtcggcgacagcgctgtcgacgagctcaaggaccagcccgacggcgcgctgccgccgccagcgtcgagcgtgcgcgcggcgctgcagcagcgcagggagctgcagtggctgctgctgctgttcgctctgctcgggacgtccatggtcatcggcgacggcgtgctcacccctgctgtctccgtgttctcagcggtttcggggctcaagctgtcaatggtcaatgaacagcaccaatatgttttgcttccagtaacatgtgtgatcctggtaggcttgttcgccttgcaacacttcggcacgcacagggtcggattcctcttcgcgcctattgtttgcttgtggcttctctgcataagcaccataggggtctacaacatcttcatttggaatccccatatctataaagccctgtcaccatactacatgtaccgatttctccagaagacacaagttggaggctggatgtcactgggtgggatccttttatgtgtaaccggttctgaagctatgtatgcggaccttggacatttctctcagtcttcaatcaagattgctttcacagcggtagtttatccgtcactcgtacttgcctatatgggacaagctgcttatatttcacggcatcacaattttgagaggaaccaccatattggattttacatatcagtacctgaaaagatcagatggcctattctggggattgcaatccttgcagctgtagttgggagccaagcagttatcactggcacattctcagttatcaaacagtgttgctccttgaattgctttccaagggtgaagattgtgcatacatcctccacagtacatggccaaatatacataccagagatcaactggatcttaatgatactgtgcttggctgttactataggcttcagaaacacgaaacagatggcaaatgcacaagggttggcggttataacagttatgattgtcacaacttgctttatgtcactcgtcattgtcctttgttggaacaagaatgttgtatttgctcttgccttccttcttttcttcggtgcaatcgaagctgtctacttctcagcttccctgatgaagttccatgaaggagcttgggtgcctataattgtttccttcattttcttgactgtgatgtgcgtttggcactatggaacagcaaagaagtacgaattcgatgtggaaaacaaggtctcaataagttggcttctgaatttaggctcttcgttgggtattgttcgggtcagaggcattggcctgatacatacagagcttgtgtctgggattcctgccattttctcccactttgtcaccaacctccctgcatttcatcaggttctggtcttcctatgcatcaaatccgtttctgtaccacatgtccaacctgaggagcgatttttggtcggacgcattggcctgaaacaatacaggctataccgggtagttgtccgatacgggtaccgggatgttcaacaggacagcctgcagtttgagaaggccctagtgagcagcattgccgagttcatccgctcgggggactcggatcaaaacggttatccggatggctcagagagtccgtatgagaggttgtctattatcagcaaaggcctgccatttcaagaggctgacggtgacggatcaccatcacctgaatcatctgctcggaaggatacaaacccaatcttagtatcctccaagtcgaggagagtgaggtttgtgctcccagaaaatgcgcagatcaacagccaagtgcgcaacgagctgcaagagctgactgaggcaagagaggcaggcatgtccttcatcatggggcgctcgtatatgaaggcgaaaagtgggtctagcctgatgaagcggattgccataaacttcatctatgagttcctgacgaggaatagccgaggtcccgcctacgcggctaacgtgccacatgtttccacccttgaggtaggaatggtctgccaagtctgatagatatgatatcactgtggccatgtcacgttgtatagagtgatttaccagataacagatatgcagggtgggaactctggcaagctcagtgaagtggtctacagagatgacactgttacagtgatcatgagtcatgacagtaactgtaacagtgatgagagatgaatgatctattttgctgtagtataacaaattcatggttacagttgaacattgtattttgctgtacaaataacacgtttctattctttttcaagagaaaaaaactcgatctgcg

SEQ ID NO: 62195 - DNA, 3671 bp, Zea Mays
cagacaggcggacacatacctaagacctaacaaaatcccaaagccgataccggtgacgcggcggcgcggcccaccacggcatcgggcccgcggggcggagggcgtcgctttcgcgagccaccggccgcgcgtacggctccggcaccagcgcagcgcagcgcacgccgggctgcctggcgtccaggcgtattttccctcaaggttccgtcgccgtctcgccctccgacgctccacgcacgccggcaatctccggagagcgacggccgttacgatcagaccagacgtcagaccagaccagaggtgtcgatccgttcccggctcggttcttcctactttcttggacttttgatcgcgtcgcgtcgattagaaactgcctgcgagttaccgcgcgacgacttgctgatgacggtgtgtcatcgcctttccaattggaaaaccagaaaggtgaaagcttcggaatgagacgatggcggaatggaattggctgcagaaagcagcttatctttggcagcgatagtcacagccggagatcccacccgcggcggcacaggtctaaaaggagcaaccgcagatcaactttgccagtgatacgtccgtagtccctgccgaatactcgtacctgctgatactacctcaccacccacacactcccccctcccacgaccaaggttctaaaacttttttccccaagaacatccttgtctgtctccacctgctgacccttgcaaccgcagctataaaaagtacctacgcaggtctcgcgattgtaaaagattgctgcagagaagtttgggaggaacagggttacagtagaagccagtttttgccttttttccaatccctgttcttgcttgtcctggccccgctccttggacttggatttcgatttcttcctgaccatgagtggcaattgccaagtaaaaagctgcgagggttgaagcgagcacggcaagatctgttggttgttgcaggaggcttgccacaggaaggaaaggaggtgccgcttgcggactgtcctgcttgtcctctcacaagacgactccaagccgagaaatcttcgcccaaattctcgctcccccgctctcaattagcgtgcatgggcgcaggaaaggcggcgccttgagctgctgctgcgtcagggggggcgaatggatgcagagagcggccgcggcgccgcgggtgcgcgcaagaagtcatggcggtcagagctggtgctagcctaccagagcctcggcgtcgtgtacggcgatttggcgacgtcgccgctctacgtgtacaagagcgccttcgccggcggcgacatcgagcactctgagggcaacgaagagatctacggcgtgctgtcgctcgtgttctggacgctcaccctcattacgctcctcaagtacgtgctcgtcgtcctgcgcgccgccgatgacggcgagggcggcaccttcgcgctctactccctcatatgccgccgggtccgcgcggggctcctccctggcgtcggcgacagcgctgtcgacgagctcaaggaccagcccgacggcgcgctgccgccgccagcgtcgagcgtgcgcgcggcgctgcagcagcgcagggagctgcagtggctgctgctgctgttcgctctgctcgggacgtccatggtcatcggcgacggcgtgctcacccctgctgtctccgtgttctcagcggtttcggggctcaagctgtcaatggtcaatgaacagcaccaatatgttttgcttccagtaacatgtgtgatcctggtaggcttgttcgccttgcaacacttcggcacgcacagggtcggattcctcttcgcgcctattgtttgcttgtggcttctctgcataagcaccataggggtctacaacatcttcatttggaatccccatatctataaagccctgtcaccatactacatgtaccgatttctccagaagacacaagttggaggctggatgtcactgggtgggatccttttatgtgtaaccggttctgaagctatgtatgcggaccttggacatttctctcagtcttcaatcaagattgctttcacagcggtagtttatccgtcactcgtacttgcctatatgggacaagctgcttatatttcacggcatcacaattttgagaggaaccaccatattggattttacatatcagtacctgaaaagatcagatggcctattctggggattgcaatccttgcagctgtagttgggagccaagcagttatcactggcacattctcagttatcaaacagtgttgctccttgaattgctttccaagggtgaagattgtgcatacatcctccacagtacatggccaaatatacataccagagatcaactggatcttaatgatactgtgcttggctgttactataggcttcagaaacacgaaacagatggcaaatgcacaagggttggcggttataacagttatgattgtcacaacttgctttatgtcactcgtcattgtcctttgttggaacaagaatgttgtatttgctcttgccttccttcttttcttcggtgcaatcgaagctgtctacttctcagcttccctgatgaagttccatgaaggagcttgggtgcctataattgtttccttcattttcttgactgtgatgtgcgtttggcactatggaacagcaaagaagtacgaattcgatgtggaaaacaaggtctcaataagttggcttctgaatttaggctcttcgttgggtattgttcgggtcagaggcattggcctgatacatacagagcttgtgtctgggattcctgccattttctcccactttgtcaccaacctccctgcatttcatcaggttctggtcttcctatgcatcaaatccgtttctgtaccacatgtccaacctgaggagcgatttttggtcggacgcattggcctgaaacaatacaggctataccgggtagttgtccgatacgggtaccgggatgttcaacaggacagcctgcagtttgagaaggccctagtgagcagcattgccgagttcatccgctcgggggactcggatcaaaacggttatccggatggctcagagagtccgtatgagaggttgtctattatcagcaaaggcctgccatttcaagaggctgacggtgacggatcaccatcacctgaatcatctgctcggaaggatacaaacccaatcttagtatcctccaagtcgaggagagtgaggtttgtgctcccagaaaatgcgcagatcaacagccaagtgcgcaacgagctgcaagagctgactgaggcaagagaggcaggcatgtccttcatcatggggcgctcgtatatgaaggcgaaaagtgggtctagcctgatgaagcggattgccataaacttcatctatgagttcctgacgaggaatagccgaggtcccgcctacgcggctaacgtgccacatgtttccacccttgagtgatttaccagataacagatatgcagggtgggaactctggcaagctcagtgaagtggtctacagagatgacactgttacagtgatcatgagtcatgacagtaactgtaacagtgatgagagatgaatgatctattttgctgtagtataacaaattcatggttacagttgaacattgtattttgctgtacaaataacacgtttctattctttttcaagagaaaaaaactcgatctgcg

SEQ ID NO: 62196 - DNA, 3842 bp, Zea Mays
cagacaggcggacacatacctaagacctaacaaaatcccaaagccgataccggtgacgcggcggcgcggcccaccacggcatcgggcccgcggggcggagggcgtcgctttcgcgagccaccggccgcgcgtacggctccggcaccagcgcagcgcagcgcacgccgggctgcctggcgtccaggcgtattttccctcaaggttccgtcgccgtctcgccctccgacgctccacgcacgccggcaatctccggagagcgacggccgttacgatcagaccagacgtcagaccagaccagaggtgtcgatccgttcccggctcggttcttcctactttcttggacttttgatcgcgtcgcgtcgattagaaactgcctgcgagttaccgcgcgacgacttgctgatgacggtgtgtcatcgcctttccaattggaaaaccagaaaggtgaaagcttcggaatgagacgatggcggaatggaattggctgcagaaagcagcttatctttggcagcgatagtcacagccggagatcccacccgcggcggcacaggtctaaaaggagcaaccgcagatcaactttgccagtgatacgtccgtagtccctgccgaatactcgtacctgctgatactacctcaccacccacacactcccccctcccacgaccaaggttctaaaacttttttccccaagaacatccttgtctgtctccacctgctgacccttgcaaccgcagctataaaaagtacctacgcaggtctcgcgattgtaaaagattgctgcagagaagtttgggaggaacagggttacagtagaagccagtttttgccttttttccaatccctgttcttgcttgtcctggccccgctccttggacttggatttcgatttcttcctgaccatgagtggcaattgccaagtaaaaagctgcgagggttgaagcgagcacggcaagatctgttggttgttgcaggaggcttgccacaggaaggaaaggaggtgccgcttgcggactgtcctgcttgtcctctcacaagacgactccaagccgagaaatcttcgcccaaattctcgctcccccgctctcaattagcgtgcatgggcgcaggaaaggcggcgccttgagctgctgctgcgtcagggggggcgaatggatgcagagagcggccgcggcgccgcgggtgcgcgcaagaagtcatggcggtcagagctggtgctagcctaccagagcctcggcgtcgtgtacggcgatttggcgacgtcgccgctctacgtgtacaagagcgccttcgccggcggcgacatcgagcactctgagggcaacgaagagatctacggcgtgctgtcgctcgtgttctggacgctcaccctcattacgctcctcaagtacgtgctcgtcgtcctgcgcgccgccgatgacggcgagggcggcaccttcgcgctctactccctcatatgccgccgggtccgcgcggggctcctccctggcgtcggcgacagcgctgtcgacgagctcaaggaccagcccgacggcgcgctgccgccgccagcgtcgagcgtgcgcgcggcgctgcagcagcgcagggagctgcagtggctgctgctgctgttcgctctgctcgggacgtccatggtcatcggcgacggcgtgctcacccctgctgtctccgtgttctcagcggtttcggggctcaagctgtcaatggtcaatgaacagcaccaatatgttttgcttccagtaacatgtgtgatcctggtaggcttgttcgccttgcaacacttcggcacgcacagggtcggattcctcttcgcgcctattgtttgcttgtggcttctctgcataagcaccataggggtctacaacatcttcatttggaatccccatatctataaagccctgtcaccatactacatgtaccgatttctccagaagacacaagttggaggctggatgtcactgggtgggatccttttatgtgtaaccggttctgaagctatgtatgcggaccttggacatttctctcagtcttcaatcaagattgctttcacagcggtagtttatccgtcactcgtacttgcctatatgggacaagctgcttatatttcacggcatcacaattttgagaggaaccaccatattggattttacatatcagtacctgatggcctattctggggattgcaatccttgcagctgtagttgggagccaagcagttatcactggcacattctcagttatcaaacagtgttgctccttgaattgctttccaagggtgaagattgtgcatacatcctccacagtacatggccaaatatacataccagagatcaactggatcttaatgatactgtgcttggctgttactataggcttcagaaacacgaaacagatggcaaatgcacaagggttggcggttataacagttatgattgtcacaacttgctttatgtcactcgtcattgtcctttgttggaacaagaatgttgtatttgctcttgccttccttcttttcttcggtgcaatcgaagctgtctacttctcagcttccctgatgaagttccatgaaggagcttgggtgcctataattgtttccttcattttcttgactgtgatgtgcgtttggcactatggaacagcaaagaagtacgaattcgatgtggaaaacaaggtctcaataagttggcttctgaatttaggctcttcgttgggtattgttcgggtcagaggcattggcctgatacatacagagcttgtgtctgggattcctgccattttctcccactttgtcaccaacctccctgcatttcatcaggttctggtcttcctatgcatcaaatccgtttctgtaccacatgtccaacctgaggagcgatttttggtcggacgcattggcctgaaacaatacaggctataccgggtagttgtccgatacgggtaccgggatgttcaacaggacagcctgcagtttgagaaggccctagtgagcagcattgccgagttcatccgctcgggggactcggatcaaaacggttatccggatggctcagagagtccgtatgagaggttgtctattatcagcaaaggcctgccatttcaagaggctgacggtgacggatcaccatcacctgaatcatctgctcggaaggatacaaacccaatcttagtatcctccaagtcgaggagagtgaggtttgtgctcccagaaaatgcgcagatcaacagccaagtgcgcaacgagctgcaagagctgactgaggcaagagaggcaggcatgtccttcatcatggggcgctcgtatatgaaggcgaaaagtgggtctagcctgatgaagcggattgccataaacttcatctatgagttcctgacgaggaatagccgaggtcccgcctacgcggctaacgtgccacatgtttccacccttgaggtaggaatggtctgccaagtctgatagatatgatatcactgtggccatgtcacgttgtatagaggtaaaaatagttcttatgcctgtacactcacacatatatatcctaactaacaaaagagttagattgtgttgatgaagcggggcatgcatcattgtggcctgcgagtgcagatgttggatagacaaagtgtgcatagttttgtgttttctctataatatattcttttgtgttaggctcttccttgctctgctttgtcaatataccaatgccactgttgctatgtgctatagttacagagtaggagggaggccatttttgtgtgcataaattggcttgttgccaattaattgtatgtactgtatcagaatctgaataagtttatgctgaaattgtttcatccaagttctgagaggg

SEQ ID NO: 62197 - DNA, 907 bp, Zea Mays
attcactaatccgagttttgaccggttctatattcataagcatgttgttgcaccacacaacctttttgttttatatgttgtcatctgatctctggtgaaaaggagggagatgagctacggaggaaatctgatgttatggaactctaagaaaagtctagatttccacaggtccagtggtgccactgatgtcaagtcagcagaaacgattcttgagcatgagtatgcgtcgatgctctttttccctgaggcaatgctactcctatgcacagtgatgtagtagcaacggagaactgtcattaattggatacttcttatcctaattgcagtcgtatcatttagcttggggtttgaattatcggattgccctaccatactgcttagctaaagcccttgtcaaaatgcataattagaagcaactattaaagaaagatcagcttcagatagagtgaagacgcgagtgcattttccagggatggaaagaaggcatgatttattttcctccgacatataaatactcattcaactcggatcgttactctggtgtgcggcccaaagaaaatcggaggacacatgcttggtgcgatcacattccgtggcctcttgcagtcgtcctacatccgcggagagtctcgcttctttgaccacggaccagtgtacaatcttttcatggctaaggttgggagtgtccaccacagaagatcgaacttaaccttgatcatgatctctagcgctgagggaacagtgatagattgatatgaggtttgtaggtgtaattatgtgtataataacctttttttattttccttgcccctatggtgtagtacctgaaaagcaaaatgatgtatgtatttgttgttaaatacttttctaattctaacagtaagaaattaaggttgtgccgatgcac

SEQ ID NO: 62198 - DNA, 1219 bp, Zea Mays
agctatgttaaggtgatatttcgtccacaataatttctcccaaagacaggacaatgagaataacctctcaattgtgtcattttgttgtattttcatcaggagaatcaattgatggtcaacatggggattagtccgaggcggagtgctccgtcgacctcaagctcggcgggctaggcgagatcggggcggcggacggcacaaccacgaaggagccggtggctgcaaccgcagctccgtccgccaccccgatgaagcgcccgcgcttgcggcccggcggcgccggcggggcgcagtgcccgtcgtgcgcggtggacggctgcaaggccgacctgagcaagtgccgcgactaccaccgccgccacaaggtctgtgagacgcactccaagacgcccatcgttgtcgtcaccggccgcgagatgcgcttctgccagcagtgcagcagggttctatattcataagcatgttgttgcaccacacaacctttttgttttatatgttgtcatctgatctctggtgaaaaggagggagatgagctacggaggaaatctgatgttatggaactctaagaaaagtctagatttccacaggtccagtggtgccactgatgtcaagtcagcagaaacgattcttgagcatgatcgtatcatttagcttggggtttgaattatcggattgccctaccatactgcttagctaaagcccttgtcaaaatgcataattagaagcaactattaaagaaagatcagcttcagatagagtgaagacgcgagtgcattttccagggatggaaagaaggcatgatttattttcctccgacatataaatactcattcaactcggatcgttactctggtgtgcggcccaaagaaaatcggaggacacatgcttggtgcgatcacattccgtggcctcttgcagtcgtcctacatccgcggagagtctcgcttctttgaccacggaccagtgtacaatcttttcatggctaaggttgggagtgtccaccacagaagatcgaacttaaccttgatcatgatctctagcgctgagggaacagtgatagattgatatgaggtttgtaggtgtaattatgtgtataataacctttttttattttccttgcccctatggtgtagtacctgaaaagcaaaatgatgtatgtatttgttgttaaatacttttctaattctaacagtaagaaattaaggttgtgccgatgcac

SEQ ID NO: 62199 - DNA, 2292 bp, Zea Mays
gagggccactcacacgtctcctactagcctgcccggcgctctcgtccgatcgcgcatcgcctcctttcggaatcttctcctccgggctccggatgttccttcccaagcatccgagccctacccgtccggggcgcacctgcctgcaaccaggcgttcctctcgttcgccctcgctcccgcatccccgcgacgacattatcagaacggcgacatctccttcggtcgtcggccgctgcctcctccagcttcccgtccagggattccccactctctgccgcgaaggggtcatcgcagaataagccgccggatgaaatcaggaggtggaaggcggtgtcgcctggaatgcgcgagtccgctgaccctgaaactgaaactgaggacccatcaccgccgcggacggccctctggtcggcgaggcggagggcacgcgctgcgtggcggaaggtggtgtcttgggtgcccaggaaggcccggagcctcgtactactcaatctggtcactcttatattcgctagcaacatttcagttgtgaaacaggcagaggctcttttggaccctgaccttttcaatatgttaaggttcactatagcagccatcccttttgtgccgctgttactaaaatcgctgaggaatatgcaaatcctttttagaggactagagttgggcatttgggtaagcgtggcctaccttgctcaggctatggggttagttacggctggtgctggacgtgcatctttcatttctgcactcacagttatcatcgtcccgttcttggatggtcttattggagcagaagtacctgcccatacatggtttggggcatttttatcactttttggtgttattatgctggagctaagtggttctccaccatgtgtaagtcggattatctacatggacaggttaacatgtttgtcttgaccttttgtttgcttgtcttatggcccatgacactgctctgtcaaggttactattgtcttgaaagttttaactttttatatcgctgctttagtaatttggatattatgaatgttttgagaactacaccactagggattgcgcctgccatattgattgatgttctcatgatctcatcccttgcttccatcaggttggtgatcttctgaacctcttgagcgccttttcttttgcaattcatatgctcagaactgagcatatttcaagaaatataaagaaagaaaatttcttaactcttgttggatgtgaggttagtattctgactaagactcattacctcagttatgcgagttcttctgttcgtcttgacaaggttcttaaacaagtgtaaaaccaggtgtttgttgtagcaatcctatcagcagcgtcatatacttttaaatgcttcacacaaaatgtacaacactggaatttgaaagtatggtctccatcagagttatttggtatggcgatgttgtttccttggccagcaattctatacacaggcatattgtcaacttcgttttgtttatgggcagaggtggccgctatgcgcgttgtatcagctacagaaactgcaattatttatggtctggaacctgtatggggtgctgcttttgcatgggtaatgctcggcgagagatggggcctgacaggatttgtcggggctatcttcatcatggctggcagcttgatggttcagatatatggatcaatcctagatgatgtatctagaggagacgattaccagatgaacatttaaatgttcatattacagaagatgaagcaagttgtaattcatgatgaagcaagttttttcccatttatagggtaggtagctacgagcaagtgtaaccaaactctcaaagtttgcccccccccccccacacacacacacacacacattcctccaaatggctttgttgttgttgagagtttctcatcgatatttcatcctctacttctcagcacaccctaaccgatctcctattttttttccctttacactgtattgttatggtcatgggccctgttcattaggtctggattgtcaaatttatggaaagagaggaggaataaggggaagaatgatgggctcctacatctagaggtctaggggagataaatgagagtcctccatccatctgggggatgtgatgacccaaggtggcagcgcataggcgagtatggtggaattaagtagcaggtatagagtattagctgagtctttcgagtattagtgcttgggtcgtattaatctttttatgggctgtaataggtgaattagccaaggcattaggtgtattaaaagttgaattcgagatctataaatgat

SEQ ID NO: 62200 - DNA, 1983 bp, Zea Mays
gagggccactcacacgtctcctactagcctgcccggcgctctcgtccgatcgcgcatcgcctcctttcggaatcttctcctccgggctccggatgttccttcccaagcatccgagccctacccgtccggggcgcacctgcctgcaaccaggcgttcctctcgttcgccctcgctcccgcatccccgcgacgacattatcagaacggcgacatctccttcggtcgtcggccgctgcctcctccagcttcccgtccagggattccccactctctgccgcgaaggggtcatcgcagaataagccgccggatgaaatcaggaggtggaaggcggtgtcgcctggaatgcgcgagtccgctgaccctgaaactgaaactgaggacccatcaccgccgcggacggccctctggtcggcgaggcggagggcacgcgctgcgtggcggaaggtggtgtcttgggtgcccaggaaggcccggagcctcgtactactcaatctggtcactcttatattcgctagcaacatttcagttgtgaaacaggcagaggctcttttggaccctgaccttttcaatatgttaaggttcactatagcagccatcccttttgtgccgctgttactaaaatcgctgaggaatatgcaaatcctttttagaggactagagttgggcatttgggtaagcgtggcctaccttgctcaggctatggggttagttacggctggtgctggacgtgcatctttcatttctgcactcacagttatcatcgtcccgttcttggatggtcttattggagcagaagtacctgcccatacatggtttggggcatttttatcactttttggtgttattatgctggagctaagtggttctccaccatgtgtaagtcggattatctacatggacaggttggtgatcttctgaacctcttgagcgccttttcttttgcaattcatatgctcagaactgagcatatttcaagaaatataaagaaagaaaatttcttaactcttgttggatgtgagcaatcctatcagcagcgtcatatacttttaaatgcttcacacaaaatgtacaacactggaatttgaaagtatggtctccatcagagttatttggtatggcgatgttgtttccttggccagcaattctatacacaggcatattgtcaacttcgttttgtttatgggcagaggtggccgctatgcgcgttgtatcagctacagaaactgcaattatttatggtctggaacctgtatggggtgctgcttttgcatgggtaatgctcggcgagagatggggcctgacaggatttgtcggggctatcttcatcatggctggcagcttgatggttcagatatatggatcaatcctagatgatgtatctagaggagacgattaccagatgaacatttaaatgttcatattacagaagatgaagcaagttgtaattcatgatgaagcaagttttttcccatttatagggtaggtagctacgagcaagtgtaaccaaactctcaaagtttgcccccccccccccacacacacacacacacacattcctccaaatggctttgttgttgttgagagtttctcatcgatatttcatcctctacttctcagcacaccctaaccgatctcctattttttttccctttacactgtattgttatggtcatgggccctgttcattaggtctggattgtcaaatttatggaaagagaggaggaataaggggaagaatgatgggctcctacatctagaggtctaggggagataaatgagagtcctccatccatctgggggatgtgatgacccaaggtggcagcgcataggcgagtatggtggaattaagtagcaggtatagagtattagctgagtctttcgagtattagtgcttgggtcgtattaatctttttatgggctgtaataggtgaattagccaaggcattaggtgtattaaaagttgaattcgagatctataaatgat

SEQ ID NO: 62201 - DNA, 5661 bp, Zea Mays
gactcggtggcggcgtcagaggctccccctcctgcctcgcgccctcgcctccggtcctccgcacaccggccggcgaccctgctgtctcccggccccggcgggcagtgggagccagcagctgctgctccaacaagcaatgatgggaatagaaggcattgcagccacagtcaccgaggaccctgaaccctcaattcctccaggatttggaccttttgctgcctcggcatcatggggaatccaaaacgatgttaaacctgctgatgatcattctagttctgttttagcattacagagcatcgacgacgatgtggaaattttggaatatctatccagttcagtggatcaccagagtgacacaggttgctgtatttctgggagcaatacctgtaggaaatcactgcgtaatagacctccaatagattatagccgctttgatcagattgcagatgaagattctgatgctgaagtagcagacaagggtgtaaatgcagtgaaacacagacaacaattccctaaaggagtacttcgaggatgtccagaatgtgccaattgtcaaaaggttattgcaagatggaatccatctggtgcacgtaggcctgttcttgatgaggctcctgtttactatcctaccgaggaggaatttcaggacacattaaaatacattgagattatccgcccaacagcagaaccatatggaatatgccgtattgttccaccagcttcatggaagcctccatgccttcttaaagagaaaaacatttgggagtgctcaaaattttctactcgggtacagaaggttgacaagctccaaaatcgtaaatcgcccaagaagagcagaagaggtggaatgatgaagaagcgtagaaagatttcggagactgaagaaaacaatcaccatcaaattggaatgcagcaaaaccaagagagatttggatttgaaccaggaccagagttcacactacagatgtttcagaagtatgcagatgacttcagtgatcagtattttatgaaagataaatgcagagattcaccaccatcagtggaagatattgaaggcgagtattggcgcatagttgaaagaccgacagaggagatagaggtaatatatggtgccgatttggagactggaacttttggcagtgggtttccaaagttatgtcctgaaatgaaatctgatgtggaggataaatatgcacaatctgggtggaatctaaataacctgcctagactacaaggttcggttctttcttttgaaggcggtgacatttctggtgttttagtgccttggctttatgtcggcatgtgtttttcatctttctgctggcatgttgaagatcatcatttgtactcactgaactacatgcattggggtgctccaaagatgtggtatggagttccagggaaggatgctgtgaatttggaggctgcaatgaggaaacatcttcctgagttatttgaggagcaacctgatttgcttcacaacttagttactcagttctcaccatcattgcttaaatctgaaggagtaccagtctaccgatgtgttcagcatgagggagagtttgtcctgacgttcccacgggcataccatgctggttttaattgtggcttcaattgtgcagaagctgttaatgtggcacccattgattggttgccggttggacaaaatgctgttgatctttatcgtgaacaagctcggaaaataactatctcccatgataagctgttgcttggggctgcaagagaagcaataagagctcagtgggacatcctatttctcaagaggaattcttctgttaacttgaggtggaaaagcatatgtggacctgatagcacaatatgcaagtcactgaaggcacgaattgaaatggagttggtacaaagacaaaatatatcctctccatgtcaatctaggaaaatggatagtgagtttgattctactgatagggaatgtgcattgtgttactatgatctgcatctttcagcttcaggctgtccatgctccccagagaaatatgcttgcctggtacatgcaaagcagctttgttcatgcgattgggacaaaaggtttttcctatttcgttatgatgttaatgagttgaatatcttagctgatgctttagggggaaagctaagtgccattcacagatggggtgtctctgatcttggattaagtttgagctcctgtgtcaaacgggaaaaggtccaagattccaagactgttcgcagattaactgatggcccaagacggtcctacatgtcacaggcatcaacagtatcattgattccttcttctgttagcactgaacagaaaaagaatgaagataagacactggatttaggttgcccaggtatgaatttaccaaaaataagtccggaggcaaataatctgcgtccttcgacagaacagataaaatcagaaaatctctcacagctaaaggaaccatgtgtgaagaatgaattatcttgtccgaccagcaatggtaccagccaagaacataaaggagggattggaggccacaaacttgcagcagcaagcatgatggttctttctggtcaatcatttcctgcaaatgctggtgaatcagtgagaaatgcgcatgtcttggcagtatttaaagagggtagagactgtacatcttcacttacacttagggagtatcataacaggccagtgtcaatgattgataatggagctaacatgaagctggatctggaaaacatagacaattctcatatgttgatgtcatcaccagacttcaatgcaactgtatgtcattcttacaaggatcaaacattcttaacactggaaactaatacctctgtgatgactgagaaagatagcagtcaggcccgtaatgcaagccagcagtttgtcagtactgctttaagaacacaaaatgtgtctcaggaaccattgtgtaccgcgattgctccaaagcaactcatagatcctcaagttcagaaaaaatcatatggtgtttttggttctggcagtgcccatcttgggcatctgactgttggtaatcagcaactaaatgagagatggcatcaaagacaatctgattctttatccagtgtggaagttagagctaggggtcattcagctatgatagtgcagcctgctctggaaaatcacagcagaaatggagttgcacagaagggtcctcgcatagctaatgttgtacatagattcaagtgctctgttgaacctatagaaattggtgctgtgttatctgggaagttgtggtcctcaagtcaagcaatcttcccaaaagggtttaagagcagagtaaaatacttcagtgttgtagatccagtacaaatgacatactacatatctgaaatattggacgctggacagcagggaccactttttatggtgactgtagaaaactgtcctggtgaaattttcataaacatctctcctaccaagtgctggaacatggttcgtgaaaggctcaatatggaaataaggaggcagctcaatatgggaagagctaaccttcctacactacagcctccaggatcagttgatggccatgaaatgtttgggttgttaacaccagcaatagttcaggcaattgaggcccgggacagagattatatctgtacagagtactggcgatcaaggccccatgcaacaattgagaatcgagacaatcagaatatgtcacctcaggatccaccccttgttgcactgagggggctcttccagcgggctaattgtgatgaactgcgagcactacgcagtttgctgatgagcaatagaattctgggcgacaattctaggcagcaggcttgccaaatccttgatgaggagattgcgaagcaatggcactgaccagcgtaaatacaggatgttgtactaaccaattgtttggcatgattttgttttgacgggataaatcagttttaaggcttgcttcttccgttgcccttgtgcccattcttttcattcttgtgaccatacccaattctttattgcaagtggtgtcaacaagcatgaggctacagctgcatcacctgcaaggaagtcaaaaactacaaccaagtaaagctattgcacactcctcaacaactgtatgcaagaagcaggatagcggatgaacatgtatcctccagggacttattttaagtaaagctttaaaggcgcagaaagacgtcaaagatgcaagtgctcagatggccataggcaacctgtagtctgaagttattgggcttcaccgtgatcttgaagaaaaagaaataaagctaaatacttttgccaaagatctgattgaagaccacactaagttctagaaatcctctaaagagaaagacaacaaaatttcgaagctagaagttgacaactcgtagagcatgaaacacattgcagagcttgaggcctagataaaagagcaagttgtagcacacaaaggcaaaatggccaaattgaaagagaaggtcaaagatactagtgtaatttttgaggttgaaaaggtgaagcataaaatttctgataatgagagaaccacattatagaaaattgttgatgaactttgggagtctagcgaagaatgcttctactccactgcccagtgttgtaaaaaatttaaaaaataccttcgtctccataggagcattttcaagtgaaaaagaatttgtgcgcggcgacgcctctagtgcggtgaagtggataggagaagtggaggccttcgatgaagtattatccacccgtggtgattattgtgcgtgtataggggcacacgttgcaactttgctgcttgacaaggctagatgcgagcatgtaaaagttgccagctagccagagtttaaatattatgttgatgacaataagattcctttagctgaagcaaccgagcttgggagaaagttttataccgatgtctggcttggtggagggaagaagttagtagatgaagttgctagagaaaatgtaagaaatgtttctttttatcgtttatttttctgtttcgggacttagaattttagtgtttacacaaagactcacaagcttacaaaaaaggcggaagcaataaaggaacctttaagattaaaggaactcgaagatgccctttcgccagaacccaaagagtacaatccagatgaagattcactactgcaggattggctagcacatctggacatgttgtataaaacagtagacaaagttgttgatgatgttttcaataatgttcccgaaagagttaccttttcgaaatagtatatgattattataagggggcttcggcataaaggtcttctctcatggcaaagacatacagtgtgaagatgtaacccgaaggtgataagaatggtcgccgaagctatagccaaagagcttcgacttaatatggtgacgaagaccaaatatgatgctgaccgaaaggggaaaagactatttagtccttaatgattcatgttatgattataaatagatgccagggacataaatgtacttttacctggaatgtgtcccgtgcctataaatagataaacagtagcaccgtactgttcacgctgaattatagtcactctctcgcgtcttcagcttcgagcaagccgaaggtatcaatgtaatatgaattatgttgatattcatacatgttttatgggatgcaaatatgaatgaattaacaagatacaattactatcttc

SEQ ID NO: 62202 - DNA, 5568 bp, Zea Mays
cggggactcggtggcggcgtcagaggctccccctcctgcctcgcgccctcgcctccggtcctccgcacaccggccggcgaccctgctgtctcccggccccggcgggcagtgggagccagcagctgctgctccaacaagcaatgatgggaatagaaggcattgcagccacagtcaccgaggaccctgaaccctcaattcctccaggatttggaccttttgctgcctcggcatcatggggaatccaaaacgatgttaaacctgctgatgatcattctagttctgttttagcattacagagcatcgacgacgatgtggaaattttggaatatctatccagttcagtggatcaccagagtgacacaggttgctgtatttctgggagcaatacctgtaggaaatcactgcgtaatagacctccaatagattatagccgctttgatcagattgcagatgaagattctgatgctgaagtagcagacaagggtgtaaatgcagtgaaacacagacaacaattccctaaaggagtacttcgaggatgtccagaatgtgccaattgtcaaaaggttattgcaagatggaatccatctggtgcacgtaggcctgttcttgatgaggctcctgtttactatcctaccgaggaggaatttcaggacacattaaaatacattgagattatccgcccaacagcagaaccatatggaatatgccgtattgttccaccagcttcatggaagcctccatgccttcttaaagagaaaaacatttgggagtgctcaaaattttctactcgggtacagaaggttgacaagctccaaaatcgtaaatcgcccaagaagagcagaagaggtggaatgatgaagaagcgtagaaagatttcggagactgaagaaaacaatcaccatcaaattggaatgcagcaaaaccaagagagatttggatttgaaccaggaccagagttcacactacagatgtttcagaagtatgcagatgacttcagtgatcagtattttatgaaagataaatgcagagattcaccaccatcagtggaagatattgaaggcgagtattggcgcatagttgaaagaccgacagaggagatagaggtaatatatggtgccgatttggagactggaacttttggcagtgggtttccaaagttatgtcctgaaatgaaatctgatgtggaggataaatatgcacaatctgggtggaatctaaataacctgcctagactacaaggttcggttctttcttttgaaggcggtgacatttctggtgttttagtgccttggctttatgtcggcatgtgtttttcatctttctgctggcatgttgaagatcatcatttgtactcactgaactacatgcattggggtgctccaaagatgtggtatggagttccagggaaggatgctgtgaatttggaggctgcaatgaggaaacatcttcctgagttatttgaggagcaacctgatttgcttcacaacttagttactcagttctcaccatcattgcttaaatctgaaggagtaccagtctaccgatgtgttcagcatgagggagagtttgtcctgacgttcccacgggcataccatgctggttttaattgtggcttcaattgtgcagaagctgttaatgtggcacccattgattggttgccggttggacaaaatgctgttgatctttatcgtgaacaagctcggaaaataactatctcccatgataagctgttgcttggggctgcaagagaagcaataagagctcagtgggacatcctatttctcaagaggaattcttctgttaacttgaggtggaaaagcatatgtggacctgatagcacaatatgcaagtcactgaaggcacgaattgaaatggagttggtacaaagacaaaatatatcctctccatgtcaatctaggaaaatggatagtgagtttgattctactgatagggaatgtgcattgtgttactatgatctgcatctttcagcttcaggctgtccatgctccccagagaaatatgcttgcctggtacatgcaaagcagctttgttcatgcgattgggacaaaaggtttttcctatttcgttatgatgttaatgagttgaatatcttagctgatgctttagggggaaagctaagtgccattcacagatggggtgtctctgatcttggattaagtttgagctcctgtgtcaaacgggaaaaggtccaagattccaagactgttcgcagattaactgatggcccaagacggtcctacatgtcacaggcatcaacagtatcattgattccttcttctgttagcactgaacagaaaaagaatgaagataagacactggatttaggttgcccaggtatgaatttaccaaaaataagtccggaggcaaataatctgcgtccttcgacagaacagataaaatcagaaaatctctcacagctaaaggaaccatgtgtgaagaatgaattatcttgtccgaccagcaatggtaccagccaagaacataaaggagggattggaggccacaaacttgcagcagcaagcatgatggttctttctggtcaatcatttcctgcaaatgctggtgaatcagtgagaaatgcgcatgtcttggcagtatttaaagagggtagagactgtacatcttcacttacacttagggagtatcataacaggccagtgtcaatgattgataatggagctaacatgaagctggatctggaaaacatagacaattctcatatgttgatgtcatcaccagacttcaatgcaactgtatgtcattcttacaaggatcaaacattcttaacactggaaactaatacctctgtgatgactgagaaagatagcagtcaggcccgtaatgcaagccagcagtttgtcagtactgctttaagaacacaaaatgtgtctcaggaaccattgtgtaccgcgattgctccaaagcaactcatagatcctcaagttcagaaaaaatcatatggtgtttttggttctggcagtgcccatcttgggcatctgactgttggtaatcagcaactaaatgagagatggcatcaaagacaatctgattctttatccagtgtggaagttagagctaggggtcattcagctatgatagtgcagcctgctctggaaaatcacagcagaaatggagttgcacagaagggtcctcgcatagctaatgttgtacatagattcaagtgctctgttgaacctatagaaattggtgctgtgttatctgggaagttgtggtcctcaagtcaagcaatcttcccaaaagggtttaagagcagagtaaaatacttcagtgttgtagatccagtacaaatgacatactacatatctgaaatattggacgctggacagcagggaccactttttatggtgactgtagaaaactgtcctggtgaaattttcataaacatctctcctaccaagtgctggaacatggttcgtgaaaggctcaatatggaaataaggaggcagctcaatatgggaagagctaaccttcctacactacagcctccaggatcagttgatggccatgaaatgtttgggttgttaacaccagcaatagttcaggcaattgaggcccgggacagagattatatctgtacagagtactggcgatcaaggccccatgcaacaattgagaatcgagacaatcagaatatgtcacctcaggatccaccccttgttgcactgagggggctcttccagcgggctaattgtgatgaactgcgagcactacgcagtttgctgatgagcaatagaattctgggcgacaattctaggcagcaggcttgccaaatccttgatgaggagattgcgaagcaatggcactgaccagcgtaaatacaggatgttgtactaaccaattgtttggcatgattttgttttgacgggataaatcagttttaaggcttgcttcttccgttgcccttgtgcccattcttttcattcttgtgaccatacccaattctttattgcaagtggtgtcaacaagcatgaggctacagctgcatcacctgcaaggaagtcaaaaggacttattttaagtaaagctttaaaggcgcagaaagacgtcaaagatgcaagtgctcagatggccataggcaacctgtagtctgaagttattgggcttcaccgtgatcttgaagaaaaagaaataaagctaaatacttttgccaaagatctgattgaagaccacactaagttctagaaatcctctaaagagaaagacaacaaaatttcgaagctagaagttgacaactcgtagagcatgaaacacattgcagagcttgaggcctagataaaagagcaagttgtagcacacaaaggcaaaatggccaaattgaaagagaaggtcaaagatactagtgtaatttttgaggttgaaaaggtgaagcataaaatttctgataatgagagaaccacattatagaaaattgttgatgaactttgggagtctagcgaagaatgcttctactccactgcccagtgttgtaaaaaatttaaaaaataccttcgtctccataggagcattttcaagtgaaaaagaatttgtgcgcggcgacgcctctagtgcggtgaagtggataggagaagtggaggccttcgatgaagtattatccacccgtggtgattattgtgcgtgtataggggcacacgttgcaactttgctgcttgacaaggctagatgcgagcatgtaaaagttgccagctagccagagtttaaatattatgttgatgacaataagattcctttagctgaagcaaccgagcttgggagaaagttttataccgatgtctggcttggtggagggaagaagttagtagatgaagttgctagagaaaatgtaagaaatgtttctttttatcgtttatttttctgtttcgggacttagaattttagtgtttacacaaagactcacaagcttacaaaaaaggcggaagcaataaaggaacctttaagattaaaggaactcgaagaacccaaagagtacaatccagatgaagattcactactgcaggattggctagcacatctggacatgttgtataaaacagtagacaaagttgttgatgatgttttcaataatgttcccgaaagagttaccttttcgaaatagtatatgattattataagggggcttcggcataaaggtcttctctcatggcaaagacatacagtgtgaagatgtaacccgaaggtgataagaatggtcgccgaagctatagccaaagagcttcgacttaatatggtgacgaagaccaaatatgatgctgaccgaaaggggaaaagactatttagtccttaatgattcatgttatgattataaatagatgccagggacataaatgtacttttacctggaatgtgtcccgtgcctataaatagataaacagtagcaccgtactgttcacgctgaattatagtcactctctcgcgtcttcagcttcgagcaagccgaaggtatcaatgtaatatgaattatgttgatattcatacatgttttatgggatgcaaatatgaatgaattaacaagatacaattactatcttc

SEQ ID NO: 62203 - DNA, 4467 bp, Zea Mays
ccgactcccaactcccgaccggctcgcgagctatctcggggacacaaccgactgcctcgcgcctcttcctcatccgtcgtcaccggttgcttcccaccgccgccttgcgcctccatgctctcagcaatgatgggaatagaaggcattgcagccacagtcaccgaggaccctgaaccctcaattcctccaggatttggaccttttgctgcctcggcatcatggggaatccaaaacgatgttaaacctgctgatgatcattctagttctgttttagcattacagagcatcgacgacgatgtggaaattttggaatatctatccagttcagtggatcaccagagtgacacaggttgctgtatttctgggagcaatacctgtaggaaatcactgcgtaatagacctccaatagattatagccgctttgatcagattgcagatgaagattctgatgctgaagtagcagacaagggtgtaaatgcagtgaaacacagacaacaattccctaaaggagtacttcgaggatgtccagaatgtgccaattgtcaaaaggttattgcaagatggaatccatctggtgcacgtaggcctgttcttgatgaggctcctgtttactatcctaccgaggaggaatttcaggacacattaaaatacattgagattatccgcccaacagcagaaccatatggaatatgccgtattgttccaccagcttcatggaagcctccatgccttcttaaagagaaaaacatttgggagtgctcaaaattttctactcgggtacagaaggttgacaagctccaaaatcgtaaatcgcccaagaagagcagaagaggtggaatgatgaagaagcgtagaaagatttcggagactgaagaaaacaatcaccatcaaattggaatgcagcaaaaccaagagagatttggatttgaaccaggaccagagttcacactacagatgtttcagaagtatgcagatgacttcagtgatcagtattttatgaaagataaatgcagagattcaccaccatcagtggaagatattgaaggcgagtattggcgcatagttgaaagaccgacagaggagatagaggtaatatatggtgccgatttggagactggaacttttggcagtgggtttccaaagttatgtcctgaaatgaaatctgatgtggaggataaatatgcacaatctgggtggaatctaaataacctgcctagactacaaggttcggttctttcttttgaaggcggtgacatttctggtgttttagtgccttggctttatgtcggcatgtgtttttcatctttctgctggcatgttgaagatcatcatttgtactcactgaactacatgcattggggtgctccaaagatgtggtatggagttccagggaaggatgctgtgaatttggaggctgcaatgaggaaacatcttcctgagttatttgaggagcaacctgatttgcttcacaacttagttactcagttctcaccatcattgcttaaatctgaaggagtaccagtctaccgatgtgttcagcatgagggagagtttgtcctgacgttcccacgggcataccatgctggttttaattgtggcttcaattgtgcagaagctgttaatgtggcacccattgattggttgccggttggacaaaatgctgttgatctttatcgtgaacaagctcggaaaataactatctcccatgataagctgttgcttggggctgcaagagaagcaataagagctcagtgggacatcctatttctcaagaggaattcttctgttaacttgaggtggaaaagcatatgtggacctgatagcacaatatgcaagtcactgaaggcacgaattgaaatggagttggtacaaagacaaaatatatcctctccatgtcaatctaggaaaatggatagtgagtttgattctactgatagggaatgtgcattgtgttactatgatctgcatctttcagcttcaggctgtccatgctccccagagaaatatgcttgcctggtacatgcaaagcagctttgttcatgcgattgggacaaaaggtttttcctatttcgttatgatgttaatgagttgaatatcttagctgatgctttagggggaaagctaagtgccattcacagatggggtgtctctgatcttggattaagtttgagctcctgtgtcaaacgggaaaaggtccaagattccaagactgttcgcagattaactgatggcccaagacggtcctacatgtcacaggcatcaacagtatcattgattccttcttctgttagcactgaacagaaaaagaatgaagataagacactggatttaggttgcccaggtatgaatttaccaaaaataagtccggaggcaaataatctgcgtccttcgacagaacagataaaatcagaaaatctctcacagctaaaggaaccatgtgtgaagaatgaattatcttgtccgaccagcaatggtaccagccaagaacataaaggagggattggaggccacaaacttgcagcagcaagcatgatggttctttctggtcaatcatttcctgcaaatgctggtgaatcagtgagaaatgcgcatgtcttggcagtatttaaagagggtagagactgtacatcttcacttacacttagggagtatcataacaggccagtgtcaatgattgataatggagctaacatgaagctggatctggaaaacatagacaattctcatatgttgatgtcatcaccagacttcaatgcaactgtatgtcattcttacaaggatcaaacattcttaacactggaaactaatacctctgtgatgactgagaaagatagcagtcaggcccgtaatgcaagccagcagtttgtcagtactgctttaagaacacaaaatgtgtctcaggaaccattgtgtaccgcgattgctccaaagcaactcatagatcctcaagttcagaaaaaatcatatggtgtttttggttctggcagtgcccatcttgggcatctgactgttggtaatcagcaactaaatgagagatggcatcaaagacaatctgattctttatccagtgtggaagttagagctaggggtcattcagctatgatagtgcagcctgctctggaaaatcacagcagaaatggagttgcacagaagggtcctcgcatagctaatgttgtacatagattcaagtgctctgttgaacctatagaaattggtgctgtgttatctgggaagttgtggtcctcaagtcaagcaatcttcccaaaagggtttaagagcagagtaaaatacttcagtgttgtagatccagtacaaatgacatactacatatctgaaatattggacgctggacagcagggaccactttttatggtgactgtagaaaactgtcctggtgaaattttcataaacatctctcctaccaagtgctggaacatggttcgtgaaaggctcaatatggaaataaggaggcagctcaatatgggaagagctaaccttcctacactacagcctccaggatcagttgatggccatgaaatgtttgggttgttaacaccagcaatagttcaggcaattgaggcccgggacagagattatatctgtacagagtactggcgatcaaggccccatgcaacaattgagaatcgagacaatcagaatatgtcacctcaggatccaccccttgttgcactgagggggctcttccagcgggctaattgtgatgaactgcgagcactacgcagtttgctgatgagcaatagaattctgggcgacaattctaggcagcaggcttgccaaatccttgatgaggagattgcgaagcaatggcactgaccagcgtaaatacaggatgttgtactaaccaattgtttggcatgattttgttttgacgggataaatcagttttaaggcttgcttcttccgttgcccttgtgcccattcttttcattcttgtgaccatacccaattctttattgcaagtggtgtcaacaagcatgaggctacagctgcatcacctgcaaggaagtcaaaatatatgattattataagggggcttcggcataaaggtcttctctcatggcaaagacatacagtgtgaagatgtaacccgaaggtgataagaatggtcgccgaagctatagccaaagagcttcgacttaatatggtgacgaagaccaaatatgatgctgaccgaaaggggaaaagactatttagtccttaatgattcatgttatgattataaatagatgccagggacataaatgtacttttacctggaatgtgtcccgtgcctataaatagataaacagtagcaccgtactgttcacgctgaattatagtcactctctcgcgtcttcagcttcgagcaagccgaaggtatcaatgtaatatgaattatgttgatattcatacatgttttatgggatgcaaatatgaatgaattaacaagatacaattactatcttc

SEQ ID NO: 62204 - DNA, 5569 bp, Zea Mays
ccgactcccaactcccgaccggctcgcgagctatctcggggacacaaccgactgcctcgcgcctcttcctcatccgtcgtcaccggttgcttcccaccgccgccttgcgcctccatgctctcagcaatgatgggaatagaaggcattgcagccacagtcaccgaggaccctgaaccctcaattcctccaggatttggaccttttgctgcctcggcatcatggggaatccaaaacgatgttaaacctgctgatgatcattctagttctgttttagcattacagagcatcgacgacgatgtggaaattttggaatatctatccagttcagtggatcaccagagtgacacaggttgctgtatttctgggagcaatacctgtaggaaatcactgcgtaatagacctccaatagattatagccgctttgatcagattgcagatgaagattctgatgctgaagtagcagacaagggtgtaaatgcagtgaaacacagacaacaattccctaaaggagtacttcgaggatgtccagaatgtgccaattgtcaaaaggttattgcaagatggaatccatctggtgcacgtaggcctgttcttgatgaggctcctgtttactatcctaccgaggaggaatttcaggacacattaaaatacattgagattatccgcccaacagcagaaccatatggaatatgccgtattgttccaccagcttcatggaagcctccatgccttcttaaagagaaaaacatttgggagtgctcaaaattttctactcgggtacagaaggttgacaagctccaaaatcgtaaatcgcccaagaagagcagaagaggtggaatgatgaagaagcgtagaaagatttcggagactgaagaaaacaatcaccatcaaattggaatgcagcaaaaccaagagagatttggatttgaaccaggaccagagttcacactacagatgtttcagaagtatgcagatgacttcagtgatcagtattttatgaaagataaatgcagagattcaccaccatcagtggaagatattgaaggcgagtattggcgcatagttgaaagaccgacagaggagatagaggtaatatatggtgccgatttggagactggaacttttggcagtgggtttccaaagttatgtcctgaaatgaaatctgatgtggaggataaatatgcacaatctgggtggaatctaaataacctgcctagactacaaggttcggttctttcttttgaaggcggtgacatttctggtgttttagtgccttggctttatgtcggcatgtgtttttcatctttctgctggcatgttgaagatcatcatttgtactcactgaactacatgcattggggtgctccaaagatgtggtatggagttccagggaaggatgctgtgaatttggaggctgcaatgaggaaacatcttcctgagttatttgaggagcaacctgatttgcttcacaacttagttactcagttctcaccatcattgcttaaatctgaaggagtaccagtctaccgatgtgttcagcatgagggagagtttgtcctgacgttcccacgggcataccatgctggttttaattgtggcttcaattgtgcagaagctgttaatgtggcacccattgattggttgccggttggacaaaatgctgttgatctttatcgtgaacaagctcggaaaataactatctcccatgataagctgttgcttggggctgcaagagaagcaataagagctcagtgggacatcctatttctcaagaggaattcttctgttaacttgaggtggaaaagcatatgtggacctgatagcacaatatgcaagtcactgaaggcacgaattgaaatggagttggtacaaagacaaaatatatcctctccatgtcaatctaggaaaatggatagtgagtttgattctactgatagggaatgtgcattgtgttactatgatctgcatctttcagcttcaggctgtccatgctccccagagaaatatgcttgcctggtacatgcaaagcagctttgttcatgcgattgggacaaaaggtttttcctatttcgttatgatgttaatgagttgaatatcttagctgatgctttagggggaaagctaagtgccattcacagatggggtgtctctgatcttggattaagtttgagctcctgtgtcaaacgggaaaaggtccaagattccaagactgttcgcagattaactgatggcccaagacggtcctacatgtcacaggcatcaacagtatcattgattccttcttctgttagcactgaacagaaaaagaatgaagataagacactggatttaggttgcccaggtatgaatttaccaaaaataagtccggaggcaaataatctgcgtccttcgacagaacagataaaatcagaaaatctctcacagctaaaggaaccatgtgtgaagaatgaattatcttgtccgaccagcaatggtaccagccaagaacataaaggagggattggaggccacaaacttgcagcagcaagcatgatggttctttctggtcaatcatttcctgcaaatgctggtgaatcagtgagaaatgcgcatgtcttggcagtatttaaagagggtagagactgtacatcttcacttacacttagggagtatcataacaggccagtgtcaatgattgataatggagctaacatgaagctggatctggaaaacatagacaattctcatatgttgatgtcatcaccagacttcaatgcaactgtatgtcattcttacaaggatcaaacattcttaacactggaaactaatacctctgtgatgactgagaaagatagcagtcaggcccgtaatgcaagccagcagtttgtcagtactgctttaagaacacaaaatgtgtctcaggaaccattgtgtaccgcgattgctccaaagcaactcatagatcctcaagttcagaaaaaatcatatggtgtttttggttctggcagtgcccatcttgggcatctgactgttggtaatcagcaactaaatgagagatggcatcaaagacaatctgattctttatccagtgtggaagttagagctaggggtcattcagctatgatagtgcagcctgctctggaaaatcacagcagaaatggagttgcacagaagggtcctcgcatagctaatgttgtacatagattcaagtgctctgttgaacctatagaaattggtgctgtgttatctgggaagttgtggtcctcaagtcaagcaatcttcccaaaagggtttaagagcagagtaaaatacttcagtgttgtagatccagtacaaatgacatactacatatctgaaatattggacgctggacagcagggaccactttttatggtgactgtagaaaactgtcctggtgaaattttcataaacatctctcctaccaagtgctggaacatggttcgtgaaaggctcaatatggaaataaggaggcagctcaatatgggaagagctaaccttcctacactacagcctccaggatcagttgatggccatgaaatgtttgggttgttaacaccagcaatagttcaggcaattgaggcccgggacagagattatatctgtacagagtactggcgatcaaggccccatgcaacaattgagaatcgagacaatcagaatatgtcacctcaggatccaccccttgttgcactgagggggctcttccagcgggctaattgtgatgaactgcgagcactacgcagtttgctgatgagcaatagaattctgggcgacaattctaggcagcaggcttgccaaatccttgatgaggagattgcgaagcaatggcactgaccagcgtaaatacaggatgttgtactaaccaattgtttggcatgattttgttttgacgggataaatcagttttaaggcttgcttcttccgttgcccttgtgcccattcttttcattcttgtgaccatacccaattctttattgcaagtggtgtcaacaagcatgaggctacagctgcatcacctgcaaggaagtcaaaaggacttattttaagtaaagctttaaaggcgcagaaagacgtcaaagatgcaagtgctcagatggccataggcaacctgtagtctgaagttattgggcttcaccgtgatcttgaagaaaaagaaataaagctaaatacttttgccaaagatctgattgaagaccacactaagttctagaaatcctctaaagagaaagacaacaaaatttcgaagctagaagttgacaactcgtagagcatgaaacacattgcagagcttgaggcctagataaaagagcaagttgtagcacacaaaggcaaaatggccaaattgaaagagaaggtcaaagatactagtgtaatttttgaggttgaaaaggtgaagcataaaatttctgataatgagagaaccacattatagaaaattgttgatgaactttgggagtctagcgaagaatgcttctactccactgcccagtgttgtaaaaaatttaaaaaataccttcgtctccataggagcattttcaagtgaaaaagaatttgtgcgcggcgacgcctctagtgcggtgaagtggataggagaagtggaggccttcgatgaagtattatccacccgtggtgattattgtgcgtgtataggggcacacgttgcaactttgctgcttgacaaggctagatgcgagcatgtaaaagttgccagctagccagagtttaaatattatgttgatgacaataagattcctttagctgaagcaaccgagcttgggagaaagttttataccgatgtctggcttggtggagggaagaagttagtagatgaagttgctagagaaaatgtaagaaatgtttctttttatcgtttatttttctgtttcgggacttagaattttagtgtttacacaaagactcacaagcttacaaaaaaggcggaagcaataaaggaacctttaagattaaaggaactcgaagatgccctttcgccagaacccaaagagtacaatccagatgaagattcactactgcaggattggctagcacatctggacatgttgtataaaacagtagacaaagttgttgatgatgttttcaataatgttcccgaaagagttaccttttcgaaatagtatatgattattataagggggcttcggcataaaggtcttctctcatggcaaagacatacagtgtgaagatgtaacccgaaggtgataagaatggtcgccgaagctatagccaaagagcttcgacttaatatggtgacgaagaccaaatatgatgctgaccgaaaggggaaaagactatttagtccttaatgattcatgttatgattataaatagatgccagggacataaatgtacttttacctggaatgtgtcccgtgcctataaatagataaacagtagcaccgtactgttcacgctgaattatagtcactctctcgcgtcttcagcttcgagcaagccgaaggtatcaatgtaatatgaattatgttgatattcatacatgttttatgggatgcaaatatgaatgaattaacaagatacaattactatcttc

SEQ ID NO: 62205 - DNA, 4177 bp, Zea Mays
gactcggtggcggcgtcagaggctccccctcctgcctcgcgccctcgcctccggtcctccgcacaccggccggcgaccctgctgtctcccggccccggcgggcagtgggagccagcagctgctgctccaacaagcaatgatgggaatagaaggcattgcagccacagtcaccgaggaccctgaaccctcaattcctccaggatttggaccttttgctgcctcggcatcatggggaatccaaaacgatgttaaacctgctgatgatcattctagttctgttttagcattacagagcatcgacgacgatgtggaaattttggaatatctatccagttcagtggatcaccagagtgacacaggttgctgtatttctgggagcaatacctgtaggaaatcactgcgtaatagacctccaatagattatagccgctttgatcagattgcagatgaagattctgatgctgaagtagcagacaagggtgtaaatgcagtgaaacacagacaacaattccctaaaggagtacttcgaggatgtccagaatgtgccaattgtcaaaaggttattgcaagatggaatccatctggtgcacgtaggcctgttcttgatgaggctcctgtttactatcctaccgaggaggaatttcaggacacattaaaatacattgagattatccgcccaacagcagaaccatatggaatatgccgtattgttccaccagcttcatggaagcctccatgccttcttaaagagaaaaacatttgggagtgctcaaaattttctactcgggtacagaaggttgacaagctccaaaatcgtaaatcgcccaagaagagcagaagaggtggaatgatgaagaagcgtagaaagatttcggagactgaagaaaacaatcaccatcaaattggaatgcagcaaaaccaagagagatttggatttgaaccaggaccagagttcacactacagatgtttcagaagtatgcagatgacttcagtgatcagtattttatgaaagataaatgcagagattcaccaccatcagtggaagatattgaaggcgagtattggcgcatagttgaaagaccgacagaggagatagaggtaatatatggtgccgatttggagactggaacttttggcagtgggtttccaaagttatgtcctgaaatgaaatctgatgtggaggataaatatgcacaatctgggtggaatctaaataacctgcctagactacaaggttcggttctttcttttgaaggcggtgacatttctggtgttttagtgccttggctttatgtcggcatgtgtttttcatctttctgctggcatgttgaagatcatcatttgtactcactgaactacatgcattggggtgctccaaagatgtggtatggagttccagggaaggatgctgtgaatttggaggctgcaatgaggaaacatcttcctgagttatttgaggagcaacctgatttgcttcacaacttagttactcagttctcaccatcattgcttaaatctgaaggagtaccagtctaccgatgtgttcagcatgagggagagtttgtcctgacgttcccacgggcataccatgctggttttaattgtggcttcaattgtgcagaagctgttaatgtggcacccattgattggttgccggttggacaaaatgctgttgatctttatcgtgaacaagctcggaaaataactatctcccatgataagctgttgcttggggctgcaagagaagcaataagagctcagtgggacatcctatttctcaagaggaattcttctgttaacttgaggtggaaaagcatatgtggacctgatagcacaatatgcaagtcactgaaggcacgaattgaaatggagttggtacaaagacaaaatatatcctctccatgtcaatctaggaaaatggatagtgagtttgattctactgatagggaatgtgcattgtgttactatgatctgcatctttcagcttcaggctgtccatgctccccagagaaatatgcttgcctggtacatgcaaagcagctttgttcatgcgattgggacaaaaggtttttcctatttcgttatgatgttaatgagttgaatatcttagctgatgctttagggggaaagctaagtgccattcacagatggggtgtctctgatcttggattaagtttgagctcctgtgtcaaacgggaaaaggtccaagattccaagactgttcgcagattaactgatggcccaagacggtcctacatgtcacaggcatcaacagtatcattgattccttcttctgttagcactgaacagaaaaagaatgaagataagacactggatttaggttgcccaggtatgaatttaccaaaaataagtccggaggcaaataatctgcgtccttcgacagaacagataaaatcagaaaatctctcacagctaaaggaaccatgtgtgaagaatgaattatcttgtccgaccagcaatggtaccagccaagaacataaaggagggattggaggccacaaacttgcagcagcaagcatgatggttctttctggtcaatcatttcctgcaaatgctggtgaatcagtgagaaatgcgcatgtcttggcagtatttaaagagggtagagactgtacatcttcacttacacttagggagtatcataacaggccagtgtcaatgattgataatggagctaacatgaagctggatctggaaaacatagacaattctcatatgttgatgtcatcaccagacttcaatgcaactgtatgtcattcttacaaggatcaaacattcttaacactggaaactaatacctctgtgatgactgagaaagatagcagtcaggcccgtaatgcaagccagcagtttgtcagtactgctttaagaacacaaaatgtgtctcaggaaccattgtgtaccgcgattgctccaaagcaactcatagatcctcaagttcagaaaaaatcatatggtgtttttggttctggcagtgcccatcttgggcatctgactgttggtaatcagcaactaaatgagagatggcatcaaagacaatctgattctttatccagtgtggaagttagagctaggggtcattcagctatgatagtgcagcctgctctggaaaatcacagcagaaatggagttgcacagaagggtcctcgcatagctaatgttgtacatagattcaagtgctctgttgaacctatagaaattggtgctgtgttatctgggaagttgtggtcctcaagtcaagcaatcttcccaaaagggtttaagagcagagtaaaatacttcagtgttgtagatccagtacaaatgacatactacatatctgaaatattggacgctggacagcagggaccactttttatggtgactgtagaaaactgtcctggtgaaattttcataaacatctctcctaccaagtgctggaacatggttcgtgaaaggctcaatatggaaataaggaggcagctcaatatgggaagagctaaccttcctacactacagcctccaggatcagttgatggccatgaaatgtttgggttgttaacaccagcaatagttcaggcaattgaggcccgggacagagattatatctgtacagagtactggcgatcaaggccccatgcaacaattgagaatcgagacaatcagaatatgtcacctcaggatccaccccttgttgcactgagggggctcttccagcgggctaattgtgatgaactgcgagcactacgcagtttgctgatgagcaatagaattctgggcgacaattctaggcagcaggcttgccaaatccttgatgaggagattgcgaagcaatggcactgaccagcgtaaatacaggatgttgtactaaccaattgtttggcatgattttgttttgacgggataaatcagttttaaggcttgcttcttccgttgcccttgtgcccattcttttcattcttgtgaccatacccaattctttattgcaagtggtgtcaacaagcatgaggctacagctgcatcacctgcaaggaagtcaaaaaacccaaagagtacaatccagatgaagattcactactgcaggattggctagcacatctggacatgttgtataaaacagtagacaaagttgttgatgatgttttcaataatgttcccgaaagagttaccttttcg

SEQ ID NO: 62206 - DNA, 4989 bp, Zea Mays
ccgactcccaactcccgaccggctcgcgagctatctcggggacacaaccgactgcctcgcgcctcttcctcatccgtcgtcaccggttgcttcccaccgccgccttgcgcctccatgctctcagcaatgatgggaatagaaggcattgcagccacagtcaccgaggaccctgaaccctcaattcctccaggatttggaccttttgctgcctcggcatcatggggaatccaaaacgatgttaaacctgctgatgatcattctagttctgttttagcattacagagcatcgacgacgatgtggaaattttggaatatctatccagttcagtggatcaccagagtgacacaggttgctgtatttctgggagcaatacctgtaggaaatcactgcgtaatagacctccaatagattatagccgctttgatcagattgcagatgaagattctgatgctgaagtagcagacaagggtgtaaatgcagtgaaacacagacaacaattccctaaaggagtacttcgaggatgtccagaatgtgccaattgtcaaaaggttattgcaagatggaatccatctggtgcacgtaggcctgttcttgatgaggctcctgtttactatcctaccgaggaggaatttcaggacacattaaaatacattgagattatccgcccaacagcagaaccatatggaatatgccgtattgttccaccagcttcatggaagcctccatgccttcttaaagagaaaaacatttgggagtgctcaaaattttctactcgggtacagaaggttgacaagctccaaaatcgtaaatcgcccaagaagagcagaagaggtggaatgatgaagaagcgtagaaagatttcggagactgaagaaaacaatcaccatcaaattggaatgcagcaaaaccaagagagatttggatttgaaccaggaccagagttcacactacagatgtttcagaagtatgcagatgacttcagtgatcagtattttatgaaagataaatgcagagattcaccaccatcagtggaagatattgaaggcgagtattggcgcatagttgaaagaccgacagaggagatagaggtaatatatggtgccgatttggagactggaacttttggcagtgggtttccaaagttatgtcctgaaatgaaatctgatgtggaggataaatatgcacaatctgggtggaatctaaataacctgcctagactacaaggttcggttctttcttttgaaggcggtgacatttctggtgttttagtgccttggctttatgtcggcatgtgtttttcatctttctgctggcatgttgaagatcatcatttgtactcactgaactacatgcattggggtgctccaaagatgtggtatggagttccagggaaggatgctgtgaatttggaggctgcaatgaggaaacatcttcctgagttatttgaggagcaacctgatttgcttcacaacttagttactcagttctcaccatcattgcttaaatctgaaggagtaccagtctaccgatgtgttcagcatgagggagagtttgtcctgacgttcccacgggcataccatgctggttttaattgtggcttcaattgtgcagaagctgttaatgtggcacccattgattggttgccggttggacaaaatgctgttgatctttatcgtgaacaagctcggaaaataactatctcccatgataagctgttgcttggggctgcaagagaagcaataagagctcagtgggacatcctatttctcaagaggaattcttctgttaacttgaggtggaaaagcatatgtggacctgatagcacaatatgcaagtcactgaaggcacgaattgaaatggagttggtacaaagacaaaatatatcctctccatgtcaatctaggaaaatggatagtgagtttgattctactgatagggaatgtgcattgtgttactatgatctgcatctttcagcttcaggctgtccatgctccccagagaaatatgcttgcctggtacatgcaaagcagctttgttcatgcgattgggacaaaagggggaaagctaagtgccattcacagatggggtgtctctgatcttggattaagtttgagctcctgtgtcaaacgggaaaaggtccaagattccaagactgttcgcagattaactgatggcccaagacggtcctacatgtcacaggcatcaacagtatcattgattccttcttctgttagcactgaacagaaaaagaatgaagataagacactggatttaggttgcccaggtatgaatttaccaaaaataagtccggaggcaaataatctgcgtccttcgacagaacagataaaatcagaaaatctctcacagctaaaggaaccatgtgtgaagaatgaattatcttgtccgaccagcaatggtaccagccaagaacataaaggagggattggaggccacaaacttgcagcagcaagcatgatggttctttctggtcaatcatttcctgcaaatgctggtgaatcagtgagaaatgcgcatgtcttggcagtatttaaagagggtagagactgtacatcttcacttacacttagggagtatcataacaggccagtgtcaatgattgataatggagctaacatgaagctggatctggaaaacatagacaattctcatatgttgatgtcatcaccagacttcaatgcaactgtatgtcattcttacaaggatcaaacattcttaacactggaaactaatacctctgtgatgactgagaaagatagcagtcaggcccgtaatgcaagccagcagtttgtcagtactgctttaagaacacaaaatgtgtctcaggaaccattgtgtaccgcgattgctccaaagcaactcatagatcctcaagttcagaaaaaatcatatggtgtttttggttctggcagtgcccatcttgggcatctgactgttggtaatcagcaactaaatgagagatggcatcaaagacaatctgattctttatccagtgtggaagttagagctaggggtcattcagctatgatagtgcagcctgctctggaaaatcacagcagaaatggagttgcacagaagggtcctcgcatagctaatgttgtacatagattcaagtgctctgttgaacctatagaaattggtgctgtgttatctgggaagttgtggtcctcaagtcaagcaatcttcccaaaagggtttaagagcagagtaaaatacttcagtgttgtagatccagtacaaatgacatactacatatctgaaatattggacgctggacagcagggaccactttttatggtgactgtagaaaactgtcctggtgaaattttcataaacatctctcctaccaagtgctggaacatggttcgtgaaaggctcaatatggaaataaggaggcagctcaatatgggaagagctaaccttcctacactacagcctccaggatcagttgatggccatgaaatgtttgggttgttaacaccagcaatagttcaggcaattgaggcccgggacagagattatatctgtacagagtactggcgatcaaggccccatgcaacaattgagaatcgagacaatcagaatatgtcacctcaggatccaccccttgttgcactgagggggctcttccagcgggctaattgtgatgaactgcgagcactacgcagtttgctgatgagcaatagaattctgggcgacaattctaggcagcaggcttgccaaatccttgatgaggagattgcgaagcaatggcactgaccagcgtaaatacaggatgttgtactaaccaattgtttggcatgattttgttttgacgggataaatcagttttaaggcttgcttcttccgttgcccttgtgcccattcttttcattcttgtgaccatacccaattctttattgcaagtggtgtcaacaagcatgaggctacagctgcatcacctgcaaggaagtcaaaaggacttattttaagtaaagctttaaaggcgcagaaagacgtcaaagatgcaagtgctcagatggccataggcaacctgtagtctgaagttattgggcttcaccgtgatcttgaagaaaaagaaataaagctaaatacttttgccaaagatctgattgaagaccacactaagttctagaaatcctctaaagagaaagacaacaaaatttcgaagctagaagttgacaactcgtagagcatgaaacacattgcagagcttgaggcctagataaaagagcaagttgtagcacacaaaggcaaaatggccaaattgaaagagaaggtcaaagatactagtgtaatttttgaggttgaaaaggtgaagcataaaatttctgataatgagagaaccacattatagaaaattgttgatgaactttgggagtctagcgaagaatgcttctactccactgcccagtgttgtaaaaaatttaaaaaataccttcgtctccataggagcattttcaagtgaaaaagaatttgtgcgcggcgacgcctctagtgcggtgaagtggataggagaagtggaggccttcgatgaagtattatccacccgtggtgattattgtgcgtgtataggggcacacgttgcaactttgctgcttgacaaggctagatgcgagcatgtaaaagttgccagctagccagagtttaaatattatgttgatgacaataagattcctttagctgaagcaaccgagcttgggagaaagttttataccgatgtctggcttggtggagggaagaagttagtagatgaagttgctagagaaaatactcacaagcttacaaaaaaggcggaagcaataaaggaacctttaagattaaaggaactcgaagaacccaaagagtacaatccagatgaagattcactactgcaggattggctagcacatctggacatgttgtataaaacagtagacaaagttgttgatgatgttttcaataatgttcccgaaagagttaccttttcg

SEQ ID NO: 62207 - DNA, 4896 bp, Zea Mays
gactcggtggcggcgtcagaggctccccctcctgcctcgcgccctcgcctccggtcctccgcacaccggccggcgaccctgctgtctcccggccccggcgggcagtgggagccagcagctgctgctccaacaagcaatgatgggaatagaaggcattgcagccacagtcaccgaggaccctgaaccctcaattcctccaggatttggaccttttgctgcctcggcatcatggggaatccaaaacgatgttaaacctgctgatgatcattctagttctgttttagcattacagagcatcgacgacgatgtggaaattttggaatatctatccagttcagtggatcaccagagtgacacaggttgctgtatttctgggagcaatacctgtaggaaatcactgcgtaatagacctccaatagattatagccgctttgatcagattgcagatgaagattctgatgctgaagtagcagacaagggtgtaaatgcagtgaaacacagacaacaattccctaaaggagtacttcgaggatgtccagaatgtgccaattgtcaaaaggttattgcaagatggaatccatctggtgcacgtaggcctgttcttgatgaggctcctgtttactatcctaccgaggaggaatttcaggacacattaaaatacattgagattatccgcccaacagcagaaccatatggaatatgccgtattgttccaccagcttcatggaagcctccatgccttcttaaagagaaaaacatttgggagtgctcaaaattttctactcgggtacagaaggttgacaagctccaaaatcgtaaatcgcccaagaagagcagaagaggtggaatgatgaagaagcgtagaaagatttcggagactgaagaaaacaatcaccatcaaattggaatgcagcaaaaccaagagagatttggatttgaaccaggaccagagttcacactacagatgtttcagaagtatgcagatgacttcagtgatcagtattttatgaaagataaatgcagagattcaccaccatcagtggaagatattgaaggcgagtattggcgcatagttgaaagaccgacagaggagatagaggtaatatatggtgccgatttggagactggaacttttggcagtgggtttccaaagttatgtcctgaaatgaaatctgatgtggaggataaatatgcacaatctgggtggaatctaaataacctgcctagactacaaggttcggttctttcttttgaaggcggtgacatttctggtgttttagtgccttggctttatgtcggcatgtgtttttcatctttctgctggcatgttgaagatcatcatttgtactcactgaactacatgcattggggtgctccaaagatgtggtatggagttccagggaaggatgctgtgaatttggaggctgcaatgaggaaacatcttcctgagttatttgaggagcaacctgatttgcttcacaacttagttactcagttctcaccatcattgcttaaatctgaaggagtaccagtctaccgatgtgttcagcatgagggagagtttgtcctgacgttcccacgggcataccatgctggttttaattgtggcttcaattgtgcagaagctgttaatgtggcacccattgattggttgccggttggacaaaatgctgttgatctttatcgtgaacaagctcggaaaataactatctcccatgataagctgttgcttggggctgcaagagaagcaataagagctcagtgggacatcctatttctcaagaggaattcttctgttaacttgaggtggaaaagcatatgtggacctgatagcacaatatgcaagtcactgaagcttcaggctgtccatgctccccagagaaatatgcttgcctggtacatgcaaagcagctttgttcatgcgattgggacaaaagggggaaagctaagtgccattcacagatggggtgtctctgatcttggattaagtttgagctcctgtgtcaaacgggaaaaggtccaagattccaagactgttcgcagattaactgatggcccaagacggtcctacatgtcacaggcatcaacagtatcattgattccttcttctgttagcactgaacagaaaaagaatgaagataagacactggatttaggttgcccaggtatgaatttaccaaaaataagtccggaggcaaataatctgcgtccttcgacagaacagataaaatcagaaaatctctcacagctaaaggaaccatgtgtgaagaatgaattatcttgtccgaccagcaatggtaccagccaagaacataaaggagggattggaggccacaaacttgcagcagcaagcatgatggttctttctggtcaatcatttcctgcaaatgctggtgaatcagtgagaaatgcgcatgtcttggcagtatttaaagagggtagagactgtacatcttcacttacacttagggagtatcataacaggccagtgtcaatgattgataatggagctaacatgaagctggatctggaaaacatagacaattctcatatgttgatgtcatcaccagacttcaatgcaactgtatgtcattcttacaaggatcaaacattcttaacactggaaactaatacctctgtgatgactgagaaagatagcagtcaggcccgtaatgcaagccagcagtttgtcagtactgctttaagaacacaaaatgtgtctcaggaaccattgtgtaccgcgattgctccaaagcaactcatagatcctcaagttcagaaaaaatcatatggtgtttttggttctggcagtgcccatcttgggcatctgactgttggtaatcagcaactaaatgagagatggcatcaaagacaatctgattctttatccagtgtggaagttagagctaggggtcattcagctatgatagtgcagcctgctctggaaaatcacagcagaaatggagttgcacagaagggtcctcgcatagctaatgttgtacatagattcaagtgctctgttgaacctatagaaattggtgctgtgttatctgggaagttgtggtcctcaagtcaagcaatcttcccaaaagggtttaagagcagagtaaaatacttcagtgttgtagatccagtacaaatgacatactacatatctgaaatattggacgctggacagcagggaccactttttatggtgactgtagaaaactgtcctggtgaaattttcataaacatctctcctaccaagtgctggaacatggttcgtgaaaggctcaatatggaaataaggaggcagctcaatatgggaagagctaaccttcctacactacagcctccaggatcagttgatggccatgaaatgtttgggttgttaacaccagcaatagttcaggcaattgaggcccgggacagagattatatctgtacagagtactggcgatcaaggccccatgcaacaattgagaatcgagacaatcagaatatgtcacctcaggatccaccccttgttgcactgagggggctcttccagcgggctaattgtgatgaactgcgagcactacgcagtttgctgatgagcaatagaattctgggcgacaattctaggcagcaggcttgccaaatccttgatgaggagattgcgaagcaatggcactgaccagcgtaaatacaggatgttgtactaaccaattgtttggcatgattttgttttgacgggataaatcagttttaaggcttgcttcttccgttgcccttgtgcccattcttttcattcttgtgaccatacccaattctgtaagaattgctaccttattgagtgatataagaggtgcctcatctactactacggggttgcaaattatgatccttgtttttttcttgatcagttattgcaagtggtgtcaacaagcatgaggctacagctgcatcacctgcaaggaagtcaaaaggacttattttaagtaaagctttaaaggcgcagaaagacgtcaaagatgcaagtgctcagatggccataggcaacctgtagtctgaagttattgggcttcaccgtgatcttgaagaaaaagaaataaagctaaatacttttgccaaagatctgattgaagaccacactaagttctagaaatcctctaaagagaaagacaacaaaatttcgaagctagaagttgacaactcgtagagcatgaaacacattgcagagcttgaggcctagataaaagagcaagttgtagcacacaaaggcaaaatggccaaattgaaagagaaggtcaaagatactagtgtaatttttgaggttgaaaaggtgaagcataaaatttctgataatgagagaaccacattatagaaaattgttgatgaactttgggagtctagcgaagaatgcttctactccactgcccagtgttgtaaaaaatttaaaaaataccttcgtctccataggagcattttcaagtgaaaaagaatttgtgcgcggcgacgcctctagtgcggtgaagtggataggagaagtggaggccttcgatgaagtattatccacccgtggtgattattgtgcgtgtataggggcacacgttgcaactttgctgcttgacaaggctagatgcgagcatgtaaaagttgccagctagccagagtttaaatattatgttgatgacaataagattcctttagctgaagcaaccgagcttgggagaaagttttataccgatgtctggcttggtggagggaagaagttagtagatgaagttgctagagaaaatgtaagaaatgtttctttttatcgtttatttttctgtttcgggacttagaattttagtgtttacacaaagactcacaagcttacaaaaaaggcggaagcaataaaggaacctttaagattaaaggaactcgaag

SEQ ID NO: 62208 - DNA, 4486 bp, Zea Mays
ccgactcccaactcccgaccggctcgcgagctatctcggggacacaaccgactgcctcgcgcctcttcctcatccgtcgtcaccggttgcttcccaccgccgccttgcgcctccatgctctcagcaatgatgggaatagaaggcattgcagccacagtcaccgaggaccctgaaccctcaattcctccaggatttggaccttttgctgcctcggcatcatggggaatccaaaacgatgttaaacctgctgatgatcattctagttctgttttagcattacagagcatcgacgacgatgtggaaattttggaatatctatccagttcagtggatcaccagagtgacacaggttgctgtatttctgggagcaatacctgtaggaaatcactgcgtaatagacctccaatagattatagccgctttgatcagattgcagatgaagattctgatgctgaagtagcagacaagggtgtaaatgcagtgaaacacagacaacaattccctaaaggagtacttcgaggatgtccagaatgtgccaattgtcaaaaggttattgcaagatggaatccatctggtgcacgtaggcctgttcttgatgaggctcctgtttactatcctaccgaggaggaatttcaggacacattaaaatacattgagattatccgcccaacagcagaaccatatggaatatgccgtattgttccaccagcttcatggaagcctccatgccttcttaaagagaaaaacatttgggagtgctcaaaattttctactcgggtacagaaggttgacaagctccaaaatcgtaaatcgcccaagaagagcagaagaggtggaatgatgaagaagcgtagaaagatttcggagactgaagaaaacaatcaccatcaaattggaatgcagcaaaaccaagagagatttggatttgaaccaggaccagagttcacactacagatgtttcagaagtatgcagatgacttcagtgatcagtattttatgaaagataaatgcagagattcaccaccatcagtggaagatattgaaggcgagtattggcgcatagttgaaagaccgacagaggagatagaggtaatatatggtgccgatttggagactggaacttttggcagtgggtttccaaagttatgtcctgaaatgaaatctgatgtggaggataaatatgcacaatctgggtggaatctaaataacctgcctagactacaaggttcggttctttcttttgaaggcggtgacatttctggtgttttagtgccttggctttatgtcggcatgtgtttttcatctttctgctggcatgttgaagatcatcatttgtactcactgaactacatgcattggggtgctccaaagatgtggtatggagttccagggaaggatgctgtgaatttggaggctgcaatgaggaaacatcttcctgagttatttgaggagcaacctgatttgcttcacaacttagttactcagttctcaccatcattgcttaaatctgaaggagtaccagtctaccgatgtgttcagcatgagggagagtttgtcctgacgttcccacgggcataccatgctggttttaattgtggcttcaattgtgcagaagctgttaatgtggcacccattgattggttgccggttggacaaaatgctgttgatctttatcgtgaacaagctcggaaaataactatctcccatgataagctgttgcttggggctgcaagagaagcaataagagctcagtgggacatcctatttctcaagaggaattcttctgttaacttgaggtggaaaagcatatgtggacctgatagcacaatatgcaagtcactgaaggcacgaattgaaatggagttggtacaaagacaaaatatatcctctccatgtcaatctaggaaaatggatagtgagtttgattctactgatagggaatgtgcattgtgttactatgatctgcatctttcagcttcaggctgtccatgctccccagagaaatatgcttgcctggtacatgcaaagcagctttgttcatgcgattgggacaaaaggtttttcctatttcgttatgatgttaatgagttgaatatcttagctgatgctttagggggaaagctaagtgccattcacagatggggtgtctctgatcttggattaagtttgagctcctgtgtcaaacgggaaaaggtccaagattccaagactgttcgcagattaactgatggcccaagacggtcctacatgtcacaggcatcaacagtatcattgattccttcttctgttagcactgaacagaaaaagaatgaagataagacactggatttaggttgcccaggtatgaatttaccaaaaataagtccggaggcaaataatctgcgtccttcgacagaacagataaaatcagaaaatctctcacagctaaaggaaccatgtgtgaagaatgaattatcttgtccgaccagcaatggtaccagccaagaacataaaggagggattggaggccacaaacttgcagcagcaagcatgatggttctttctggtcaatcatttcctgcaaatgctggtgaatcagtgagaaatgcgcatgtcttggcagtatttaaagagggtagagactgtacatcttcacttacacttagggagtatcataacaggccagtgtcaatgattgataatggagctaacatgaagctggatctggaaaacatagacaattctcatatgttgatgtcatcaccagacttcaatgcaactgtatgtcattcttacaaggatcaaacattcttaacactggaaactaatacctctgtgatgactgagaaagatagcagtcaggcccgtaatgcaagccagcagtttgtcagtactgctttaagaacacaaaatgtgtctcaggaaccattgtgtaccgcgattgctccaaagcaactcatagatcctcaagttcagaaaaaatcatatggtgtttttggttctggcagtgcccatcttgggcatctgactgttggtaatcagcaactaaatgagagatggcatcaaagacaatctgattctttatccagtgtggaagttagagctaggggtcattcagctatgatagtgcagcctgctctggaaaatcacagcagaaatggagttgcacagaagggtcctcgcatagctaatgttgtacatagattcaagtgctctgttgaacctatagaaattggtgctgtgttatctgggaagttgtggtcctcaagtcaagcaatcttcccaaaagggtttaagagcagagtaaaatacttcagtgttgtagatccagtacaaatgacatactacatatctgaaatattggacgctggacagcagggaccactttttatggtgactgtagaaaactgtcctggtgaaattttcataaacatctctcctaccaagtgctggaacatggttcgtgaaaggctcaatatggaaataaggaggcagctcaatatgggaagagctaaccttcctacactacagcctccaggatcagttgatggccatgaaatgtttgggttgttaacaccagcaatagttcaggcaattgaggcccgggacagagattatatctgtacagagtactggcgatcaaggccccatgcaacaattgagaatcgagacaatcagaatatgtcacctcaggatccaccccttgttgcactgagggggctcttccagcgggctaattgtgatgaactgcgagcactacgcagtttgctgatgagcaatagaattctgggcgacaattctaggcagcaggcttgccaaatccttgatgaggagattgcgaagcaatggcactgaccagcgtaaatacaggatgttgtactaaccaattgtttggcatgattttgttttgacgggataaatcagttttaaggcttgcttcttccgttgcccttgtgcccattcttttcattcttgtgaccatacccaattctttattgcaagtggtgtcaacaagcatgaggctacagctgcatcacctgcaaggaagtcaaaagagcattttcaagtgaaaaagaatttgtgcgcggcgacgcctctagtgcggtgaagtggataggagaagtggaggccttcgatgaagtattatccacccgtggtgattattgtgcgtgtataggggcacacgttgcaactttgctgcttgacaaggctagatgcgagcatgtaaaagttgccagctagccagagtttaaatattatgttgatgacaataagattcctttagctgaagcaaccgagcttgggagaaagttttataccgatgtctggcttggtggagggaagaagttagtagatgaagttgctagagaaaatgtaagaaatgtttctttttatcgtttatttttctgtttcgggacttagaattttagtgtttacacaaagactcacaagcttacaaaaaaggcggaagcaataaaggaacctttaagattaaaggaactcgaag

SEQ ID NO: 62209 - DNA, 6565 bp, Zea Mays
gactcggtggcggcgtcagaggctccccctcctgcctcgcgccctcgcctccggtcctccgcacaccggccggcgaccctgctgtctcccggccccggcgggcagtgggagccagcagctgctgctccaacaagcaatgatgggaatagaaggcattgcagccacagtcaccgaggaccctgaaccctcaattcctccaggatttggaccttttgctgcctcggcatcatggggaatccaaaacgatgttaaacctgctgatgatcattctagttctgttttagcattacagagcatcgacgacgatgtggaaattttggaatatctatccagttcagtggatcaccagagtgacacaggttgctgtatttctgggagcaatacctgtaggaaatcactgcgtaatagacctccaatagattatagccgctttgatcagattgcagatgaagattctgatgctgaagtagcagacaagggtgtaaatgcagtgaaacacagacaacaattccctaaaggagtacttcgaggatgtccagaatgtgccaattgtcaaaaggttattgcaagatggaatccatctggtgcacgtaggcctgttcttgatgaggctcctgtttactatcctaccgaggaggaatttcaggacacattaaaatacattgagattatccgcccaacagcagaaccatatggaatatgccgtattgttccaccagcttcatggaagcctccatgccttcttaaagagaaaaacatttgggagtgctcaaaattttctactcgggtacagaaggttgacaagctccaaaatcgtaaatcgcccaagaagagcagaagaggtggaatgatgaagaagcgtagaaagatttcggagactgaagaaaacaatcaccatcaaattggaatgcagcaaaaccaagagagatttggatttgaaccaggaccagagttcacactacagatgtttcagaagtatgcagatgacttcagtgatcagtattttatgaaagataaatgcagagattcaccaccatcagtggaagatattgaaggcgagtattggcgcatagttgaaagaccgacagaggagatagaggtaatatatggtgccgatttggagactggaacttttggcagtgggtttccaaagttatgtcctgaaatgaaatctgatgtggaggataaatatgcacaatctgggtggaatctaaataacctgcctagactacaaggttcggttctttcttttgaaggcggtgacatttctggtgttttagtgccttggctttatgtcggcatgtgtttttcatctttctgctggcatgttgaagatcatcatttgtactcactgaactacatgcattggggtgctccaaagatgtggtatggagttccagggaaggatgctgtgaatttggaggctgcaatgaggaaacatcttcctgagttatttgaggagcaacctgatttgcttcacaacttagttactcagttctcaccatcattgcttaaatctgaaggagtaccagtctaccgatgtgttcagcatgagggagagtttgtcctgacgttcccacgggcataccatgctggttttaattgtggcttcaattgtgcagaagctgttaatgtggcacccattgattggttgccggttggacaaaatgctgttgatctttatcgtgaacaagctcggaaaataactatctcccatgataagctgttgcttggggctgcaagagaagcaataagagctcagtgggacatcctatttctcaagaggaattcttctgttaacttgaggtggaaaagcatatgtggacctgatagcacaatatgcaagtcactgaaggcacgaattgaaatggagttggtacaaagacaaaatatatcctctccatgtcaatctaggaaaatggatagtgagtttgattctactgatagggaatgtgcattgtgttactatgatctgcatctttcagcttcaggctgtccatgctccccagagaaatatgcttgcctggtacatgcaaagcagctttgttcatgcgattgggacaaaaggtttttcctatttcgttatgatgttaatgagttgaatatcttagctgatgctttagggggaaagctaagtgccattcacagatggggtgtctctgatcttggattaagtttgagctcctgtgtcaaacgggaaaaggtccaagattccaagactgttcgcagattaactgatggcccaagacggtcctacatgtcacaggcatcaacagtatcattgattccttcttctgttagcactgaacagaaaaagaatgaagataagacactggatttaggttgcccaggtatgaatttaccaaaaataagtccggaggcaaataatctgcgtccttcgacagaacagataaaatcagaaaatctctcacagctaaaggaaccatgtgtgaagaatgaattatcttgtccgaccagcaatggtaccagccaagaacataaaggagggattggaggccacaaacttgcagcagcaagcatgatggttctttctggtcaatcatttcctgcaaatgctggtgaatcagtgagaaatgcgcatgtcttggcagtatttaaagagggtagagactgtacatcttcacttacacttagggagtatcataacaggccagtgtcaatgattgataatggagctaacatgaagctggatctggaaaacatagacaattctcatatgttgatgtcatcaccagacttcaatgcaactgtatgtcattcttacaaggatcaaacattcttaacactggaaactaatacctctgtgatgactgagaaagatagcagtcaggcccgtaatgcaagccagcagtttgtcagtactgctttaagaacacaaaatgtgtctcaggaaccattgtgtaccgcgattgctccaaagcaactcatagatcctcaagttcagaaaaaatcatatggtgtttttggttctggcagtgcccatcttgggcatctgactgttggtaatcagcaactaaatgagagatggcatcaaagacaatctgattctttatccagtgtggaagttagagctaggggtcattcagctatgatagtgcagcctgctctggaaaatcacagcagaaatggagttgcacagaagggtcctcgcatagctaatgttgtacatagattcaagtgctctgttgaacctatagaaattggtgctgtgttatctgggaagttgtggtcctcaagtcaagcaatcttcccaaaagggtttaagagcagagtaaaatacttcagtgttgtagatccagtacaaatgacatactacatatctgaaatattggacgctggacagcagggaccactttttatggtgactgtagaaaactgtcctggtgaaattttcataaacatctctcctaccaagtgctggaacatggttcgtgaaaggctcaatatggaaataaggaggcagctcaatatgggaagagctaaccttcctacactacagcctccaggatcagttgatggccatgaaatgtttgggttgttaacaccagcaatagttcaggcaattgaggcccgggacagagattatatctgtacagagtactggcgatcaaggccccatgcaacaattgagaatcgagacaatcagaatatgtcacctcaggatccaccccttgttgcactgagggggctcttccagcgggctaattgtgatgaactgcgagcactacgcagtttgctgatgagcaatagaattctgggcgacaattctaggcagcaggcttgccaaatccttgatgaggagattgcgaagcaatggcactgaccagcgtaaatacaggatgttgtactaaccaattgtttggcatgattttgttttgacgggataaatcagttttaaggcttgcttcttccgttgcccttgtgcccattcttttcattcttgtgaccatacccaattctttattgcaagtggtgtcaacaagcatgaggctacagctgcatcacctgcaaggaagtcaaaaactacaaccaagtaaagctattgcacactcctcaacaactgtatgcaagaagcaggatagcggatgaacatcagtgggaggaaaaggaaatgcacattgaagccatcgggaagcagtcgaaggtttattatgaagatagggtggctattattgagccaagattgcctatgacaattattcttattgaggagatcgctgccgagcccgcaccggctatcgaatcgaaggttgattcttctgagctaccgaaggagaaggagaataaggttaaggaggaggtagttgagctacccatccatgatgaaattcctttggctagcttgcagcttgcaccaaggccaagaccagagtcgaagccgacttatgaggggacacctcggaaaggtaagaggatggataatattttgagagcaatcctcaagttcacaaagactgaggaatctttctagacgaaggttgctccaccctctccaaagagagatagcgcacttggtgttgagaacgtcgaaattgaacttgcgcaaaaactagatgacgctctaaaaggtgaccctgcttcagataagattgtagcttcgaaggtttacaccattcctgataaatccaaggataaataagaagaacaagttgaagatttggaagaggaggcaactacgatagctgaagaggaatcaactgtgcagcctgaatacaccatccgacacgcctctggaggggagttgactgctgagcagatcgtcaaagtacaagattatgctgaagatttacaatatcggacagacacgctcatttacgacggaaatgatgaagatgaatgcctctactatcttccagacagtagagagattgatgtgtgccgcgtgatgatgaataacataggttagctgaagatcgagtgtggactttccgcaatgccgaagggccagcttgcagatggcctagactataatagcctaaaggtgaggttttagttctttgcttttgaaagttgcctagaggggggcgggtggataggcaaacagaaatatttttcaataaaaactagaaacaaactaggtaaaaccggttcagccggtgccaaaactggttcaaccggtttgaacgagctcaactaaagaatgacatataaaactgaattgatctcaaaattcacctagttaactttggaaatgagatgttctagataatccacagggttcaaagtagtagatctgagaagggcacttctcaaaatccacacacaaaaaagatataaacaaatcttccacagaatggtgagagaatgaagaacacaaacaaacacaatgagcaagaacacaagagacatcagatttatcccgaggttcggtcacaccaccaaggtgccctatttcctcgttgaggcacccacaaagggtcgggtctctttcaaccctaatcctccctttgccgaccgtcaagcccacacactaatctttgctcaaacgagcgggtaatacaaactttcttgtgatcttccacaagatttggagactcacaagcgacacctagtcgtttaggagttagaagctctaagagtaatgaatccacaaagaactcgatgtagtaccaaagctcgaaccaagaagagcaagagggatttaaagattaagcacaaaaaccgcagctctcaaactcactcaaaaatttctctccaaagatttgaaatgggagaggcaagagatgtgtgagagagagtgggaggtgtttctcaggttagaaatggagttcaaatcgtgctcttttatggacagagaggtaggagtgagtatatataggtggggcttcgaaactagtcgttgggctaaatttctgggaaggaccggttgaaccgcccctggtctaactgtcagcctgtctgccagctagtcaagttgaccaaaaccggttgaacctcgttggggggcggttgaactgccccttggcagacctgtcagcctatctgccagtctgactgacagactactgcgaagtctggcaagaggggtcagagacccggttgaactgcccctggggaccagttaaactggtcttgaccagaaagtttaggagagaaaaccccagttcaactggcccagaggcaggttcaactggtgtatggtcaaagaggttcacagttgaagttgaagttcaactgcagttgaaaaagctcaactgtggctgaaaaagctaaactgcagttgaagaagttcaactcaactgaaaaagcttaattgcagctaaagaagctcaactcagctgaagttcaactcagctgaaaaaacttaactgcagatgaagaaaagcttaactgcttttcaacaggaacactctcagtttctcaatcttaacaacagtcagacacaaagtgtccaagggattttgttttttcgaaatagcttttgaatatagaggcttgagttttggcaaacaccaaccttctttttggatccccttgatagtacgacgatttctatactcaagttaaataaaatataattaagtaaactccttgagtaattgat

SEQ ID NO: 62210 - DNA, 4082 bp, Zea Mays
gactcggtggcggcgtcagaggctccccctcctgcctcgcgccctcgcctccggtcctccgcacaccggccggcgaccctgctgtctcccggccccggcgggcagtgggagccagcagctgctgctccaacaagcaatgatgggaatagaaggcattgcagccacagtcaccgaggaccctgaaccctcaattcctccaggatttggaccttttgctgcctcggcatcatggggaatccaaaacgatgttaaacctgctgatgatcattctagttctgttttagcattacagagcatcgacgacgatgtggaaattttggaatatctatccagttcagtggatcaccagagtgacacaggttgctgtatttctgggagcaatacctgtaggaaatcactgcgtaatagacctccaatagattatagccgctttgatcagattgcagatgaagattctgatgctgaagtagcagacaagggtgtaaatgcagtgaaacacagacaacaattccctaaaggagtacttcgaggatgtccagaatgtgccaattgtcaaaaggttattgcaagatggaatccatctggtgcacgtaggcctgttcttgatgaggctcctgtttactatcctaccgaggaggaatttcaggacacattaaaatacattgagattatccgcccaacagcagaaccatatggaatatgccgtattgttccaccagcttcatggaagcctccatgccttcttaaagagaaaaacatttgggagtgctcaaaattttctactcgggtacagaaggttgacaagctccaaaatcgtaaatcgcccaagaagagcagaagaggtggaatgatgaagaagcgtagaaagatttcggagactgaagaaaacaatcaccatcaaattggaatgcagcaaaaccaagagagatttggatttgaaccaggaccagagttcacactacagatgtttcagaagtatgcagatgacttcagtgatcagtattttatgaaagataaatgcagagattcaccaccatcagtggaagatattgaaggcgagtattggcgcatagttgaaagaccgacagaggagatagaggtaatatatggtgccgatttggagactggaacttttggcagtgggtttccaaagttatgtcctgaaatgaaatctgatgtggaggataaatatgcacaatctgggtggaatctaaataacctgcctagactacaaggttcggttctttcttttgaaggcggtgacatttctggtgttttagtgccttggctttatgtcggcatgtgtttttcatctttctgctggcatgttgaagatcatcatttgtactcactgaactacatgcattggggtgctccaaagatgtggtatggagttccagggaaggatgctgtgaatttggaggctgcaatgaggaaacatcttcctgagttatttgaggagcaacctgatttgcttcacaacttagttactcagttctcaccatcattgcttaaatctgaaggagtaccagtctaccgatgtgttcagcatgagggagagtttgtcctgacgttcccacgggcataccatgctggttttaattgtggcttcaattgtgcagaagctgttaatgtggcacccattgattggttgccggttggacaaaatgctgttgatctttatcgtgaacaagctcggaaaataactatctcccatgataagctgttgcttggggctgcaagagaagcaataagagctcagtgggacatcctatttctcaagaggaattcttctgttaacttgaggtggaaaagcatatgtggacctgatagcacaatatgcaagtcactgaaggcacgaattgaaatggagttggtacaaagacaaaatatatcctctccatgtcaatctaggaaaatggatagtgagtttgattctactgatagggaatgtgcattgtgttactatgatctgcatctttcagcttcaggctgtccatgctccccagagaaatatgcttgcctggtacatgcaaagcagctttgttcatgcgattgggacaaaaggtttttcctatttcgttatgatgttaatgagttgaatatcttagctgatgctttagggggaaagctaagtgccattcacagatggggtgtctctgatcttggattaagtttgagctcctgtgtcaaacgggaaaaggtccaagattccaagactgttcgcagattaactgatggcccaagacggtcctacatgtcacaggcatcaacagtatcattgattccttcttctgttagcactgaacagaaaaagaatgaagataagacactggatttaggttgcccaggtatgaatttaccaaaaataagtccggaggcaaataatctgcgtccttcgacagaacagataaaatcagaaaatctctcacagctaaaggaaccatgtgtgaagaatgaattatcttgtccgaccagcaatggtaccagccaagaacataaaggagggattggaggccacaaacttgcagcagcaagcatgatggttctttctggtcaatcatttcctgcaaatgctggtgaatcagtgagaaatgcgcatgtcttggcagtatttaaagagggtagagactgtacatcttcacttacacttagggagtatcataacaggccagtgtcaatgattgataatggagctaacatgaagctggatctggaaaacatagacaattctcatatgttgatgtcatcaccagacttcaatgcaactgtatgtcattcttacaaggatcaaacattcttaacactggaaactaatacctctgtgatgactgagaaagatagcagtcaggcccgtaatgcaagccagcagtttgtcagtactgctttaagaacacaaaatgtgtctcaggaaccattgtgtaccgcgattgctccaaagcaactcatagatcctcaagttcagaaaaaatcatatggtgtttttggttctggcagtgcccatcttgggcatctgactgttggtaatcagcaactaaatgagagatggcatcaaagacaatctgattctttatccagtgtggaagttagagctaggggtcattcagctatgatagtgcagcctgctctggaaaatcacagcagaaatggagttgcacagaagggtcctcgcatagctaatgttgtacatagattcaagtgctctgttgaacctatagaaattggtgctgtgttatctgggaagttgtggtcctcaagtcaagcaatcttcccaaaagggtttaagagcagagtaaaatacttcagtgttgtagatccagtacaaatgacatactacatatctgaaatattggacgctggacagcagggaccactttttatggtgactgtagaaaactgtcctggtgaaattttcataaacatctctcctaccaagtgctggaacatggttcgtgaaaggctcaatatggaaataaggaggcagctcaatatgggaagagctaaccttcctacactacagcctccaggatcagttgatggccatgaaatgtttgggttgttaacaccagcaatagttcaggcaattgaggcccgggacagagattatatctgtacagagtactggcgatcaaggccccatgcaacaattgagaatcgagacaatcagaatatgtcacctcaggatccaccccttgttgcactgagggggctcttccagcgggctaattgtgatgaactgcgagcactacgcagtttgctgatgagcaatagaattctgggcgacaattctaggcagcaggcttgccaaatccttgatgaggagattgcgaagcaatggcactgaccagcgtaaatacaggatgttgtactaaccaattgtttggcatgattttgttttgacgggataaatcagttttaaggcttgcttcttccgttgcccttgtgcccattcttttcattcttgtgaccatacccaattctttattgcaagtggtgtcaacaagcatgaggctacagctgcatcacctgcaaggaagtcaaaaagaaggccagagttgaaaggattactaaagagatcttgg

SEQ ID NO: 62211 - DNA, 4098 bp, Zea Mays
ccgactcccaactcccgaccggctcgcgagctatctcggggacacaaccgactgcctcgcgcctcttcctcatccgtcgtcaccggttgcttcccaccgccgccttgcgcctccatgctctcagcaatgatgggaatagaaggcattgcagccacagtcaccgaggaccctgaaccctcaattcctccaggatttggaccttttgctgcctcggcatcatggggaatccaaaacgatgttaaacctgctgatgatcattctagttctgttttagcattacagagcatcgacgacgatgtggaaattttggaatatctatccagttcagtggatcaccagagtgacacaggttgctgtatttctgggagcaatacctgtaggaaatcactgcgtaatagacctccaatagattatagccgctttgatcagattgcagatgaagattctgatgctgaagtagcagacaagggtgtaaatgcagtgaaacacagacaacaattccctaaaggagtacttcgaggatgtccagaatgtgccaattgtcaaaaggttattgcaagatggaatccatctggtgcacgtaggcctgttcttgatgaggctcctgtttactatcctaccgaggaggaatttcaggacacattaaaatacattgagattatccgcccaacagcagaaccatatggaatatgccgtattgttccaccagcttcatggaagcctccatgccttcttaaagagaaaaacatttgggagtgctcaaaattttctactcgggtacagaaggttgacaagctccaaaatcgtaaatcgcccaagaagagcagaagaggtggaatgatgaagaagcgtagaaagatttcggagactgaagaaaacaatcaccatcaaattggaatgcagcaaaaccaagagagatttggatttgaaccaggaccagagttcacactacagatgtttcagaagtatgcagatgacttcagtgatcagtattttatgaaagataaatgcagagattcaccaccatcagtggaagatattgaaggcgagtattggcgcatagttgaaagaccgacagaggagatagaggtaatatatggtgccgatttggagactggaacttttggcagtgggtttccaaagttatgtcctgaaatgaaatctgatgtggaggataaatatgcacaatctgggtggaatctaaataacctgcctagactacaaggttcggttctttcttttgaaggcggtgacatttctggtgttttagtgccttggctttatgtcggcatgtgtttttcatctttctgctggcatgttgaagatcatcatttgtactcactgaactacatgcattggggtgctccaaagatgtggtatggagttccagggaaggatgctgtgaatttggaggctgcaatgaggaaacatcttcctgagttatttgaggagcaacctgatttgcttcacaacttagttactcagttctcaccatcattgcttaaatctgaaggagtaccagtctaccgatgtgttcagcatgagggagagtttgtcctgacgttcccacgggcataccatgctggttttaattgtggcttcaattgtgcagaagctgttaatgtggcacccattgattggttgccggttggacaaaatgctgttgatctttatcgtgaacaagctcggaaaataactatctcccatgataagctgttgcttggggctgcaagagaagcaataagagctcagtgggacatcctatttctcaagaggaattcttctgttaacttgaggtggaaaagcatatgtggacctgatagcacaatatgcaagtcactgaaggcacgaattgaaatggagttggtacaaagacaaaatatatcctctccatgtcaatctaggaaaatggatagtgagtttgattctactgatagggaatgtgcattgtgttactatgatctgcatctttcagcttcaggctgtccatgctccccagagaaatatgcttgcctggtacatgcaaagcagctttgttcatgcgattgggacaaaaggtttttcctatttcgttatgatgttaatgagttgaatatcttagctgatgctttagggggaaagctaagtgccattcacagatggggtgtctctgatcttggattaagtttgagctcctgtgtcaaacgggaaaaggtccaagattccaagactgttcgcagattaactgatggcccaagacggtcctacatgtcacaggcatcaacagtatcattgattccttcttctgttagcactgaacagaaaaagaatgaagataagacactggatttaggttgcccaggtatgaatttaccaaaaataagtccggaggcaaataatctgcgtccttcgacagaacagataaaatcagaaaatctctcacagctaaaggaaccatgtgtgaagaatgaattatcttgtccgaccagcaatggtaccagccaagaacataaaggagggattggaggccacaaacttgcagcagcaagcatgatggttctttctggtcaatcatttcctgcaaatgctggtgaatcagtgagaaatgcgcatgtcttggcagtatttaaagagggtagagactgtacatcttcacttacacttagggagtatcataacaggccagtgtcaatgattgataatggagctaacatgaagctggatctggaaaacatagacaattctcatatgttgatgtcatcaccagacttcaatgcaactgtatgtcattcttacaaggatcaaacattcttaacactggaaactaatacctctgtgatgactgagaaagatagcagtcaggcccgtaatgcaagccagcagtttgtcagtactgctttaagaacacaaaatgtgtctcaggaaccattgtgtaccgcgattgctccaaagcaactcatagatcctcaagttcagaaaaaatcatatggtgtttttggttctggcagtgcccatcttgggcatctgactgttggtaatcagcaactaaatgagagatggcatcaaagacaatctgattctttatccagtgtggaagttagagctaggggtcattcagctatgatagtgcagcctgctctggaaaatcacagcagaaatggagttgcacagaagggtcctcgcatagctaatgttgtacatagattcaagtgctctgttgaacctatagaaattggtgctgtgttatctgggaagttgtggtcctcaagtcaagcaatcttcccaaaagggtttaagagcagagtaaaatacttcagtgttgtagatccagtacaaatgacatactacatatctgaaatattggacgctggacagcagggaccactttttatggtgactgtagaaaactgtcctggtgaaattttcataaacatctctcctaccaagtgctggaacatggttcgtgaaaggctcaatatggaaataaggaggcagctcaatatgggaagagctaaccttcctacactacagcctccaggatcagttgatggccatgaaatgtttgggttgttaacaccagcaatagttcaggcaattgaggcccgggacagagattatatctgtacagagtactggcgatcaaggccccatgcaacaattgagaatcgagacaatcagaatatgtcacctcaggatccaccccttgttgcactgagggggctcttccagcgggctaattgtgatgaactgcgagcactacgcagtttgctgatgagcaatagaattctgggcgacaattctaggcagcaggcttgccaaatccttgatgaggagattgcgaagcaatggcactgaccagcgtaaatacaggatgttgtactaaccaattgtttggcatgattttgttttgacgggataaatcagttttaaggcttgcttcttccgttgcccttgtgcccattcttttcattcttgtgaccatacccaattctttattgcaagtggtgtcaacaagcatgaggctacagctgcatcacctgcaaggaagtcaaaaactacaaccaagtaaagctattgcacactcctcaacaactgtatgcaagaagcaggatagcggat

SEQ ID NO: 62212 - DNA, 4065 bp, Zea Mays
gactcggtggcggcgtcagaggctccccctcctgcctcgcgccctcgcctccggtcctccgcacaccggccggcgaccctgctgtctcccggccccggcgggcagtgggagccagcagctgctgctccaacaagcaatgatgggaatagaaggcattgcagccacagtcaccgaggaccctgaaccctcaattcctccaggatttggaccttttgctgcctcggcatcatggggaatccaaaacgatgttaaacctgctgatgatcattctagttctgttttagcattacagagcatcgacgacgatgtggaaattttggaatatctatccagttcagtggatcaccagagtgacacaggttgctgtatttctgggagcaatacctgtaggaaatcactgcgtaatagacctccaatagattatagccgctttgatcagattgcagatgaagattctgatgctgaagtagcagacaagggtgtaaatgcagtgaaacacagacaacaattccctaaaggagtacttcgaggatgtccagaatgtgccaattgtcaaaaggttattgcaagatggaatccatctggtgcacgtaggcctgttcttgatgaggctcctgtttactatcctaccgaggaggaatttcaggacacattaaaatacattgagattatccgcccaacagcagaaccatatggaatatgccgtattgttccaccagcttcatggaagcctccatgccttcttaaagagaaaaacatttgggagtgctcaaaattttctactcgggtacagaaggttgacaagctccaaaatcgtaaatcgcccaagaagagcagaagaggtggaatgatgaagaagcgtagaaagatttcggagactgaagaaaacaatcaccatcaaattggaatgcagcaaaaccaagagagatttggatttgaaccaggaccagagttcacactacagatgtttcagaagtatgcagatgacttcagtgatcagtattttatgaaagataaatgcagagattcaccaccatcagtggaagatattgaaggcgagtattggcgcatagttgaaagaccgacagaggagatagaggtaatatatggtgccgatttggagactggaacttttggcagtgggtttccaaagttatgtcctgaaatgaaatctgatgtggaggataaatatgcacaatctgggtggaatctaaataacctgcctagactacaaggttcggttctttcttttgaaggcggtgacatttctggtgttttagtgccttggctttatgtcggcatgtgtttttcatctttctgctggcatgttgaagatcatcatttgtactcactgaactacatgcattggggtgctccaaagatgtggtatggagttccagggaaggatgctgtgaatttggaggctgcaatgaggaaacatcttcctgagttatttgaggagcaacctgatttgcttcacaacttagttactcagttctcaccatcattgcttaaatctgaaggagtaccagtctaccgatgtgttcagcatgagggagagtttgtcctgacgttcccacgggcataccatgctggttttaattgtggcttcaattgtgcagaagctgttaatgtggcacccattgattggttgccggttggacaaaatgctgttgatctttatcgtgaacaagctcggaaaataactatctcccatgataagctgttgcttggggctgcaagagaagcaataagagctcagtgggacatcctatttctcaagaggaattcttctgttaacttgaggtggaaaagcatatgtggacctgatagcacaatatgcaagtcactgaagcttcaggctgtccatgctccccagagaaatatgcttgcctggtacatgcaaagcagctttgttcatgcgattgggacaaaagggggaaagctaagtgccattcacagatggggtgtctctgatcttggattaagtttgagctcctgtgtcaaacgggaaaaggtccaagattccaagactgttcgcagattaactgatggcccaagacggtcctacatgtcacaggcatcaacagtatcattgattccttcttctgttagcactgaacagaaaaagaatgaagataagacactggatttaggttgcccaggtatgaatttaccaaaaataagtccggaggcaaataatctgcgtccttcgacagaacagataaaatcagaaaatctctcacagctaaaggaaccatgtgtgaagaatgaattatcttgtccgaccagcaatggtaccagccaagaacataaaggagggattggaggccacaaacttgcagcagcaagcatgatggttctttctggtcaatcatttcctgcaaatgctggtgaatcagtgagaaatgcgcatgtcttggcagtatttaaagagggtagagactgtacatcttcacttacacttagggagtatcataacaggccagtgtcaatgattgataatggagctaacatgaagctggatctggaaaacatagacaattctcatatgttgatgtcatcaccagacttcaatgcaactgtatgtcattcttacaaggatcaaacattcttaacactggaaactaatacctctgtgatgactgagaaagatagcagtcaggcccgtaatgcaagccagcagtttgtcagtactgctttaagaacacaaaatgtgtctcaggaaccattgtgtaccgcgattgctccaaagcaactcatagatcctcaagttcagaaaaaatcatatggtgtttttggttctggcagtgcccatcttgggcatctgactgttggtaatcagcaactaaatgagagatggcatcaaagacaatctgattctttatccagtgtggaagttagagctaggggtcattcagctatgatagtgcagcctgctctggaaaatcacagcagaaatggagttgcacagaagggtcctcgcatagctaatgttgtacatagattcaagtgctctgttgaacctatagaaattggtgctgtgttatctgggaagttgtggtcctcaagtcaagcaatcttcccaaaagggtttaagagcagagtaaaatacttcagtgttgtagatccagtacaaatgacatactacatatctgaaatattggacgctggacagcagggaccactttttatggtgactgtagaaaactgtcctggtgaaattttcataaacatctctcctaccaagtgctggaacatggttcgtgaaaggctcaatatggaaataaggaggcagctcaatatgggaagagctaaccttcctacactacagcctccaggatcagttgatggccatgaaatgtttgggttgttaacaccagcaatagttcaggcaattgaggcccgggacagagattatatctgtacagagtactggcgatcaaggccccatgcaacaattgagaatcgagacaatcagaatatgtcacctcaggatccaccccttgttgcactgagggggctcttccagcgggctaattgtgatgaactgcgagcactacgcagtttgctgatgagcaatagaattctgggcgacaattctaggcagcaggcttgccaaatccttgatgaggagattgcgaagcaatggcactgaccagcgtaaatacaggatgttgtactaaccaattgtttggcatgattttgttttgacgggataaatcagttttaaggcttgcttcttccgttgcccttgtgcccattcttttcattcttgtgaccatacccaattctttattgcaagtggtgtcaacaagcatgaggctacagctgcatcacctgcaaggaagtcaaaattgtggctgattgttatgttacccaatgacaagggtgagtaacttattataagatgtagctgggtcatcatattcctttgttcttgaaatctgttaaccatgcatgcttgtctgatgtaaaccacccttagattccgggtactcggtcattattgggattattctagtagttgtattctttgtggagcaaataacgatttatatgtat

SEQ ID NO: 62213 - DNA, 4241 bp, Zea Mays
ccgactcccaactcccgaccggctcgcgagctatctcggggacacaaccgactgcctcgcgcctcttcctcatccgtcgtcaccggttgcttcccaccgccgccttgcgcctccatgctctcagcaatgatgggaatagaaggcattgcagccacagtcaccgaggaccctgaaccctcaattcctccaggatttggaccttttgctgcctcggcatcatggggaatccaaaacgatgttaaacctgctgatgatcattctagttctgttttagcattacagagcatcgacgacgatgtggaaattttggaatatctatccagttcagtggatcaccagagtgacacaggttgctgtatttctgggagcaatacctgtaggaaatcactgcgtaatagacctccaatagattatagccgctttgatcagattgcagatgaagattctgatgctgaagtagcagacaagggtgtaaatgcagtgaaacacagacaacaattccctaaaggagtacttcgaggatgtccagaatgtgccaattgtcaaaaggttattgcaagatggaatccatctggtgcacgtaggcctgttcttgatgaggctcctgtttactatcctaccgaggaggaatttcaggacacattaaaatacattgagattatccgcccaacagcagaaccatatggaatatgccgtattgttccaccagcttcatggaagcctccatgccttcttaaagagaaaaacatttgggagtgctcaaaattttctactcgggtacagaaggttgacaagctccaaaatcgtaaatcgcccaagaagagcagaagaggtggaatgatgaagaagcgtagaaagatttcggagactgaagaaaacaatcaccatcaaattggaatgcagcaaaaccaagagagatttggatttgaaccaggaccagagttcacactacagatgtttcagaagtatgcagatgacttcagtgatcagtattttatgaaagataaatgcagagattcaccaccatcagtggaagatattgaaggcgagtattggcgcatagttgaaagaccgacagaggagatagaggtaatatatggtgccgatttggagactggaacttttggcagtgggtttccaaagttatgtcctgaaatgaaatctgatgtggaggataaatatgcacaatctgggtggaatctaaataacctgcctagactacaaggttcggttctttcttttgaaggcggtgacatttctggtgttttagtgccttggctttatgtcggcatgtgtttttcatctttctgctggcatgttgaagatcatcatttgtactcactgaactacatgcattggggtgctccaaagatgtggtatggagttccagggaaggatgctgtgaatttggaggctgcaatgaggaaacatcttcctgagttatttgaggagcaacctgatttgcttcacaacttagttactcagttctcaccatcattgcttaaatctgaaggagtaccagtctaccgatgtgttcagcatgagggagagtttgtcctgacgttcccacgggcataccatgctggttttaattgtggcttcaattgtgcagaagctgttaatgtggcacccattgattggttgccggttggacaaaatgctgttgatctttatcgtgaacaagctcggaaaataactatctcccatgataagctgttgcttggggctgcaagagaagcaataagagctcagtgggacatcctatttctcaagaggaattcttctgttaacttgaggtggaaaagcatatgtggacctgatagcacaatatgcaagtcactgaaggcacgaattgaaatggagttggtacaaagacaaaatatatcctctccatgtcaatctaggaaaatggatagtgagtttgattctactgatagggaatgtgcattgtgttactatgatctgcatctttcagcttcaggctgtccatgctccccagagaaatatgcttgcctggtacatgcaaagcagctttgttcatgcgattgggacaaaaggtttttcctatttcgttatgatgttaatgagttgaatatcttagctgatgctttagggggaaagctaagtgccattcacagatggggtgtctctgatcttggattaagtttgagctcctgtgtcaaacgggaaaaggtccaagattccaagactgttcgcagattaactgatggcccaagacggtcctacatgtcacaggcatcaacagtatcattgattccttcttctgttagcactgaacagaaaaagaatgaagataagacactggatttaggttgcccaggtatgaatttaccaaaaataagtccggaggcaaataatctgcgtccttcgacagaacagataaaatcagaaaatctctcacagctaaaggaaccatgtgtgaagaatgaattatcttgtccgaccagcaatggtaccagccaagaacataaaggagggattggaggccacaaacttgcagcagcaagcatgatggttctttctggtcaatcatttcctgcaaatgctggtgaatcagtgagaaatgcgcatgtcttggcagtatttaaagagggtagagactgtacatcttcacttacacttagggagtatcataacaggccagtgtcaatgattgataatggagctaacatgaagctggatctggaaaacatagacaattctcatatgttgatgtcatcaccagacttcaatgcaactgtatgtcattcttacaaggatcaaacattcttaacactggaaactaatacctctgtgatgactgagaaagatagcagtcaggcccgtaatgcaagccagcagtttgtcagtactgctttaagaacacaaaatgtgtctcaggaaccattgtgtaccgcgattgctccaaagcaactcatagatcctcaagttcagaaaaaatcatatggtgtttttggttctggcagtgcccatcttgggcatctgactgttggtaatcagcaactaaatgagagatggcatcaaagacaatctgattctttatccagtgtggaagttagagctaggggtcattcagctatgatagtgcagcctgctctggaaaatcacagcagaaatggagttgcacagaagggtcctcgcatagctaatgttgtacatagattcaagtgctctgttgaacctatagaaattggtgctgtgttatctgggaagttgtggtcctcaagtcaagcaatcttcccaaaagggtttaagagcagagtaaaatacttcagtgttgtagatccagtacaaatgacatactacatatctgaaatattggacgctggacagcagggaccactttttatggtgactgtagaaaactgtcctggtgaaattttcataaacatctctcctaccaagtgctggaacatggttcgtgaaaggctcaatatggaaataaggaggcagctcaatatgggaagagctaaccttcctacactacagcctccaggatcagttgatggccatgaaatgtttgggttgttaacaccagcaatagttcaggcaattgaggcccgggacagagattatatctgtacagagtactggcgatcaaggccccatgcaacaattgagaatcgagacaatcagaatatgtcacctcaggatccaccccttgttgcactgagggggctcttccagcgggctaattgtgatgaactgcgagcactacgcagtttgctgatgagcaatagaattctgggcgacaattctaggcagcaggcttgccaaatccttgatgaggagattgcgaagcaatggcactgaccagcgtaaatacaggatgttgtactaaccaattgtttggcatgattttgttttgacgggataaatcagttttaaggcttgcttcttccgttgcccttgtgcccattcttttcattcttgtgaccatacccaattctttattgcaagtggtgtcaacaagcatgaggctacagctgcatcacctgcaaggaagtcaaaattgtggctgattgttatgttacccaatgacaagggtgagtaacttattataagatgtagctgggtcatcatattcctttgttcttgaaatctgttaaccatgcatgcttgtctgatgtaaaccacccttagattccgggtactcggtcattattgggattattctagtagttgtattctttgtggagcaaataacgatttatatgtat

SEQ ID NO: 62214 - DNA, 366 bp, Zea Mays
gccacgacaagaaacaaaagccccaagaaaaaaaaaaaggcagcgctagcttaccgtcaggtgaagatgaagatcaacgccggccgccgcgacgacgggattgcagcggcgacgctcctggccgccgttcttttcggatgtctcgcgacctccgtgcagttgccagcagatgccactaccggagacggagagcgcgggcaggaggcggagttggcgttgccgccgccgttctgctacaaggcgtgcggcaacgggcgctgcgacttctgctgcgccagccagtacacgccgacgttctgctgggacacccaggccatgtgcaagcgcgagtgccatccgcccatcagccctcccagttccgtatga

SEQ ID NO: 62215 - DNA, 901 bp, Zea Mays
agatagggaggcagccaatcacaggagcgcatagcacagcacaaggagaggccgagaagcgctttagccgtagccgtagcgataagagtgagctagctggtgcacaccggcatggcggccacggcgtactccgtggcgctcctcggcggcgcgcgcctccccgccgctccgcgctccgccctcctccctcggcgcagcgtctgccagcttcgcttccaagatgcaccgaggctctccctgctccgtgcgaaggccgcttccgaggacacatcggcctccggcgacgagttgatcgaggacctcaaagcgaagtgggacgccgttgaggacaagcccaccgtcctcttgtacggcggcggcgccgtcgtcgccctatggctgacgtccgtggtcgtgggcgccatcaacgccgtgccgctgctccccaagatcctggagctcgttgggctcggctacaccggctggttcgtgtaccgctaccttctctttaaggaaagcaggaaagagttggccgccgacattgagaccttgaagaaaaaaatagctggaacagaataaacgctcatggaaagttttagagcgtcctttcttctttggaaagagatctattcgatcggagaaccaatatgcaactacttgagtactattattgcccatgtattgtgtgctgtatatcttctgtatacaaaggaaggttcgtttgttatgtacgtagtagcattgtagtttaaatgtatcgtattacctatctgctaaattcttctttttgatttagcaattttattgtacgtaaacaaaaataagggtaaaacaaatagagtgtgtaatctataccaatattaagaacttattcgataacataaataatatacaattgtaacatgaataaattattcctttg

SEQ ID NO: 62216 - DNA, 2830 bp, Zea Mays
aattttatcaatggctttaagggcccaagctggaagatcaacagccattgctaggtagatgaccatccctgtgagaacatgttgaacgtgcacttttcgaccagctttagtcaataactcagccttccatccagagagttgatttgcaatcttgtcaataatgggttgaacttgggtttttgaaagctttttacattgcttttcattatgttggatgtttggaaatcgtgtgccacacatgctcgataatgattatacaccctattctgcagtggatatatttgtcaaggatcttggtatagtatcttgtgaaagttccaattcgaggatcccagttcacgtctctagtatagcccaccagctgtttatttcaggatctgcttctgggtggggtagatatgacgatgctgccgttgtgaaggtctatgagacattaactggtgtaaaagttgaagggaaggctccgatgctcagtaaagaagatgttcttcagtctcttccatctgaatggccagaagatccaattgataatcttgtacctattgcatctcatagtagcaaaaagtttcttgtagttttagatgatgatccaactgggactcaaacagttcatgatatagaagttttaactgaatggcctgttgaagcccttgttgaacagttcctcaagctaccaacttgcttttttattttgacaaactctcgttccatgactgctgataaggccatgctgctagtacaaactatctgtaaaaatcttaaagctgcggcagagaaggtccctggtgttagttatacaatagtcttgagaggtgattcaactctacgtggtcatttcccagaggaagctgacgctgctgtctccgtattaggtgagatggatgcttggataatctgtccattttttcttcaaggtgggagatacactattaacgacatccactacgtcgcagactctgatagattaattcctgctggtgaaaccgaatttgccaaggatgcagtttttggctataaatcttccaatctcagacagtgggttgaagagaagaccaaaggacgggttttggagaaccaagtttcaacaatttccataactctcttgcgtaaacaaggaccaactgctgtttgtgagcatctctgtagcttggagaaggtgtctgtcgagatggtttcaatgaaatcaatggaggacagagaccaagaaatcagacgaattgttgaactagggaatgcttatatacaatccagaaaagacactctaattctcaccagccgccaactcattactggaaaaactcctgaagaaagcttagaaattaattataaagtgagttcagcactagtggagattgtgagaaggattgatagtaaacctcattatatcattgcaaagggaggaatcacttcatctgatattgctacaaaggcgctggaagctaaacgtgccaaagtcatgggacaagcattagctggtgtacccttgtggcagcttggtcctgagagtagatttcctggggtcccttacattgtttttcctggtaatgttggtgataacagtgctcttgctaaagtggtgaaaagttgggcttccccatctagaagttctacaaaagaaattcttcttaatgcggagaagggcggttatgctgttggtgctttcaatgtgtataaccttgagggaattgaagctgttgttgcagcagcagaggctgaaaagagtcctgctattcttcagattcatccgagtgctctaaagcaaggtggagtcccactggtagcatgttgcattgctgctgcagaacaatccagtgtgcctatcagtgtccactatgaccacggcatttccaagtcagacttgcttcaagctcttgaagcgggatttgattcagtcatggtggatggttctcatctaactttaggggataacatcttatacacaaagagcatatcttccttggctcatgcaaaaggtttacttgtggaagctgagttgggtaggctctcaggctctgaagatggcatgaccgttgaagaatatgaagcaagatttactgatgttgcccaggctgaggaatttattgatgagacaagcattgatgctctagcagtttgcattggaaatgttcatggaaaatatccacctagtggaccaaaccttaaattcgacttgctaaaggaccttcgtgcattaacattaaagaaaggagttagcttggtcctccatggagcatctggtctatctcatgagctcgtaaaggagtgcatagacttgggcgtgagaaaattcaatgtgaacaccgaggttcggaacagctacctggcgtccctcagaaagccagaaaaggacttgattcaggtgatggcgtctgctaaagaggcaatgaaagctgttgtagcagagaagctgcgcctgtttggatcgtgtgggaaagcctgagcgaagtacttgcgttgcgccggcaacatgcagtacaagaccgactgcatcatcgggttcgtgatgctgctgctactgtgcagttgcttacagttacagctcattgcgttgaacagctgaagtggttattgtactttgcagtgtagcgcaactaaggctaattcataaatcgtaataatgtatgtatgctgccccgctgtaaaaatgctccgtcgttaataaatgccatcgcgcttgctgtgcctttgtttacatttttattcgcctctcgagtgttctaacatgcaatctcagttgtcctatttagccctagtttgaaaactcaaatctcctctaagattggagggcatttctctctaatcttgtagaggatttgagtcttcaaactct

SEQ ID NO: 62217 - DNA, 3048 bp, Zea Mays
tttctatcatcattgggtggatgtacgtgatacacatttaaaatgaatgcttcagcagctgaagccatgtcatttgctgctcgactaaatttgagaacgagaagagtcttcgaaattatgcaacatgcaaggggttattcatggatgtttggaaatcgtgtgccacacatgctcgataatgattatacaccctattctgcagtggatatatttgtcaaggatcttggtatagtatcttgtgaaagttccaattcgaggatcccagttcacgtctctagtatagcccaccagctgtttatttcaggatctgcttctgggtggggtagatatgacgatgctgccgttgtgaaggtctatgagacattaactggtgtaaaagttgaagggaaggctccgatgctcagtaaagaagatgttcttcagtctcttccatctgaatggccagaagatccaattgataatcttgtacctattgcatctcatagtagcaaaaagtttcttgtagttttagatgatgatccaactgggactcaaacagttcatgatatagaagttttaactgaatggcctgttgaagcccttgttgaacagttcctcaagctaccaacttgcttttttattttgacaaactctcgttccatgactgctgataaggccatgctgctagtacaaactatctgtaaaaatcttaaagctgcggcagagaaggtccctggtgttagttatacaatagtcttgagaggtgattcaactctacgtggtcatttcccagaggaagctgacgctgctgtctccgtattaggtgagatggatgcttggataatctgtccattttttcttcaaggtgggagatacactattaacgacatccactacgtcgcagactctgatagattaattcctgctggtgaaaccgaatttgccaaggatgcagtttttggctataaatcttccaatctcagacagtgggttgaagagaagaccaaaggacgggttttggagaaccaagtttcaacaatttccataactctcttgcgtaaacaaggaccaactgctgtttgtgagcatctctgtagcttggagaagggctctgtgtgcatcgtcaatgctgctagtgacagggacatggctgtctttgcttctggaatgatccaggctgaattgaaaggaaagcgatttctctgccgcacagctgcaagttttgtgagcgcaaggattgggatcaagccaaagccacctatctgtccaaatgaccttggcttaaaaagagctttaactggaggcctcataattgttggttcatatgtgccaaaaactacaaagcaggttgatgagttgcgatcacagttcgggcaatctcttcgagtcatagaggtgtctgtcgagatggtttcaatgaaatcaatggaggacagagaccaagaaatcagacgaattgttgaactagggaatgcttatatacaatccagaaaagacactctaattctcaccagccgccaactcattactggaaaaactcctgaagaaagcttagaaattaattataaagtgagttcagcactagtggagattgtgagaaggattgatagtaaacctcattatatcattgcaaagggaggaatcacttcatctgatattgctacaaaggcgctggaagctaaacgtgccaaagtcatgggacaagcattagctggtgtacccttgtggcagcttggtcctgagagtagatttcctggggtcccttacattgtttttcctggtaatgttggtgataacagtgctcttgctaaagtggtgaaaagttgggcttccccatctagaagttctacaaaagaaattcttcttaatgcggagaagggcggttatgctgttggtgctttcaatgtgtataaccttgagggaattgaagctgttgttgcagcagcagaggctgaaaagagtcctgctattcttcagattcatccgagtgctctaaagcaaggtggagtcccactggtagcatgttgcattgctgctgcagaacaatccagtgtgcctatcagtgtccactatgaccacggcatttccaagtcagacttgcttcaagctcttgaagcgggatttgattcagtcatggtggatggttctcatctaactttaggggataacatcttatacacaaagagcatatcttccttggctcatgcaaaaggtttacttgtggaagctgagttgggtaggctctcaggctctgaagatggcatgaccgttgaagaatatgaagcaagatttactgatgttgcccaggctgaggaatttattgatgagacaagcattgatgctctagcagtttgcattggaaatgttcatggaaaatatccacctagtggaccaaaccttaaattcgacttgctaaaggaccttcgtgcattaacattaaagaaaggagttagcttggtcctccatggagcatctggtctatctcatgagctcgtaaaggagtgcatagacttgggcgtgagaaaattcaatgtgaacaccgaggttcggaacagctacctggcgtccctcagaaagccagaaaaggacttgattcaggtgatggcgtctgctaaagaggcaatgaaagctgttgtagcagagaagctgcgcctgtttggatcgtgtgggaaagcctgagcgaagtacttgcgttgcgccggcaacatgcagtacaagaccgactgcatcatcgggttcgtgatgctgctgctactgtgcagttgcttacagttacagctcattgcgttgaacagctgaagtggttattgtactttgcagtgtagcgcaactaaggctaattcataaatcgtaataatgtatgtatgctgccccgctgtaaaaatgctccgtcgttaataaatgccatcgcgcttgctgtgcctttgtttacatttttattcgcctctcgagtgttctaacatgcaatctcagttgtcctatttagccctagtttgaaaactcaaatctcctctaagattggagggcatttctctctaatcttgtagaggatttgagtcttcaaactct

SEQ ID NO: 62218 - DNA, 3583 bp, Zea Mays
gtttggaatagctgtttgcattttaacagcgaagcggattggcttcattggtcttggagctatgggctttggaatggcatctcatttgctgaaatcagggttctgtgttgttgcttatgatgtctacaagccaacaatggccaggtttgctgatttgggtggatcaacaaaaggttctcctgaggaaatagcaaaagatgtggaaatacttattatcatggttgcaaatgagtctcaagctgatagtgttctttttggaaacgctggtgctgtaccagttttatctgctggaacatctgtcatcctttcttctacagtttctcctggatttgtgatccacctcaacagaagattagaagctgaatgccgacagataaagttggttgatgctccagtatctggtggtgtcaaaagggcggcggatgggacactaactataatgacttcagggacagatgaagccctccattgcactggttctgttctatcagcgctgagtgaaaagttgtatgtaatcaaaggaggatgtggagctgcaagttctgttaagatggtcaaccaacttcttgctggggttcatatagcttcagcagctgaagccatgtcatttgctgctcgactaaatttgagaacgagaagagtcttcgaaattatgcaacatgcaaggggttattcatggatgtttggaaatcgtgtgccacacatgctcgataatgattatacaccctattctgcagtggatatatttgtcaaggatcttggtatagtatcttgtgaaagttccaattcgaggatcccagttcacgtctctagtatagcccaccagctgtttatttcaggatctgcttctgggtggggtagatatgacgatgctgccgttgtgaaggtctatgagacattaactggtgtaaaagttgaagggaaggctccgatgctcagtaaagaagatgttcttcagtctcttccatctgaatggccagaagatccaattgataatcttgtacctattgcatctcatagtagcaaaaagtttcttgtagttttagatgatgatccaactgggactcaaacagttcatgatatagaagttttaactgaatggcctgttgaagcccttgttgaacagttcctcaagctaccaacttgcttttttattttgacaaactctcgttccatgactgctgataaggccatgctgctagtacaaactatctgtaaaaatcttaaagctgcggcagagaaggtccctggtgttagttatacaatagtcttgagaggtgattcaactctacgtggtcatttcccagaggaagctgacgctgctgtctccgtattaggtgagatggatgcttggataatctgtccattttttcttcaaggtgggagatacactattaacgacatccactacgtcgcagactctgatagattaattcctgctggtgaaaccgaatttgccaaggatgcagtttttggctataaatcttccaatctcagacagtgggttgaagagaagaccaaaggacgggttttggagaaccaagtttcaacaatttccataactctcttgcgtaaacaaggaccaactgctgtttgtgagcatctctgtagcttggagaagggctctgtgtgcatcgtcaatgctgctagtgacagggacatggctgtctttgcttctggaatgatccaggctgaattgaaaggaaagcgatttctctgccgcacagctgcaagttttgtgagcgcaaggattgggatcaagccaaagccacctatctgtccaaatgaccttggcttaaaaagagctttaactggaggcctcataattgttggttcatatgtgccaaaaactacaaagcaggttgatgagttgcgatcacagttcgggcaatctcttcgagtcatagaggtgtctgtcgagatggtttcaatgaaatcaatggaggacagagaccaagaaatcagacgaattgttgaactagggaatgcttatatacaatccagaaaagacactctaattctcaccagccgccaactcattactggaaaaactcctgaagaaagcttagaaattaattataaagtgagttcagcactagtggagattgtgagaaggattgatagtaaacctcattatatcattgcaaagggaggaatcacttcatctgatattgctacaaaggcgctggaagctaaacgtgccaaagtcatgggacaagcattagctggtgtacccttgtggcagcttggtcctgagagtagatttcctggggtcccttacattgtttttcctggtaatgttggtgataacagtgctcttgctaaagtggtgaaaagttgggcttccccatctagaagttctacaaaagaaattcttcttaatgcggagaagggcggttatgctgttggtgctttcaatgtgtataaccttgagggaattgaagctgttgttgcagcagcagaggctgaaaagagtcctgctattcttcagattcatccgagtgctctaaagcaaggtggagtcccactggtagcatgttgcattgctgctgcagaacaatccagtgtgcctatcagtgtccactatgaccacggcatttccaagtcagacttgcttcaagctcttgaagcgggatttgattcagtcatggtggatggttctcatctaactttaggggataacatcttatacacaaagagcatatcttccttggctcatgcaaaaggtttacttgtggaagctgagttgggtaggctctcaggctctgaagatggcatgaccgttgaagaatatgaagcaagatttactgatgttgcccaggctgaggaatttattgatgagacaagcattgatgctctagcagtttgcattggaaatgttcatggaaaatatccacctagtggaccaaaccttaaattcgacttgctaaaggaccttcgtgcattaacattaaagaaaggagttagcttggtcctccatggagcatctggtctatctcatgagctcgtaaaggagtgcatagacttgggcgtgagaaaattcaatgtgaacaccgaggttcggaacagctacctggcgtccctcagaaagccagaaaaggacttgattcaggtgatggcgtctgctaaagaggcaatgaaagctgttgtagcagagaagctgcgcctgtttggatcgtgtgggaaagcctgagcgaagtacttgcgttgcgccggcaacatgcagtacaagaccgactgcatcatcgggttcgtgatgctgctgctactgtgcagttgcttacagttacagctcattgcgttgaacagctgaagtggttattgtactttgcagtgtagcgcaactaaggctaattcataaatcgtaataatgtatgtatgctgccccgctgtaaaaatgctccgtcgttaataaatgccatcgcgcttgctgtgcctttgtttacatttttattcgcctctcgagtgttctaacatgcaatctcagttgtcctatttagccctagtttgaaaactcaaatctcctctaagattggagggcatttctctctaatcttgtagaggatttgagtcttcaaactct

SEQ ID NO: 62219 - DNA, 3826 bp, Zea Mays
aaaaaagcagtgagccccgttcccttttatgatgagaggtttaaggagccatgtgatggatatgtcaaaatcagtaacatttccactgccacttctgggtgttgcctatcaacaattggtacatggttcatcagcagtaactggagatggatctgcctcaccgctgaaggtttgggaagcatcgtttggagtaaatattgtagatgctgctggcgaacaaatttatgatgcaagcaaattagctgatcagcttgttgcggaatctaaagcagcgaagcggattggcttcattggtcttggagctatgggctttggaatggcatctcatttgctgaaatcagggttctgtgttgttgcttatgatgtctacaagccaacaatggccaggtttgctgatttgggtggatcaacaaaaggttctcctgaggaaatagcaaaagatgtggaaatacttattatcatggttgcaaatgagtctcaagctgatagtgttctttttggaaacgctggtgctgtaccagttttatctgctggaacatctgtcatcctttcttctacagtttctcctggatttgtgatccacctcaacagaagattagaagctgaatgccgacagataaagttggttgatgctccagtatctggtggtgtcaaaagggcggcggatgggacactaactataatgacttcagggacagatgaagccctccattgcactggttctgttctatcagcgctgagtgaaaagttgtatgtaatcaaaggaggatgtggagctgcaagttctgttaagatggtcaaccaacttcttgctggggttcatatagcttcagcagctgaagccatgtcatttgctgctcgactaaatttgagaacgagaagagtcttcgaaattatgcaacatgcaaggggttattcatggatgtttggaaatcgtgtgccacacatgctcgataatgattatacaccctattctgcagtggatatatttgtcaaggatcttggtatagtatcttgtgaaagttccaattcgaggatcccagttcacgtctctagtatagcccaccagctgtttatttcaggatctgcttctgggtggggtagatatgacgatgctgccgttgtgaaggtctatgagacattaactggtgtaaaagttgaagggaaggctccgatgctcagtaaagaagatgttcttcagtctcttccatctgaatggccagaagatccaattgataatcttgtacctattgcatctcatagtagcaaaaagtttcttgtagttttagatgatgatccaactgggactcaaacagttcatgatatagaagttttaactgaatggcctgttgaagcccttgttgaacagttcctcaagctaccaacttgcttttttattttgacaaactctcgttccatgactgctgataaggccatgctgctagtacaaactatctgtaaaaatcttaaagctgcggcagagaaggtccctggtgttagttatacaatagtcttgagaggtgattcaactctacgtggtcatttcccagaggaagctgacgctgctgtctccgtattaggtgagatggatgcttggataatctgtccattttttcttcaaggtgggagatacactattaacgacatccactacgtcgcagactctgatagattaattcctgctggtgaaaccgaatttgccaaggatgcagtttttggctataaatcttccaatctcagacagtgggttgaagagaagaccaaaggacgggttttggagaaccaagtttcaacaatttccataactctcttgcgtaaacaaggaccaactgctgtttgtgagcatctctgtagcttggagaagggctctgtgtgcatcgtcaatgctgctagtgacagggacatggctgtctttgcttctggaatgatccaggctgaattgaaaggaaagcgatttctctgccgcacagctgcaagttttgtgagcgcaaggattgggatcaagccaaagccacctatctgtccaaatgaccttggcttaaaaagagctttaactggaggcctcataattgttggttcatatgtgccaaaaactacaaagcaggttgatgagttgcgatcacagttcgggcaatctcttcgagtcatagaggtgtctgtcgagatggtttcaatgaaatcaatggaggacagagaccaagaaatcagacgaattgttgaactagggaatgcttatatacaatccagaaaagacactctaattctcaccagccgccaactcattactggaaaaactcctgaagaaagcttagaaattaattataaagtgagttcagcactagtggagattgtgagaaggattgatagtaaacctcattatatcattgcaaagggaggaatcacttcatctgatattgctacaaaggcgctggaagctaaacgtgccaaagtcatgggacaagcattagctggtgtacccttgtggcagcttggtcctgagagtagatttcctggggtcccttacattgtttttcctggtaatgttggtgataacagtgctcttgctaaagtggtgaaaagttgggcttccccatctagaagttctacaaaagaaattcttcttaatgcggagaagggcggttatgctgttggtgctttcaatgtgtataaccttgagggaattgaagctgttgttgcagcagcagaggctgaaaagagtcctgctattcttcagattcatccgagtgctctaaagcaaggtggagtcccactggtagcatgttgcattgctgctgcagaacaatccagtgtgcctatcagtgtccactatgaccacggcatttccaagtcagacttgcttcaagctcttgaagcgggatttgattcagtcatggtggatggttctcatctaactttaggggataacatcttatacacaaagagcatatcttccttggctcatgcaaaaggtttacttgtggaagctgagttgggtaggctctcaggctctgaagatggcatgaccgttgaagaatatgaagcaagatttactgatgttgcccaggctgaggaatttattgatgagacaagcattgatgctctagcagtttgcattggaaatgttcatggaaaatatccacctagtggaccaaaccttaaattcgacttgctaaaggaccttcgtgcattaacattaaagaaaggagttagcttggtcctccatggagcatctggtctatctcatgagctcgtaaaggagtgcatagacttgggcgtgagaaaattcaatgtgaacaccgaggttcggaacagctacctggcgtccctcagaaagccagaaaaggacttgattcaggtgatggcgtctgctaaagaggcaatgaaagctgttgtagcagagaagctgcgcctgtttggatcgtgtgggaaagcctgagcgaagtacttgcgttgcgccggcaacatgcagtacaagaccgactgcatcatcgggttcgtgatgctgctgctactgtgcagttgcttacagttacagctcattgcgttgaacagctgaagtggttattgtactttgcagtgtagcgcaactaaggctaattcataaatcgtaataatgtatgtatgctgccccgctgtaaaaatgctccgtcgttaataaatgccatcgcgcttgctgtgcctttgtttacatttttattcgcctctcgagtgttctaacatgcaatctcagttgtcctatttagccctagtttgaaaactcaaatctcctctaagattggagggcatttctctctaatcttgtagaggatttgagtcttcaaactct

SEQ ID NO: 62220 - DNA, 4534 bp, Zea Mays
cacttcgcttctcactcgatctgctttgctctgctctcggtctcggctgcttgcctgcttcgagtcgtcgccggcgggagcagagaacccacccgcacggtgcgatgtcgttgaccgcggcccccgtggccttcatcggcctggacgagctcagcgttgagctagctgcctccttcctccgctccggcgcttgcgtccgctccttcacccccgaggcggaacggtcgccttctgcggcgctcgcggagttgaatggcctcctccagtgcgcgagcccagtggaagccgcgcgagatgctgcgctggtcgtcgtgctaagcgatgctggtggggttgacgagttgttcttcggggttgaggggatcgcgaaagggttatgcgcgggttctattgtattgattcattcgacattgctgcctagtcagttggagaagctggagcaggagcttacagatcagaagaaggatgtcttccttctggatggatacattttcactggtttatctgatgaattaaagcaacagattattattgttgcatctgggagacaggacatagcagaaaaagctagcaaatttttccatggtctatacaaaaccatttattttgctgaaggtgaattctgcactagcagaaaaattaggatggtgaatgatttgctggagggcattcattttgttgcgtctattgaagcaatgtatcttggtgttcgagctgggattcatccaacaattatttatgacataatatcgaatgctgctgggagctcgaggatatttgtggagttagttccaaaacttctgagtgaagatcctttgctgattgattttctaaaatcaacaaggaaaaaagcaagccatgtgatggatatgtcaaaatcagtaacatttccactgccacttctgggtgttgcctatcaacaattggtacatggttcatcagcagtaactggagatggatctgcctcaccgctgaagcagcgaagcggattggcttcattggtcttggagctatgggctttggaatggcatctcatttgctgaaatcagggttctgtgttgttgcttatgatgtctacaagccaacaatggccaggtttgctgatttgggtggatcaacaaaaggttctcctgaggaaatagcaaaagatgtggaaatacttattatcatggttgcaaatgagtctcaagctgatagtgttctttttggaaacgctggtgctgtaccagttttatctgctggaacatctgtcatcctttcttctacagtttctcctggatttgtgatccacctcaacagaagattagaagctgaatgccgacagataaagttggttgatgctccagtatctggtggtgtcaaaagggcggcggatgggacactaactataatgacttcagggacagatgaagccctccattgcactggttctgttctatcagcgctgagtgaaaagttgtatgtaatcaaaggaggatgtggagctgcaagttctgttaagatggtcaaccaacttcttgctggggttcatatagcttcagcagctgaagccatgtcatttgctgctcgactaaatttgagaacgagaagagtcttcgaaattatgcaacatgcaaggggttattcatggatgtttggaaatcgtgtgccacacatgctcgataatgattatacaccctattctgcagtggatatatttgtcaaggatcttggtatagtatcttgtgaaagttccaattcgaggatcccagttcacgtctctagtatagcccaccagctgtttatttcaggatctgcttctgggtggggtagatatgacgatgctgccgttgtgaaggtctatgagacattaactggtgtaaaagttgaagggaaggctccgatgctcagtaaagaagatgttcttcagtctcttccatctgaatggccagaagatccaattgataatcttgtacctattgcatctcatagtagcaaaaagtttcttgtagttttagatgatgatccaactgggactcaaacagttcatgatatagaagttttaactgaatggcctgttgaagcccttgttgaacagttcctcaagctaccaacttgcttttttattttgacaaactctcgttccatgactgctgataaggccatgctgctagtacaaactatctgtaaaaatcttaaagctgcggcagagaaggtccctggtgttagttatacaatagtcttgagaggtgattcaactctacgtggtcatttcccagaggaagctgacgctgctgtctccgtattaggtgagatggatgcttggataatctgtccattttttcttcaaggtgggagatacactattaacgacatccactacgtcgcagactctgatagattaattcctgctggtgaaaccgaatttgccaaggatgcagtttttggctataaatcttccaatctcagacagtgggttgaagagaagaccaaaggacgggttttggagaaccaagtttcaacaatttccataactctcttgcgtaaacaaggaccaactgctgtttgtgagcatctctgtagcttggagaagggctctgtgtgcatcgtcaatgctgctagtgacagggacatggctgtctttgcttctggaatgatccaggctgaattgaaaggaaagcgatttctctgccgcacagctgcaagttttgtgagcgcaaggattgggatcaagccaaagccacctatctgtccaaatgaccttggcttaaaaagagctttaactggaggcctcataattgttggttcatatgtgccaaaaactacaaagcaggttgatgagttgcgatcacagttcgggcaatctcttcgagtcatagaggtgtctgtcgagatggtttcaatgaaatcaatggaggacagagaccaagaaatcagacgaattgttgaactagggaatgcttatatacaatccagaaaagacactctaattctcaccagccgccaactcattactggaaaaactcctgaagaaagcttagaaattaattataaagtgagttcagcactagtggagattgtgagaaggattgatagtaaacctcattatatcattgcaaagggaggaatcacttcatctgatattgctacaaaggcgctggaagctaaacgtgccaaagtcatgggacaagcattagctggtgtacccttgtggcagcttggtcctgagagtagatttcctggggtcccttacattgtttttcctggtaatgttggtgataacagtgctcttgctaaagtggtgaaaagttgggcttccccatctagaagttctacaaaagaaattcttcttaatgcggagaagggcggttatgctgttggtgctttcaatgtgtataaccttgagggaattgaagctgttgttgcagcagcagaggctgaaaagagtcctgctattcttcagattcatccgagtgctctaaagcaaggtggagtcccactggtagcatgttgcattgctgctgcagaacaatccagtgtgcctatcagtgtccactatgaccacggcatttccaagtcagacttgcttcaagctcttgaagcgggatttgattcagtcatggtggatggttctcatctaactttaggggataacatcttatacacaaagagcatatcttccttggctcatgcaaaaggtttacttgtggaagctgagttgggtaggctctcaggctctgaagatggcatgaccgttgaagaatatgaagcaagatttactgatgttgcccaggctgaggaatttattgatgagacaagcattgatgctctagcagtttgcattggaaatgttcatggaaaatatccacctagtggaccaaaccttaaattcgacttgctaaaggaccttcgtgcattaacattaaagaaaggagttagcttggtcctccatggagcatctggtctatctcatgagctcgtaaaggagtgcatagacttgggcgtgagaaaattcaatgtgaacaccgaggttcggaacagctacctggcgtccctcagaaagccagaaaaggacttgattcaggtgatggcgtctgctaaagaggcaatgaaagctgttgtagcagagaagctgcgcctgtttggatcgtgtgggaaagcctgagcgaagtacttgcgttgcgccggcaacatgcagtacaagaccgactgcatcatcgggttcgtgatgctgctgctactgtgcagttgcttacagttacagctcattgcgttgaacagctgaagtggttattgtactttgcagtgtagcgcaactaaggctaattcataaatcgtaataatgtatgtatgctgccccgctgtaaaaatgctccgtcgttaataaatgccatcgcgcttgctgtgcctttgtttacatttttattcgcctctcgagtgttctaacatgcaatctcagttgtcctatttagccctagtttgaaaactcaaatctcctctaagattggagggcatttctctctaatcttgtagaggatttgagtcttcaaactct

SEQ ID NO: 62221 - DNA, 4685 bp, Zea Mays
cacttcgcttctcactcgatctgctttgctctgctctcggtctcggctgcttgcctgcttcgagtcgtcgccggcgggagcagagaacccacccgcacggtgcgatgtcgttgaccgcggcccccgtggccttcatcggcctggacgagctcagcgttgagctagctgcctccttcctccgctccggcgcttgcgtccgctccttcacccccgaggcggaacggtcgccttctgcggcgctcgcggagttgaatggcctcctccagtgcgcgagcccagtggaagccgcgcgagatgctgcgctggtcgtcgtgctaagcgatgctggtggggttgacgagttgttcttcggggttgaggggatcgcgaaagggttatgcgcgggttctattgtattgattcattcgacattgctgcctagtcagttggagaagctggagcaggagcttacagatcagaagaaggatgtcttccttctggatggatacattttcactggtttatctgatgaattaaagcaacagattattattgttgcatctgggagacaggacatagcagaaaaagctagcaaatttttccatggtctatacaaaaccatttattttgctgaaggtgaattctgcactagcagaaaaattaggatggtgaatgatttgctggagggcattcattttgttgcgtctattgaagcaatgtatcttggtgttcgagctgggattcatccaacaattatttatgacataatatcgaatgctgctgggagctcgaggatatttgtggagttagttccaaaacttctgagtgaagatcctttgctgattgattttctaaaatcaacaaggaaaaaagcaagccatgtgatggatatgtcaaaatcagtaacatttccactgccacttctgggtgttgcctatcaacaattggtacatggttcatcagcagtaactggagatggatctgcctcaccgctgaaggtttgggaagcatcgtttggagtaaatattgtagatgctgctggcgaacaaatttatgatgcaagcaaattagctgatcagcttgttgcggaatctaaagcagcgaagcggattggcttcattggtcttggagctatgggctttggaatggcatctcatttgctgaaatcagggttctgtgttgttgcttatgatgtctacaagccaacaatggccaggtttgctgatttgggtggatcaacaaaaggttctcctgaggaaatagcaaaagatgtggaaatacttattatcatggttgcaaatgagtctcaagctgatagtgttctttttggaaacgctggtgctgtaccagttttatctgctggaacatctgtcatcctttcttctacagtttctcctggatttgtgatccacctcaacagaagattagaagctgaatgccgacagataaagttggttgatgctccagtatctggtggtgtcaaaagggcggcggatgggacactaactataatgacttcagggacagatgaagccctccattgcactggttctgttctatcagcgctgagtgaaaagttgtatgtaatcaaaggaggatgtggagctgcaagttctgttaagatggtcaaccaacttcttgctggggttcatatagcttcagcagctgaagccatgtcatttgctgctcgactaaatttgagaacgagaagagtcttcgaaattatgcaacatgcaaggggttattcatggatgtttggaaatcgtgtgccacacatgctcgataatgattatacaccctattctgcagtggatatatttgtcaaggatcttggtatagtatcttgtgaaagttccaattcgaggatcccagttcacgtctctagtatagcccaccagctgtttatttcaggatctgcttctgggtggggtagatatgacgatgctgccgttgtgaaggtctatgagacattaactggtgtaaaagttgaagggaaggctccgatgctcagtaaagaagatgttcttcagtctcttccatctgaatggccagaagatccaattgataatcttgtacctattgcatctcatagtagcaaaaagtttcttgtagttttagatgatgatccaactgggactcaaacagttcatgatatagaagttttaactgaatggcctgttgaagcccttgttgaacagttcctcaagctaccaacttgcttttttattttgacaaactctcgttccatgactgctgataaggccatgctgctagtacaaactatctgtaaaaatcttaaagctgcggcagagaaggtccctggtgttagttatacaatagtcttgagaggtgattcaactctacgtggtcatttcccagaggaagctgacgctgctgtctccgtattaggtgagatggatgcttggataatctgtccattttttcttcaaggtgggagatacactattaacgacatccactacgtcgcagactctgatagattaattcctgctggtgaaaccgaatttgccaaggatgcagtttttggctataaatcttccaatctcagacagtgggttgaagagaagaccaaaggacgggttttggagaaccaagtttcaacaatttccataactctcttgcgtaaacaaggaccaactgctgtttgtgagcatctctgtagcttggagaagggctctgtgtgcatcgtcaatgctgctagtgacagggacatggctgtctttgcttctggaatgatccaggctgaattgaaaggaaagcgatttctctgccgcacagctgcaagttttgtgagcgcaaggattgggatcaagccaaagccacctatctgtccaaatgaccttggcttaaaaagagctttaactggaggcctcataattgttggttcatatgtgccaaaaactacaaagcaggttgatgagttgcgatcacagttcgggcaatctcttcgagtcatagaggtgtctgtcgagatggtttcaatgaaatcaatggaggacagagaccaagaaatcagacgaattgttgaactagggaatgcttatatacaatccagaaaagacactctaattctcaccagccgccaactcattactggaaaaactcctgaagaaagcttagaaattaattataaagtgagttcagcactagtggagattgtgagaaggattgatagtaaacctcattatatcattgcaaagggaggaatcacttcatctgatattgctacaaaggcgctggaagctaaacgtgccaaagtcatgggacaagcattagctggtgtacccttgtggcagcttggtcctgagagtagatttcctggggtcccttacattgtttttcctggtaatgttggtgataacagtgctcttgctaaagtggtgaaaagttgggcttccccatctagaagttctacaaaagaaattcttcttaatgcggagaagggcggttatgctgttggtgctttcaatgtgtataaccttgagggaattgaagctgttgttgcagcagcagaggctgaaaagagtcctgctattcttcagattcatccgagtgctctaaagcaaggtggagtcccactggtagcatgttgcattgctgctgcagaacaatccagtgtgcctatcagtgtccactatgaccacggcatttccaagtcagacttgcttcaagctcttgaagcgggatttgattcagtcatggtggatggttctcatctaactttaggggataacatcttatacacaaagagcatatcttccttggctcatgcaaaaggtttacttgtggaagctgagttgggtaggctctcaggctctgaagatggcatgaccgttgaagaatatgaagcaagatttactgatgttgcccaggctgaggaatttattgatgagacaagcattgatgctctagcagtttgcattggaaatgttcatggaaaatatccacctagtggaccaaaccttaaattcgacttgctaaaggaccttcgtgcattaacattaaagaaaggagttagcttggtcctccatggagcatctggtctatctcatgagctcgtaaagcctgcaaacaagccatgagtggtagatttaaagctctagtacaatgttgaggagtgcatagacttgggcgtgagaaaattcaatgtgaacaccgaggttcggaacagctacctggcgtccctcagaaagccagaaaaggacttgattcaggtgatggcgtctgctaaagaggcaatgaaagctgttgtagcagagaagctgcgcctgtttggatcgtgtgggaaagcctgagcgaagtacttgcgttgcgccggcaacatgcagtacaagaccgactgcatcatcgggttcgtgatgctgctgctactgtgcagttgcttacagttacagctcattgcgttgaacagctgaagtggttattgtactttgcagtgtagcgcaactaaggctaattcataaatcgtaataatgtatgtatgctgccccgctgtaaaaatgctccgtcgttaataaatgccatcgcgcttgctgtgcctttgtttacatttttattcgcctctcgagtgttctaacatgcaatctcagttgtcctatttagccctagtttgaaaactcaaatctcctctaagattggagggcatttctctctaatcttgtagaggatttgagtcttcaaactct

SEQ ID NO: 62222 - DNA, 4568 bp, Zea Mays
cacttcgcttctcactcgatctgctttgctctgctctcggtctcggctgcttgcctgcttcgagtcgtcgccggcgggagcagagaacccacccgcacggtgcgatgtcgttgaccgcggcccccgtggccttcatcggcctggacgagctcagcgttgagctagctgcctccttcctccgctccggcgcttgcgtccgctccttcacccccgaggcggaacggtcgccttctgcggcgctcgcggagttgaatggcctcctccagtgcgcgagcccagtggaagccgcgcgagatgctgcgctggtcgtcgtgctaagcgatgctggtggggttgacgagttgttcttcggggttgaggggatcgcgaaagggttatgcgcgggttctattgtattgattcattcgacattgctgcctagtcagttggagaagctggagcaggagcttacagatcagaagaaggatgtcttccttctggatggatacattttcactggtttatctgatgaattaaagcaacagattattattgttgcatctgggagacaggacatagcagaaaaagctagcaaatttttccatggtctatacaaaaccatttattttgctgaaggtgaattctgcactagcagaaaaattaggatggtgaatgatttgctggagggcattcattttgttgcgtctattgaagcaatgtatcttggtgttcgagctgggattcatccaacaattatttatgacataatatcgaatgctgctgggagctcgaggatatttgtggagttagttccaaaacttctgagtgaagatcctttgctgattgattttctaaaatcaacaaggaaaaaagcaagccatgtgatggatatgtcaaaatcagtaacatttccactgccacttctgggtgttgcctatcaacaattggtacatggttcatcagcagtaactggagatggatctgcctcaccgctgaaggtttgggaagcatcgtttggagtaaatattgtagatgctgctggcgaacaaatttatgatgcaagcaaattagctgatcagcttgttgcggaatctaaagcagcgaagcggattggcttcattggtcttggagctatgggctttggaatggcatctcatttgctgaaatcagggttctgtgttgttgcttatgatgtctacaagccaacaatggccaggtttgctgatttgggtggatcaacaaaaggttctcctgaggaaatagcaaaagatgtggaaatacttattatcatggttgcaaatgagtctcaagctgatagtgttctttttggaaacgctggtgctgtaccagttttatctgctggaacatctgtcatcctttcttctacagtttctcctggatttgtgatccacctcaacagaagattagaagctgaatgccgacagataaagttggttgatgctccagtatctggtggtgtcaaaagggcggcggatgggacactaactataatgacttcagggacagatgaagccctccattgcactggttctgttctatcagcgctgagtgaaaagttgtatgtaatcaaaggaggatgtggagctgcaagttctgttaagatggtcaaccaacttcttgctggggttcatatagcttcagcagctgaagccatgtcatttgctgctcgactaaatttgagaacgagaagagtcttcgaaattatgcaacatgcaaggggttattcatggatgtttggaaatcgtgtgccacacatgctcgataatgattatacaccctattctgcagtggatatatttgtcaaggatcttggtatagtatcttgtgaaagttccaattcgaggatcccagttcacgtctctagtatagcccaccagctgtttatttcaggatctgcttctgggtggggtagatatgacgatgctgccgttgtgaaggtctatgagacattaactggtgtaaaagttgaagggaaggctccgatgctcagtaaagaagatgttcttcagtctcttccatctgaatggccagaagatccaattgataatcttgtacctattgcatctcatagtagcaaaaagtttcttgtagttttagatgatgatccaactgggactcaaacagttcatgatatagaagttttaactgaatggcctgttgaagcccttgttgaacagttcctcaagctaccaacttgcttttttattttgacaaactctcgttccatgactgctgataaggccatgctgctagtacaaactatctgtaaaaatcttaaagctgcggcagagaaggtccctggtgttagttatacaatagtcttgagaggtgattcaactctacgtggtcatttcccagaggaagctgacgctgctgtctccgtattaggtgagatggatgcttggataatctgtccattttttcttcaaggtgggagatacactattaacgacatccactacgtcgcagactctgatagattaattcctgctggtgaaaccgaatttgccaaggatgcagtttttggctataaatcttccaatctcagacagtgggttgaagagaagaccaaaggacgggttttggagaaccaagtttcaacaatttccataactctcttgcgtaaacaaggaccaactgctgtttgtgagcatctctgtagcttggagaagggctctgtgtgcatcgtcaatgctgctagtgacagggacatggctgtctttgcttctggaatgatccaggctgaattgaaaggaaagcgatttctctgccgcacagctgcaagttttgtgagcgcaaggattgggatcaagccaaagccacctatctgtccaaatgaccttggcttaaaaagagctttaactggaggcctcataattgttggttcatatgtgccaaaaactacaaagcaggttgatgagttgcgatcacagttcgggcaatctcttcgagtcatagaggtgtctgtcgagatggtttcaatgaaatcaatggaggacagagaccaagaaatcagacgaattgttgaactagggaatgcttatatacaatccagaaaagacactctaattctcaccagccgccaactcattactggaaaaactcctgaagaaagcttagaaattaattataaagtgagttcagcactagtggagattgtgagaaggattgatagtaaacctcattatatcattgcaaagggaggaatcacttcatctgatattgctacaaaggcgctggaagctaaacgtgccaaagtcatgggacaagcattagctggtgtacccttgtggcagcttggtcctgagagtagatttcctggggtcccttacattgtttttcctggtaatgttggtgataacagtgctcttgctaaagtggtgaaaagttgggcttccccatctagaagttctacaaaagaaattcttcttaatgcggagaagggcggttatgctgttggtgctttcaatgtgtataaccttgagggaattgaagctgttgttgcagcagcagaggctgaaaagagtcctgctattcttcagattcatccgagtgctctaaagcaaggtggagtcccactggtagcatgttgcattgctgctgcagaacaatccagtggatttgattcagtcatggtggatggttctcatctaactttaggggataacatcttatacacaaagagcatatcttccttggctcatgcaaaaggtttacttgtggaagctgagttgggtaggctctcaggctctgaagatggcatgaccgttgaagaatatgaagcaagatttactgatgttgcccaggctgaggaatttattgatgagacaagcattgatgctctagcagtttgcattggaaatgttcatggaaaatatccacctagtggaccaaaccttaaattcgacttgctaaaggaccttcgtgcattaacattaaagaaaggagttagcttggtcctccatggagcatctggtctatctcatgagctcgtaaaggagtgcatagacttgggcgtgagaaaattcaatgtgaacaccgaggttcggaacagctacctggcgtccctcagaaagccagaaaaggacttgattcaggtgatggcgtctgctaaagaggcaatgaaagctgttgtagcagagaagctgcgcctgtttggatcgtgtgggaaagcctgagcgaagtacttgcgttgcgccggcaacatgcagtacaagaccgactgcatcatcgggttcgtgatgctgctgctactgtgcagttgcttacagttacagctcattgcgttgaacagctgaagtggttattgtactttgcagtgtagcgcaactaaggctaattcataaatcgtaataatgtatgtatgctgccccgctgtaaaaatgctccgtcgttaataaatgccatcgcgcttgctgtgcctttgtttacatttttattcgcctctcgagtgttctaacatgcaatctcagttgtcctatttagccctagtttgaaaactcaaatctcctctaagattggagggcatttctctctaatcttgtagaggatttgagtcttcaaactct

SEQ ID NO: 62223 - DNA, 4346 bp, Zea Mays
cacttcgcttctcactcgatctgctttgctctgctctcggtctcggctgcttgcctgcttcgagtcgtcgccggcgggagcagagaacccacccgcacggtgcgatgtcgttgaccgcggcccccgtggccttcatcggcctggacgagctcagcgttgagctagctgcctccttcctccgctccggcgcttgcgtccgctccttcacccccgaggcggaacggtcgccttctgcggcgctcgcggagttgaatggcctcctccagtgcgcgagcccagtggaagccgcgcgagatgctgcgctggtcgtcgtgctaagcgatgctggtggggttgacgagttgttcttcggggttgaggggatcgcgaaagggttatgcgcgggttctattgtattgattcattcgacattgctgcctagtcagttggagaagctggagcaggagcttacagatcagaagaaggatgtcttccttctggatggatacattttcactggtttatctgatgaattaaagcaacagattattattgttgcatctgggagacaggacatagcagaaaaagctagcaaatttttccatggtctatacaaaaccatttattttgctgaaggtgaattctgcactagcagaaaaattaggatggtgaatgatttgctggagggcattcattttgttgcgtctattgaagcaatgtatcttggtgttcgagctgggattcatccaacaattatttatgacataatatcgaatgctgctgggagctcgaggatatttgtggagttagttccaaaacttctgagtgaagatcctttgctgattgattttctaaaatcaacaaggaaaaaagcaagccatgtgatggatatgtcaaaatcagtaacatttccactgccacttctgggtgttgcctatcaacaattggtacatggttcatcagcagtaactggagatggatctgcctcaccgctgaaggtttgggaagcatcgtttggagtaaatattgtagatgctgctggcgaacaaatttatgatgcaagcaaattagctgatcagcttgttgcggaatctaaagcagcgaagcggattggcttcattggtcttggagctatgggctttggaatggcatctcatttgctgaaatcagggttctgtgttgttgcttatgatgtctacaagccaacaatggccaggtttgctgatttgggtggatcaacaaaaggttctcctgaggaaatagcaaaagatgtggaaatacttattatcatggttgcaaatgagtctcaagctgatagtgttctttttggaaacgctggtgctgtaccagttttatctgctggaacatctgtcatcctttcttctacagtttctcctggatttgtgatccacctcaacagaagattagaagctgaatgccgacagataaagttggttgatgctccagtatctggtggtgtcaaaagggcggcggatgggacactaactataatgacttcagggacagatgaagccctccattgcactggttctgttctatcagcgctgagtgaaaagttgtatgtaatcaaaggaggatgtggagctgcaagttctgttaagatggtcaaccaacttcttgctggggttcatatagcttcagcagctgaagccatgtcatttgctgctcgactaaatttgagaacgagaagagtcttcgaaattatgcaacatgcaaggggttattcatggatgtttggaaatcgtgtgccacacatgctcgataatgattatacaccctattctgcagtggatatatttgtcaaggatcttggtatagtatcttgtgaaagttccaattcgaggatcccagttcacgtctctagtatagcccaccagctgtttatttcaggatctgcttctgggtggggtagatatgacgatgctgccgttgtgaaggtctatgagacattaactggtgtaaaagttgaagggaaggctccgatgctcagtaaagaagatgttcttcagtctcttccatctgaatggccagaagatccaattgataatcttgtacctattgcatctcatagtagcaaaaagtttcttgtagttttagatgatgatccaactgggactcaaacagttcatgatatagaagttttaactgaatggcctgttgaagcccttgttgaacagttcctcaagctaccaacttgcttttttattttgacaaactctcgttccatgactgctgataaggccatgctgctagtacaaactatctgtaaaaatcttaaagctgcggcagagaaggtccctggtgttagttatacaatagtcttgagaggtgattcaactctacgtggtcatttcccagaggaagctgacgctgctgtctccgtattaggtgagatggatgcttggataatctgtccattttttcttcaaggtgggagatacactattaacgacatccactacgtcgcagactctgatagattaattcctgctggtgaaaccgaatttgccaaggatgcagtttttggctataaatcttccaatctcagacagtgggttgaagagaagaccaaaggacgggttttggagaaccaagtttcaacaatttccataactctcttgcgtaaacaaggaccaactgctgtttgtgagcatctctgtagcttggagaaggtgtctgtcgagatggtttcaatgaaatcaatggaggacagagaccaagaaatcagacgaattgttgaactagggaatgcttatatacaatccagaaaagacactctaattctcaccagccgccaactcattactggaaaaactcctgaagaaagcttagaaattaattataaagtgagttcagcactagtggagattgtgagaaggattgatagtaaacctcattatatcattgcaaagggaggaatcacttcatctgatattgctacaaaggcgctggaagctaaacgtgccaaagtcatgggacaagcattagctggtgtacccttgtggcagcttggtcctgagagtagatttcctggggtcccttacattgtttttcctggtaatgttggtgataacagtgctcttgctaaagtggtgaaaagttgggcttccccatctagaagttctacaaaagaaattcttcttaatgcggagaagggcggttatgctgttggtgctttcaatgtgtataaccttgagggaattgaagctgttgttgcagcagcagaggctgaaaagagtcctgctattcttcagattcatccgagtgctctaaagcaaggtggagtcccactggtagcatgttgcattgctgctgcagaacaatccagtgtgcctatcagtgtccactatgaccacggcatttccaagtcagacttgcttcaagctcttgaagcgggatttgattcagtcatggtggatggttctcatctaactttaggggataacatcttatacacaaagagcatatcttccttggctcatgcaaaaggtttacttgtggaagctgagttgggtaggctctcaggctctgaagatggcatgaccgttgaagaatatgaagcaagatttactgatgttgcccaggctgaggaatttattgatgagacaagcattgatgctctagcagtttgcattggaaatgttcatggaaaatatccacctagtggaccaaaccttaaattcgacttgctaaaggaccttcgtgcattaacattaaagaaaggagttagcttggtcctccatggagcatctggtctatctcatgagctcgtaaaggagtgcatagacttgggcgtgagaaaattcaatgtgaacaccgaggttcggaacagctacctggcgtccctcagaaagccagaaaaggacttgattcaggtgatggcgtctgctaaagaggcaatgaaagctgttgtagcagagaagctgcgcctgtttggatcgtgtgggaaagcctgagcgaagtacttgcgttgcgccggcaacatgcagtacaagaccgactgcatcatcgggttcgtgatgctgctgctactgtgcagttgcttacagttacagctcattgcgttgaacagctgaagtggttattgtactttgcagtgtagcgcaactaaggctaattcataaatcgtaataatgtatgtatgctgccccgctgtaaaaatgctccgtcgttaataaatgccatcgcgcttgctgtgcctttgtttacatttttattcgcctctcgagtgttctaacatgcaatctcagttgtcctatttagccctagtttgaaaactcaaatctcctctaagattggagggcatttctctctaatcttgtagaggatttgagtcttcaaactct

SEQ ID NO: 62224 - DNA, 4282 bp, Zea Mays
cgcacttcgcttctcactcgatctgctttgctctgctctcggtctcggctgcttgcctgcttcgagtcgtcgccggcgggagcagagaacccacccgcacggtgcgatgtcgttgaccgcggcccccgtggccttcatcggcctggacgagctcagcgttgagctagctgcctccttcctccgctccggcgcttgcgtccgctccttcacccccgaggcggaacggtcgccttctgcggcgctcgcggagttgaatggcctcctccagtgcgcgagcccagtggaagccgcgcgagatgctgcgctggtcgtcgtgctaagcgatgctggtggggttgacgagttgttcttcggggttgaggggatcgcgaaagggttatgcgcgggttctattgtattgattcattcgacattgctgcctagtcagttggagaagctggagcaggagcttacagatcagaagaaggatgtcttccttctggatggatacattttcactggtttatctgatgaattaaagcaacagattattattgttgcatctgggagacaggacatagcagaaaaagctagcaaatttttccatggtctatacaaaaccatttattttgctgaaggtgaattctgcactagcagaaaaattaggatggtgaatgatttgctggagggcattcattttgttgcgtctattgaagcaatgtatcttggtgttcgagctgggattcatccaacaattatttatgacataatatcgaatgctgctgggagctcgaggatatttgtggagttagttccaaaacttctgagtgaagatcctttgctgattgattttctaaaatcaacaaggaaaaaagcaagccatgtgatggatatgtcaaaatcagtaacatttccactgccacttctgggtgttgcctatcaacaattggtacatggttcatcagcagtaactggagatggatctgcctcaccgctgaaggtttgggaagcatcgtttggagtaaatattgtagatgctgctggcgaacaaatttatgatgcaagcaaattagctgatcagcttgttgcggaatctaaagcagcgaagcggattggcttcattggtcttggagctatgggctttggaatggcatctcatttgctgaaatcagggttctgtgttgttgcttatgatgtctacaagccaacaatggccaggtttgctgatttgggtggatcaacaaaaggttctcctgaggaaatagcaaaagatgtggaaatacttattatcatggttgcaaatgagtctcaagctgatagtgttctttttggaaacgctggtgctgtaccagttttatctgctggaacatctgtcatcctttcttctacagtttctcctggatttgtgatccacctcaacagaagattagaagctgaatgccgacagataaagttggttgatgctccagtatctggtggtgtcaaaagggcggcggatgggacactaactataatgacttcagggacagatgaagccctccattgcactggttctgttctatcagcgctgagtgaaaagttgtatgtaatcaaaggaggatgtggagctgcaagttctgttaagatggtcaaccaacttcttgctggggttcatatagcttcagcagctgaagccatgtcatttgctgctcgactaaatttgagaacgagaagagtcttcgaaattatgcaacatgcaaggggttattcatggatgtttggaaatcgtgtgccacacatgctcgataatgattatacaccctattctgcagtggatatatttgtcaaggatcttggtatagtatcttgtgaaagttccaattcgaggatcccagttcacgtctctagtatagcccaccagctgtttatttcaggatctgcttctgggtggggtagatatgacgatgctgccgttgtgaaggtctatgagacattaactggtgtaaaagttgaagggaaggctccgatgctcagtaaagaagatgttcttcagtctcttccatctgaatggccagaagatccaattgataatcttgtacctattgcatctcatagtagcaaaaagtttcttgtagttttagatgatgatccaactgggactcaaacagttcatgatatagaagttttaactgaatggcctgttgaagcccttgttgaacagttcctcaagctaccaacttgcttttttattttgacaaactctcgttccatgactgctgataaggccatgctgctagtacaaactatctgtaaaaatcttaaagctgcggcagagaaggtccctggtgttagttatacaatagtcttgagaggtgattcaactctacgtggtcatttcccagaggaagctgacgctgctgtctccgtattaggtgagatggatgcttggataatctgtccattttttcttcaaggtgggagatacactattaacgacatccactacgtcgcagactctgatagattaattcctgctggtgaaaccgaatttgccaaggatgcagtttttggctataaatcttccaatctcagacagtgggttgaagagaagaccaaaggacgggttttggagaaccaagtttcaacaatttccataactctcttgcgtaaacaaggaccaactgctgtttgtgagcatctctgtagcttggagaaggtgtctgtcgagatggtttcaatgaaatcaatggaggacagagaccaagaaatcagacgaattgttgaactagggaatgcttatatacaatccagaaaagacactctaattctcaccagccgccaactcattactggaaaaactcctgaagaaagcttagaaattaattataaagtgagttcagcactagtggagattgtgagaaggattgatagtaaacctcattatatcattgcaaagggaggaatcacttcatctgatattgctacaaaggcgctggaagctaaacgtgccaaagtcatgggacaagcattagctggtgtacccttgtggcagcttggtcctgagagtagatttcctggggtcccttacattgtttttcctggtaatgttggtgataacagtgctcttgctaaagtggtgaaaagttgggcttccccatctagaagttctacaaaagaaattcttcttaatgcggagaagggcggttatgctgttggtgctttcaatgtgtataaccttgagggaattgaagctgttgttgcagcagcagaggctgaaaagagtcctgctattcttcagattcatccgagtgctctaaagcaaggtggagtcccactggtagcatgttgcattgctgctgcagaacaatccagtggatttgattcagtcatggtggatggttctcatctaactttaggggataacatcttatacacaaagagcatatcttccttggctcatgcaaaaggtttacttgtggaagctgagttgggtaggctctcaggctctgaagatggcatgaccgttgaagaatatgaagcaagatttactgatgttgcccaggctgaggaatttattgatgagacaagcattgatgctctagcagtttgcattggaaatgttcatggaaaatatccacctagtggaccaaaccttaaattcgacttgctaaaggaccttcgtgcattaacattaaagaaaggagttagcttggtcctccatggagcatctggtctatctcatgagctcgtaaaggagtgcatagacttgggcgtgagaaaattcaatgtgaacaccgaggttcggaacagctacctggcgtccctcagaaagccagaaaaggacttgattcaggtgatggcgtctgctaaagaggcaatgaaagctgttgtagcagagaagctgcgcctgtttggatcgtgtgggaaagcctgagcgaagtacttgcgttgcgccggcaacatgcagtacaagaccgactgcatcatcgggttcgtgatgctgctgctactgtgcagttgcttacagttacagctcattgcgttgaacagctgaagtggttattgtactttgcagtgtagcgcaactaaggctaattcataaatcgtaataatgtatgtatgctgccccgctgtaaaaatgctccgtcgttaataaatgccatcgcgcttgctgtgcctttgtttacatttttattcgcctctcgagtgttctaacatgcaatctcagttgtcctatttagccctagtttgaaaactcaaatctcctctaagattggagggcatttctctctaatcttgtagaggatttgagtcttcaaactct

SEQ ID NO: 62225 - DNA, 4728 bp, Zea Mays
gtctggcagactggcccttggcaaaggtcccacctgccagtggcacggacaacccgagaaaaatccaccaacattggcaattctcgtgccggcgcacttcgcttctcactcgatctgctttgctctgctctcggtctcggctgcttgcctgcttcgagtcgtcgccggcgggagcagagaacccacccgcacggtgcgatgtcgttgaccgcggcccccgtggccttcatcggcctggacgagctcagcgttgagctagctgcctccttcctccgctccggcgcttgcgtccgctccttcacccccgaggcggaacggtcgccttctgcggcgctcgcggagttgaatggcctcctccagtgcgcgagcccagtggaagccgcgcgagatgctgcgctggtcgtcgtgctaagcgatgctggtggggttgacgagttgttcttcggggttgaggggatcgcgaaagggttatgcgcgggttctattgtattgattcattcgacattgctgcctagtcagttggagaagctggagcaggagcttacagatcagaagaaggatgtcttccttctggatggatacattttcactggtttatctgatgaattaaagcaacagattattattgttgcatctgggagacaggacatagcagaaaaagctagcaaatttttccatggtctatacaaaaccatttattttgctgaaggtgaattctgcactagcagaaaaattaggatggtgaatgatttgctggagggcattcattttgttgcgtctattgaagcaatgtatcttggtgttcgagctgggattcatccaacaattatttatgacataatatcgaatgctgctgggagctcgaggatatttgtggagttagttccaaaacttctgagtgaagatcctttgctgattgattttctaaaatcaacaaggaaaaaagcaagccatgtgatggatatgtcaaaatcagtaacatttccactgccacttctgggtgttgcctatcaacaattggtacatggttcatcagcagtaactggagatggatctgcctcaccgctgaaggtttgggaagcatcgtttggagtaaatattgtagatgctgctggcgaacaaatttatgatgcaagcaaattagctgatcagcttgttgcggaatctaaagcagcgaagcggattggcttcattggtcttggagctatgggctttggaatggcatctcatttgctgaaatcagggttctgtgttgttgcttatgatgtctacaagccaacaatggccaggtttgctgatttgggtggatcaacaaaaggttctcctgaggaaatagcaaaagatgtggaaatacttattatcatggttgcaaatgagtctcaagctgatagtgttctttttggaaacgctggtgctgtaccagttttatctgctggaacatctgtcatcctttcttctacagtttctcctggatttgtgatccacctcaacagaagattagaagctgaatgccgacagataaagttggttgatgctccagtatctggtggtgtcaaaagggcggcggatgggacactaactataatgacttcagggacagatgaagccctccattgcactggttctgttctatcagcgctgagtgaaaagttgtatgtaatcaaaggaggatgtggagctgcaagttctgttaagatggtcaaccaacttcttgctggggttcatatagcttcagcagctgaagccatgtcatttgctgctcgactaaatttgagaacgagaagagtcttcgaaattatgcaacatgcaaggggttattcatggatgtttggaaatcgtgtgccacacatgctcgataatgattatacaccctattctgcagtggatatatttgtcaaggatcttggtatagtatcttgtgaaagttccaattcgaggatcccagttcacgtctctagtatagcccaccagctgtttatttcaggatctgcttctgggtggggtagatatgacgatgctgccgttgtgaaggtctatgagacattaactggtgtaaaagttgaagggaaggctccgatgctcagtaaagaagatgttcttcagtctcttccatctgaatggccagaagatccaattgataatcttgtacctattgcatctcatagtagcaaaaagtttcttgtagttttagatgatgatccaactgggactcaaacagttcatgatatagaagttttaactgaatggcctgttgaagcccttgttgaacagttcctcaagctaccaacttgcttttttattttgacaaactctcgttccatgactgctgataaggccatgctgctagtacaaactatctgtaaaaatcttaaagctgcggcagagaaggtccctggtgttagttatacaatagtcttgagaggtgattcaactctacgtggtcatttcccagaggaagctgacgctgctgtctccgtattaggtgagatggatgcttggataatctgtccattttttcttcaaggtgggagatacactattaacgacatccactacgtcgcagactctgatagattaattcctgctggtgaaaccgaatttgccaaggatgcagtttttggctataaatcttccaatctcagacagtgggttgaagagaagaccaaaggacgggttttggagaaccaagtttcaacaatttccataactctcttgcgtaaacaaggaccaactgctgtttgtgagcatctctgtagcttggagaagggctctgtgtgcatcgtcaatgctgctagtgacagggacatggctgtctttgcttctggaatgatccaggctgaattgaaaggaaagcgatttctctgccgcacagctgcaagttttgtgagcgcaaggattgggatcaagccaaagccacctatctgtccaaatgaccttggcttaaaaagagctttaactggaggcctcataattgttggttcatatgtgccaaaaactacaaagcaggttgatgagttgcgatcacagttcgggcaatctcttcgagtcatagaggtgtctgtcgagatggtttcaatgaaatcaatggaggacagagaccaagaaatcagacgaattgttgaactagggaatgcttatatacaatccagaaaagacactctaattctcaccagccgccaactcattactggaaaaactcctgaagaaagcttagaaattaattataaagtgagttcagcactagtggagattgtgagaaggattgatagtaaacctcattatatcattgcaaagggaggaatcacttcatctgatattgctacaaaggcgctggaagctaaacgtgccaaagtcatgggacaagcattagctggtgtacccttgtggcagcttggtcctgagagtagatttcctggggtcccttacattgtttttcctggtaatgttggtgataacagtgctcttgctaaagtggtgaaaagttgggcttccccatctagaagttctacaaaagaaattcttcttaatgcggagaagggcggttatgctgttggtgctttcaatgtgtataaccttgagggaattgaagctgttgttgcagcagcagaggctgaaaagagtcctgctattcttcagattcatccgagtgctctaaagcaaggtggagtcccactggtagcatgttgcattgctgctgcagaacaatccagtgtgcctatcagtgtccactatgaccacggcatttccaagtcagacttgcttcaagctcttgaagcgggatttgattcagtcatggtggatggttctcatctaactttaggggataacatcttatacacaaagagcatatcttccttggctcatgcaaaaggtttacttgtggaagctgagttgggtaggctctcaggctctgaagatggcatgaccgttgaagaatatgaagcaagatttactgatgttgcccaggctgaggaatttattgatgagacaagcattgatgctctagcagtttgcattggaaatgttcatggaaaatatccacctagtggaccaaaccttaaattcgacttgctaaaggaccttcgtgcattaacattaaagaaaggagttagcttggtcctccatggagcatctggtctatctcatgagctcgtaaaggagtgcatagacttgggcgtgagaaaattcaatgtgaacaccgaggttcggaacagctacctggcgtccctcagaaagccagaaaaggacttgattcaggtgatggcgtctgctaaagaggcaatgaaagctgttgtagcagagaagctgcgcctgtttggatcgtgtgggaaagcctgagcgaagtacttgcgttgcgccggcaacatgcagtacaagaccgactgcatcatcgggttcgtgatgctgctgctactgtgcagttgcttacagttacagctcattgcgttgaacagctgaagtggttattgtactttgcagtgtagcgcaactaaggctaattcataaatcgtaataatgtatgtatgctgccccgctgtaaaaatgctccgtcgttaataaatgccatcgcgcttgctgtgcctttgtttacatttttattcgcctctcgagtgttctaacatgcaatctcagttgtcctatttagccctagtttgaaaactcaaatctcctctaagattggagggcatttctctctaatcttgtagaggatttgagtcttcaaactct

SEQ ID NO: 62226 - DNA, 2392 bp, Zea Mays
cgtggtaaaagtgcgctctgtttctcatcgtcaagaagaaaagacagaaagaaagcaagaaaacaaggccaaaaggagcctacgatgaatccatcgtcaacgaagcgtcaatggcagccagccacgtgggccgccgccccagcgagcaggctccccccacctcccctcgccctctataaatgcgagcctggcactgcgccgccgagcttacctggaacagagacaggcaggcagcaggccttcatcgcagagaggacagcagcacctgagattgacggcggggcagcgcgcgggcccttcccttcggagcactcagcgtgagagatggggaggcagccgtgctgcgacaaggttggcgtgaagaagggcccgtggacggcggaggaggaccagaagctcgtcggcttcctcctcacccacggtcactgctgctggcgcgtcgtccccaagctcgcagggttgctgaggtgcgggaagagctgcaggctgcggtggaccaactacctgaggccggacctcaagaggggcctgctctccgacgacgaggagaggctcgtcatcgacctgcacgcgcagctcgggaacaggtggtccaagatcgcggcgcagctaccgggcaggacggacaacgagatcaagaaccactggaacacacacatccgcaagaagctcgtccggatggggatcgaccccgtcacccacctgccgttgcaggaaccgccggctcctgctcctgctcccgccgagcagcaggagcagagccacaggcagcaagaagaactgcaactgcaagagctgcagaacggccgcgagcttatcatgcaggagggcgcgggggaagacgatatcacgccgatgatccagccgcacgagatcatgccgacggcggcagcggcaagcaactgcggctctgtttcctctgcccacgccggctccgcgtccgtggtctcgccgtcctgctcctcctcggcggtgtccggcgtggagtggccggagcccatgtacctgctcggcatggatggcatcatggacgccgactggggcagcctcttccccgacactggcgctggcggcggcggcggcggcttcgacttgggcgtcgatccgttcgaccagtacccgggcggtggcttcgaccaagaagacgaccacagaatatgacatcggcctagcaatgcacatagattcgccgcttctccttccatctcgctcagcacatcagcgccgtagcctccatgttttcttaatagctctccagggtccagtgctgataaacaagaactgacaaattcgggtgcggaaacatgactgttcagctgacgtgacgcgtctgattcatcagctatctagttcgtcggcagtccccaccccagagctatgctgtgactgtgcgtcaggacatgaggtgcttgtgtcagcttccgacttctcatgcggcggtgctccaggctttctccggccggctgatggtgccggttgtcgccacgcaccatacgtggcgagcggcagctcgcgtcgccgcttctttgaccgctagtacagtaccccgttacacgcatgcatgccaagatcgtgcttcatttccagttaatccgcggttgcagtcaacctcgatatctcccgactcccgtctactgcctgtcacttgctttcagccataaatttattgcgtaaagttttcatcagcaagatcaacatcctgttttcatagcattaattagggtgccaagtagccaaatcactaaagtgcctgataaccacatatataaatttaaatgtgcatatcatgaataatgagtataaatagtaggcttttcgctgtacttaatgtaacacccactttgtaataatatgaatagagaaaacaatttctccttaggacagtttaatctttatgcatcatcttatgtgaacatcatgcccaaaaacaattaataaaaacatatactaccaaattatgcatcatgctcgattttattctgtgtgcattttgtgacaacatataataacgtgaaaaatgttaaatatccaaatgggaaattaaatcctaaaagaaattcttgaatctagaaaagaaaaggaatatgaaaacatgaaatatttgaataaatattctcaaacctaatacttttaattgcacaaatatggtttgagaatgaattagtcacaagtttgaatttaaattaggatttaaatttgaatttgtgtaataatggagaaagaagaaaaaaaagaaaagaaaataggaaatatataaaaaaagaaaaagagtataaccctaattgggccaccaggcgccaattcggcccaaccccgaatcacacccgcgcggcccagacttctctgccactgccacagcggacccacatgtcatccctctccccgagcgccg

SEQ ID NO: 62227 - DNA, 734 bp, Zea Mays
gtcttccagatcgacaaaaggtgaagagtccctcaactcatcatgcacactctaaagccgtgcagctggtcagtttgttgtgtcacagggctttgaacgagttttaccagatgagatgcccatgaccatgagaaaacaaagcaaagccaaaggccaggtggtattaccacatcgccatccgtcacagtaccaccataaccaactgtcctgcctataaaccctttaacttcgcttccgcctccctccctccctccaccacgacacacctcgccttccccacgcaccgggccaggtggtataatcaatggacctcgacgccgacatgatcccgacctccccctccgccgactcctcgccctcctcctccgacctcgacaccgagtgtgccgccagtaggaagcaggcgtcggcggctcccagctcggcgagcggcgacacctgcccagcagcggcgcaggcacgcaaaaggcgttggggttgggccgtcggtcgctcactcactccacgcctcgcctcccagcaaggtagtccagctccgcagctccatggctcctccgctcctgcagacccgcgccggtgcgctgccagcaaaggttgaagccttgaaggaagcgaggaaccgaagggcagccaccaagccacagaagacagagcgttgggcggctcgttcaatgggcctgatgcgtaatgggtcgtgcgttagggtacagacgaggtctgaaatgtggatttga

SEQ ID NO: 62228 - DNA, 357 bp, Zea Mays
atggcctgcacgtaccccgccgcgccggcgcggtacgagccctcgccggcgccgggtgccgcggcggccacgagcgcgccgagcgccgcgtcgcgcatggccaccacgcccgtgtcgccccccgcgctctcgccgccgccgcacttcttgaacagcaccgtcgtgtcctgcctccccaggaacgagtcgttcccgtaccgcacgaagcaggcgcgcagctgcaccgcggcgcccgccgccgcgttgcacagcgaggacagcttggagacggccgacctcacgcagccgccgcacaccgccgcggggaggtcggaccggcactggtacacgcccaccagctgccccggcgaggtgtag

SEQ ID NO: 62229 - DNA, 1816 bp, Zea Mays
gaacccgggaccttccggttacagacggtaggctctaccgctgcaccaggcccgcccttcagaaataaactagaggaaggacagatttaaattgactgctatgtgctggcccatacagtctgtcatcgtaacataagccttatatagtatcttgccaacatgcagccgccttgctccctttggccttgtcttctctttcttctctcagacaaactcccttttgtgatctctgttttgttggagaactgctaatttgtagtctgcttgaacaaatctcatacctatcacacctatctgccgcttgtggaggatagcccttcgtgtcgagcatcttggcaacaacaaccttttcctctcccccttctcttctctcacatcttcgccaatacacatcacatttgtactatgatatattattgactcaatttggccctgacccttgaatggggatgatggcccagggtcatgggacatggcttcaaccaatcggaccttatccctgttaatatgcgaaagggcctctagctgagttggttaggtggtctgagtagcactcctcaggtcctgagttcgactcctcgtgagagcgaatctcaggttgtggctaaaaaaaatcccctcgtctgtcccacaccaaagcacaggtctaagcctcagccctcggtcctggtcggtcgttctcacatgtgctacaatacggtgtcgctatgtatgaggtcatcttaatataatgctcggggttgtcttacccctgcagggttcggctgaggtgatattcaccaggagaagtgaagctctcgcagcactgaagcgatataataatatgcgccttgatgggaaggccatgaagattgaagtaataggagcagaattgggtctatcagctgctgccgtaccccagattagtgttgttcctggtgcaagcagaagagggcagagagaagttgttatgatgcctggtggaagtgggtttggacaaggtgcatctggcccatctagttcgcttcctgggtggaagcgtggaggctttgttcgaagaggacaagggcgtgttagttttcctcaaagagggcgagggcaagtgcgcagccgtggccgtggccgtggccgcagtagctttgttcagagccgtggacgtggctatgtgcgcaggggtaatgcagagaaatcagccaaacaattggacaatgaacttgacaactacaactctggtgcgatgaatgtcgactaagttaatccatcgtgacatcattcaatccaacctggaagttggaactatgttgaagctaagcttgttttctgtcggtattctgtcaaatgtgcacacttctgtcatgctctagtggcatcagttgaagattagatattccattattcctactgcaatagtcttgtgatatcagaatttgctgtaattgaatgatgaattatgttttcaaccgttgaaaggtttgctgtcaaaatttcaatattatcctagttattgtcagaattttcagtaggcattagccaaaaagattggtgctgactactggtatatcagaatttgctgtaattgaatgatgaattatgttttcaaccgttgaaaggtttggtgtcacaatttccatattatcctagttattgtcagaattttcagtaggcattagccaaaaagtttggtgctgactacaggttgaggtgctcttcaaaaaaatcctaatgtacctagaggtgacaatgagctttaaattttgggaacatattcggtgcacccaagccttggtgcgtatatgatacacatgaattaataaagttcataaaaaatctaaaaaaa

SEQ ID NO: 62230 - DNA, 2055 bp, Zea Mays
aattttgcgcctatatcaatctgggttttgttcctaactttttagcttcaatttttgtcttgaatggcaacacctctggatgttccactggatgatttgattaagagcagagctgggaggggaacaggaagaggcaggggacaaggagggggtcgaggcagaggtgatggccaaaggttggctcgtggttcgtggcgtgggcgtggtactggcaacttccgtgaaaggggacttggggtgtcttcgcggaggccacttggtgttaatacttggtcctcatcatttgctattgccaaggcaagcacacaactataactgtttttctgttaccttcgagaatccaaattgcagtaggtacctgatgagaagtggctataaacttattaaaatggcacagcccaactgttccattcagaccatatctgtgaccatttaactgtggagcttcaaagaggatccaatggctttttcattgagacctgtctcttctctgccgagtatgtagggtggtgaggcatatgttggtttgtgctggctattgcttcaaagttcaaactgataactttgtctctactcgtgagcaagctgatggactacttaataatctgtggataaggccttttcatgtatacagaaatagcaccattatgtggaatggtatagggttttatgattttgctgatgctagttgcttcatcaagtactgtggattgatgagttttgagattttatgctaatacttgctcgtcacaacatcgacatgcatgatatggaatattacagtcattcaataaagcaaaggattttgtgtggagacatgatctctttgaggatagcatggtagcagctgggctttctgggatagaatctggaacaaagctttacatttcaaatttgcactatggagtgacaagtgaagatctacaggagcttttttcagaaatgggtcatttgaagcactgtgctgttcattatgacagttatagacacccaactggttcggctgaggtgatattcaccaggagaagtgaagctctcgcagcactgaagcgatataataatatgcgccttgatgggaaggccatgaagattgaagtaataggagcagaattgggtctatcagctgctgccgtaccccagattagtgttgttcctggtgcaagcagaagagggcagagagaagttgttatgatgcctggtggaagtgggtttggacaaggtgcatctggcccatctagttcgcttcctgggtggaagcgtggaggctttgttcgaagaggacaagggcgtgttagttttcctcaaagagggcgagggcaagtgcgcagccgtggccgtggccgtggccgcagtagctttgttcagagccgtggacgtggctatgtgcgcaggggtaatgcagagaaatcagccaaacaattggacaatgaacttgacaactacaactctggtgcgatgaatgtcgactaagttaatccatcgtgacatcattcaatccaacctggaagttggaactatgttgaagctaagcttgttttctgtcggtattctgtcaaatgtgcacacttctgtcatgctctagtggcatcagttgaagattagatattccattattcctactgcaatagtcttgtgatatcagaatttgctgtaattgaatgatgaattatgttttcaaccgttgaaaggtttgctgtcaaaatttcaatattatcctagttattgtcagaattttcagtaggcattagccaaaaagattggtgctgactactggtatatcagaatttgctgtaattgaatgatgaattatgttttcaaccgttgaaaggtttggtgtcacaatttccatattatcctagttattgtcagaattttcagtaggcattagccaaaaagtttggtgctgactacaggttgaggtgctcttcaaaaaaatcctaatgtacctagaggtgacaatgagctttaaattttgggaacatattcggtgcacccaagccttggtgcgtatatgatacacatgaattaataaagttcataaaaaatctaaaaaaa

SEQ ID NO: 62231 - DNA, 1709 bp, Zea Mays
attagggaatgcgtagatgcactgttgatgaagtgcgaactgaggtggtagttagctctgctaacttaaatattatcttatactaccagtccatactatcccataataccggtcccttcgaaatctaattgaagagcacttgcagttactaattggcagattgggttttgttcctaactttttagcttcaatttttgtcttgaatggcaacacctctggatgttccactggatgatttgattaagagcagagctgggaggggaacaggaagaggcaggggacaaggagggggtcgaggcagaggtgatggccaaaggttggctcgtggttcgtggcgtgggcgtggtactggcaacttccgtgaaaggggacttggggtgtcttcgcggaggccacttggtgttaatacttggtcctcatcatttgctattgccaagtcattcaataaagcaaaggattttgtgtggagacatgatctctttgaggatagcatggtagcagctgggctttctgggatagaatctggaacaaagctttacatttcaaatttgcactatggagtgacaagtgaagatctacaggagcttttttcagaaatgggtcatttgaagcactgtgctgttcattatgacagttatagacacccaactggttcggctgaggtgatattcaccaggagaagtgaagctctcgcagcactgaagcgatataataatatgcgccttgatgggaaggccatgaagattgaagtaataggagcagaattgggtctatcagctgctgccgtaccccagattagtgttgttcctggtgcaagcagaagagggcagagagaagttgttatgatgcctggtggaagtgggtttggacaaggtgcatctggcccatctagttcgcttcctgggtggaagcgtggaggctttgttcgaagaggacaagggcgtgttagttttcctcaaagagggcgagggcaagtgcgcagccgtggccgtggccgtggccgcagtagctttgttcagagccgtggacgtggctatgtgcgcaggggtaatgcagagaaatcagccaaacaattggacaatgaacttgacaactacaactctggtgcgatgaatgtcgactaagttaatccatcgtgacatcattcaatccaacctggaagttggaactatgttgaagctaagcttgttttctgtcggtattctgtcaaatgtgcacacttctgtcatgctctagtggcatcagttgaagattagatattccattattcctactgcaatagtcttgtgatatcagaatttgctgtaattgaatgatgaattatgttttcaaccgttgaaaggtttgctgtcaaaatttcaatattatcctagttattgtcagaattttcagtaggcattagccaaaaagattggtgctgactactggtatatcagaatttgctgtaattgaatgatgaattatgttttcaaccgttgaaaggtttggtgtcacaatttccatattatcctagttattgtcagaattttcagtaggcattagccaaaaagtttggtgctgactacaggttgaggtgctcttcaaaaaaatcctaatgtacctagaggtgacaatgagctttaaattttgggaacatattcggtgcacccaagccttggtgcgtatatgatacacatgaattaataaagttcataaaaaatctaaaaaaa

SEQ ID NO: 62232 - DNA, 2212 bp, Zea Mays
agaacccaatccgctggccccgccagcccgcccacagaaaagccgttctcccctctttctcgattcgacgaggggaagactcgtcgagccgccggccagcccatctcggcgcattcccggagaatccctccggaaaccggtcgatcctgggtcatccaacacacagcacttcgcttctcccgcgtccccgacccgcgcgcaagccctcatgcggttagggctgtaacgatctcgtctcgctaccggcggccggctgcggaacgggccaccccacgcgctcctctgagttcgttcgactaatctaccgctgactgtactttgggctgtcgccaccagaaagccctcacgagtcctttgcctcctcactccgtcaggctcgtcgccacagggttttgttcctaactttttagcttcaatttttgtcttgaatggcaacacctctggatgttccactggatgatttgattaagagcagagctgggaggggaacaggaagaggcaggggacaaggagggggtcgaggcagaggtgatggccaaaggttggctcgtggttcgtggcgtgggcgtggtactggcaacttccgtgaaaggggacttggggtgtcttcgcggaggccacttggtgttaatacttggtcctcatcatttgctattgccaagggtggtgaggcatatgttggtttgtgctggctattgcttcaaagttcaaactgataactttgtctctactcgtgagcaagctgatggactacttaataatctgtggataaggccttttcatgtatacagaaatagcaccattatgtggaatggtatagggttttatgattttgctgatgctagttgcttcatcaagtactgtggattgatgagttttgagattttatgctaatacttgctcgtcacaacatcgacatgcatgatatggaatattacagtcattcaataaagcaaaggattttgtgtggagacatgatctctttgaggatagcatggtagcagctgggctttctgggatagaatctggaacaaagctttacatttcaaatttgcactatggagtgacaagtgaagatctacaggagcttttttcagaaatgggtcatttgaagcactgtgctgttcattatgacagttatagacacccaactggttcggctgaggtgatattcaccaggagaagtgaagctctcgcagcactgaagcgatataataatatgcgccttgatgggaaggccatgaagattgaagtaataggagcagaattgggtctatcagctgctgccgtaccccagattagtgttgttcctggtgcaagcagaagagggcagagagaagttgttatgatgcctggtggaagtgggtttggacaaggtgcatctggcccatctagttcgcttcctgggtggaagcgtggaggctttgttcgaagaggacaagggcgtgttagttttcctcaaagagggcgagggcaagtgcgcagccgtggccgtggccgtggccgcagtagctttgttcagagccgtggacgtggctatgtgcgcaggggtaatgcagagaaatcagccaaacaattggacaatgaacttgacaactacaactctggtgcgatgaatgtcgactaagttaatccatcgtgacatcattcaatccaacctggaagttggaactatgttgaagctaagcttgttttctgtcggtattctgtcaaatgtgcacacttctgtcatgctctagtggcatcagttgaagattagatattccattattcctactgcaatagtcttgtgatatcagaatttgctgtaattgaatgatgaattatgttttcaaccgttgaaaggtttgctgtcaaaatttcaatattatcctagttattgtcagaattttcagtaggcattagccaaaaagattggtgctgactactggtatatcagaatttgctgtaattgaatgatgaattatgttttcaaccgttgaaaggtttggtgtcacaatttccatattatcctagttattgtcagaattttcagtaggcattagccaaaaagtttggtgctgactacaggttgaggtgctcttcaaaaaaatcctaatgtacctagaggtgacaatgagctttaaattttgggaacatattcggtgcacccaagccttggtgcgtatatgatacacatgaattaataaagttcataaaaaatctaaaaaaa

SEQ ID NO: 62233 - DNA, 2446 bp, Zea Mays
aaacggaaaacgacgcagcagcgaaaagaacccaatccgctggccccgccagcccgcccacagaaaagccgttctcccctctttctcgattcgacgaggggaagactcgtcgagccgccggccagcccatctcggcgcattcccggagaatccctccggaaaccggtcgatcctgggtcatccaacacacagcacttcgcttctcccgcgtccccgacccgcgcgcaagccctcatgcggttagggctgtaacgatctcgtctcgctaccggcggccggctgcggaacgggccaccccacgcgctcctctgagttcgttcgactaatctaccgctgactgtactttgggctgtcgccaccagaaagccctcacgagtcctttgcctcctcactccgtcaggctcgtcgccacagggttttgttcctaactttttagcttcaatttttgtcttgaatggcaacacctctggatgttccactggatgatttgattaagagcagagctgggaggggaacaggaagaggcaggggacaaggagggggtcgaggcagaggtgatggccaaaggttggctcgtggttcgtggcgtgggcgtggtactggcaacttccgtgaaaggggacttggggtgtcttcgcggaggccacttggtgttaatacttggtcctcatcatttgctattgccaaggcaagcacacaactataactgtttttctgttaccttcgagaatccaaattgcagtaggtacctgatgagaagtggctataaacttattaaaatggcacagcccaactgttccattcagaccatatctgtgaccatttaactgtggagcttcaaagaggatccaatggctttttcattgagacctgtctcttctctgccgagtatgtagggtggtgaggcatatgttggtttgtgctggctattgcttcaaagttcaaactgataactttgtctctactcgtgagcaagctgatggactacttaataatctgtggataaggccttttcatgtatacagaaatagcaccattatgtggaatggtatagggttttatgattttgctgatgctagttgcttcatcaagtactgtggattgatgagttttgagattttatgctaatacttgctcgtcacaacatcgacatgcatgatatggaatattacagtcattcaataaagcaaaggattttgtgtggagacatgatctctttgaggatagcatggtagcagctgggctttctgggatagaatctggaacaaagctttacatttcaaatttgcactatggagtgacaagtgaagatctacaggagcttttttcagaaatgggtcatttgaagcactgtgctgttcattatgacagttatagacacccaactggttcggctgaggtgatattcaccaggagaagtgaagctctcgcagcactgaagcgatataataatatgcgccttgatgggaaggccatgaagattgaagtaataggagcagaattgggtctatcagctgctgccgtaccccagattagtgttgttcctggtgcaagcagaagagggcagagagaagttgttatgatgcctggtggaagtgggtttggacaaggtgcatctggcccatctagttcgcttcctgggtggaagcgtggaggctttgttcgaagaggacaagggcgtgttagttttcctcaaagagggcgagggcaagtgcgcagccgtggccgtggccgtggccgcagtagctttgttcagagccgtggacgtggctatgtgcgcaggggtaatgcagagaaatcagccaaacaattggacaatgaacttgacaactacaactctggtgcgatgaatgtcgactaagttaatccatcgtgacatcattcaatccaacctggaagttggaactatgttgaagctaagcttgttttctgtcggtattctgtcaaatgtgcacacttctgtcatgctctagtggcatcagttgaagattagatattccattattcctactgcaatagtcttgtgatatcagaatttgctgtaattgaatgatgaattatgttttcaaccgttgaaaggtttgctgtcaaaatttcaatattatcctagttattgtcagaattttcagtaggcattagccaaaaagattggtgctgactactggtatatcagaatttgctgtaattgaatgatgaattatgttttcaaccgttgaaaggtttggtgtcacaatttccatattatcctagttattgtcagaattttcagtaggcattagccaaaaagtttggtgctgactacaggttgaggtgctcttcaaaaaaatcctaatgtacctagaggtgacaatgagctttaaattttgggaacatattcggtgcacccaagccttggtgcgtatatgatacacatgaattaataaagttcataaaaaatctaaaaaaa

SEQ ID NO: 62234 - DNA, 2158 bp, Zea Mays
ttctcccttctctctttcctctctcccatgctcttgggctctcagccatgcggaaaggagctctgccgtccgcccggttccttctctcctttctgcccggtgccctggtcaaagatatagactctgttactctagaagatgcaattgagcttttgcaatatcccaaaatcctgggaaaacatcctgaagatgataatcttgtacttataacacattctaaggttggatacaacatcaagcacaggagatttattgctcaagtgccaaagaacatggacccaaagaagatgacacttgagcgtgcactcaagcttctgagtagtaaaagtgtcagacggattggtcgtctaaaggggaaggtcgaaaagaaggaacccattgaatggcattagctgagcctgcctgcactcgtgtgtgcaaaaaaaaaaaaaaaattcagagagaagtcaacattcatagcatgcagaggttcagcctttcgtgtgtttaactgcttatgatgagagcggagaagggggccccatgtgtgacaaagaacaagtgccaagggaatgcacaaccagacatattcgggtcatatctttgatttcatatttttcctttagtcatcaacatcataagctgcattgaacgcgcggacacagaataccagactataaaattctgagcttaacaaagatgagagggtggtttcatcacctattttacataatcgctgcatttcctaattactttcacattttgtactagagataaatgcatcttttaccacaggaaacccattttagttgtgaccgtcgtgtaggttatgtactcatgtgtaagaattgtatatgctacttcacagctgaaattccatctgttttgcactccttttttttaatttgttttcaccggttgatcccgaataacggctagtcttagtaatgctgtcgcgggaatttttttttttacttttgaatacctttacgaacatcgtaagtttttcaccattcaaccgattggatccacttttaaatgtctttagttcagtagcactacttagttttgtctatgaaaaaatgtctcaccaataagtactggagagatgtaaaagtaaaactgagctgtggtataggtactagaagacgtccacgttctttcactcatgcatagcatagcctgttggtcaaagtaaatatcagacagagtaaaatacatccagacagcaaacttcaatttcagacattcctgttctagctcctggttcgttgacacactaaagcacacgttcacctctccattctcggtcacgcagagacctcagcgccaccacacgctcgccatccacctactcatacctgtagatgaagtcggagttgccgaccatggcattgagcacctgcgagacgaggaagccgctgccggcgatgacggccacgatgagcagcgccgtgacggggttcttgagcagctccactatgggctgcagcaccgtgtacgccacccctgtgctcaccgtcacaacgtacagcgcgtaccgccgcatgttgtcccagaactcctccaccagggggccctctggccccagcgccagggcggggcctggccccgcggacagggccagcgccacggtcacgcccaccgtgatgccgccgaggagcgcccacgtcggcagagcgcacgtcctgccgccgccgccggcctcgttattattgcccgctgcagcgagctcttgacgcaagtggctctcctcctccctagctgctgcgatgctttcgtgaggcgctatggcaaggaggcgttttgcgtgctgctgcggggttggtggttcacaggaggagagcccagctcggacgacggcggtgaggccatggccgcgtccgggagacagccgatgtaggtggtggaggagagagagctggttcatcttgtgcaggcgccgtcgcttggtggttgttttttgtgataaggcttctccaaccatccatctctccctatacgtactttatactctttttattaccttcctccccccaccccccaaactttcacttctccaaccgttcaacctagcaatttcatatcgccattaaccgggaccacgccgctggacacgcgaggatcatggcggactacttcagcgataacccggtctacagtgattggcagttccgac

SEQ ID NO: 62235 - DNA, 2317 bp, Zea Mays
tgtacttttaagttgttctgaaggaaccttgagattcaaagttagtaggtacggtgaaggctattttgtaggttgtgatcgacatccaaaatgcaagtacattgctcgctcactgtcacagcaagaagatgaaactgaacccatagaagaaaatgcaaaatcttttgaacccaggttacttggtgtcatgcctgattctgatcaaaaggtgtttttgaaacaagggccatatggctactatgttcaagttggagaggacaaaaaaggtcaaagatatagactctgttactctagaagatgcaattgagcttttgcaatatcccaaaatcctgggaaaacatcctgaagatgataatcttgtacttataacacattctaaggttggatacaacatcaagcacaggagatttattgctcaagtgccaaagaacatggacccaaagaagatgacacttgagcgtgcactcaagcttctgagtagtaaaagtgtcagacggattggtcgtctaaaggggaaggtcgaaaagaaggaacccattgaatggcattagctgagcctgcctgcactcgtgtgtgcaaaaaaaaaaaaaaaattcagagagaagtcaacattcatagcatgcagaggttcagcctttcgtgtgtttaactgcttatgatgagagcggagaagggggccccatgtgtgacaaagaacaagtgccaagggaatgcacaaccagacatattcgggtcatatctttgatttcatatttttcctttagtcatcaacatcataagctgcattgaacgcgcggacacagaataccagactataaaattctgagcttaacaaagatgagagggtggtttcatcacctattttacataatcgctgcatttcctaattactttcacattttgtactagagataaatgcatcttttaccacaggaaacccattttagttgtgaccgtcgtgtaggttatgtactcatgtgtaagaattgtatatgctacttcacagctgaaattccatctgttttgcactccttttttttaatttgttttcaccggttgatcccgaataacggctagtcttagtaatgctgtcgcgggaatttttttttttacttttgaatacctttacgaacatcgtaagtttttcaccattcaaccgattggatccacttttaaatgtctttagttcagtagcactacttagttttgtctatgaaaaaatgtctcaccaataagtactggagagatgtaaaagtaaaactgagctgtggtataggtactagaagacgtccacgttctttcactcatgcatagcatagcctgttggtcaaagtaaatatcagacagagtaaaatacatccagacagcaaacttcaatttcagacattcctgttctagctcctggttcgttgacacactaaagcacacgttcacctctccattctcggtcacgcagagacctcagcgccaccacacgctcgccatccacctactcatacctgtagatgaagtcggagttgccgaccatggcattgagcacctgcgagacgaggaagccgctgccggcgatgacggccacgatgagcagcgccgtgacggggttcttgagcagctccactatgggctgcagcaccgtgtacgccacccctgtgctcaccgtcacaacgtacagcgcgtaccgccgcatgttgtcccagaactcctccaccagggggccctctggccccagcgccagggcggggcctggccccgcggacagggccagcgccacggtcacgcccaccgtgatgccgccgaggagcgcccacgtcggcagagcgcacgtcctgccgccgccgccggcctcgttattattgcccgctgcagcgagctcttgacgcaagtggctctcctcctccctagctgctgcgatgctttcgtgaggcgctatggcaaggaggcgttttgcgtgctgctgcggggttggtggttcacaggaggagagcccagctcggacgacggcggtgaggccatggccgcgtccgggagacagccgatgtaggtggtggaggagagagagctggttcatcttgtgcaggcgccgtcgcttggtggttgttttttgtgataaggcttctccaaccatccatctctccctatacgtactttatactctttttattaccttcctccccccaccccccaaactttcacttctccaaccgttcaacctagcaatttcatatcgccattaaccgggaccacgccgctggacacgcgaggatcatggcggactacttcagcgataacccggtctacagtgattggcagttccgac

SEQ ID NO: 62236 - DNA, 2597 bp, Zea Mays
gttaaaccaatatgaggattcaggaaatcagcatctcaatggacattgctagataatgtctctgctgggtcaactgaatggaagggtcttctgaaagactactgggaacgattcagcaaatattgtgcagatgtgagtaaactggatggcagaaaggtagagagaatgcttgaagaaaaatttggtcctatcctcttttccgatgtttacaaggattgtagaatttgccctaggtaatggacgacaaatgtacttttaagttgttctgaaggaaccttgagattcaaagttagtaggtacggtgaaggctattttgtaggttgtgatcgacatccaaaatgcaagtacattgctcgctcactgtcacagcaagaagatgaaactgaacccatagaagaaaatgcaaaatcttttgaacccaggttacttggtgtcatgcctgattctgatcaaaaggtgtttttgaaacaagggccatatggctactatgttcaagttggagaggacaaaaaaggtctgtttccaaaaagggtttccctttccaaggtcaaagatatagactctgttactctagaagatgcaattgagcttttgcaatatcccaaaatcctgggaaaacatcctgaagatgataatcttgtacttataacacattctaaggttggatacaacatcaagcacaggagatttattgctcaagtgccaaagaacatggacccaaagaagatgacacttgagcgtgcactcaagcttctgagtagtaaaagtgtcagacggattggtcgtctaaaggggaaggtcgaaaagaaggaacccattgaatggcattagctgagcctgcctgcactcgtgtgtgcaaaaaaaaaaaaaaaattcagagagaagtcaacattcatagcatgcagaggttcagcctttcgtgtgtttaactgcttatgatgagagcggagaagggggccccatgtgtgacaaagaacaagtgccaagggaatgcacaaccagacatattcgggtcatatctttgatttcatatttttcctttagtcatcaacatcataagctgcattgaacgcgcggacacagaataccagactataaaattctgagcttaacaaagatgagagggtggtttcatcacctattttacataatcgctgcatttcctaattactttcacattttgtactagagataaatgcatcttttaccacaggaaacccattttagttgtgaccgtcgtgtaggttatgtactcatgtgtaagaattgtatatgctacttcacagctgaaattccatctgttttgcactccttttttttaatttgttttcaccggttgatcccgaataacggctagtcttagtaatgctgtcgcgggaatttttttttttacttttgaatacctttacgaacatcgtaagtttttcaccattcaaccgattggatccacttttaaatgtctttagttcagtagcactacttagttttgtctatgaaaaaatgtctcaccaataagtactggagagatgtaaaagtaaaactgagctgtggtataggtactagaagacgtccacgttctttcactcatgcatagcatagcctgttggtcaaagtaaatatcagacagagtaaaatacatccagacagcaaacttcaatttcagacattcctgttctagctcctggttcgttgacacactaaagcacacgttcacctctccattctcggtcacgcagagacctcagcgccaccacacgctcgccatccacctactcatacctgtagatgaagtcggagttgccgaccatggcattgagcacctgcgagacgaggaagccgctgccggcgatgacggccacgatgagcagcgccgtgacggggttcttgagcagctccactatgggctgcagcaccgtgtacgccacccctgtgctcaccgtcacaacgtacagcgcgtaccgccgcatgttgtcccagaactcctccaccagggggccctctggccccagcgccagggcggggcctggccccgcggacagggccagcgccacggtcacgcccaccgtgatgccgccgaggagcgcccacgtcggcagagcgcacgtcctgccgccgccgccggcctcgttattattgcccgctgcagcgagctcttgacgcaagtggctctcctcctccctagctgctgcgatgctttcgtgaggcgctatggcaaggaggcgttttgcgtgctgctgcggggttggtggttcacaggaggagagcccagctcggacgacggcggtgaggccatggccgcgtccgggagacagccgatgtaggtggtggaggagagagagctggttcatcttgtgcaggcgccgtcgcttggtggttgttttttgtgataaggcttctccaaccatccatctctccctatacgtactttatactctttttattaccttcctccccccaccccccaaactttcacttctccaaccgttcaacctagcaatttcatatcgccattaaccgggaccacgccgctggacacgcgaggatcatggcggactacttcagcgataacccggtctacagtgattggcagttccgac

SEQ ID NO: 62237 - DNA, 2642 bp, Zea Mays
gcgcttctttgttttcagtttatgccatagttttagaaacctgtttaagctgcctggttagtggtcactgctatgggttaaaccaatatgaggattcaggaaatcagcatctcaatggacattgataatgtctctgctgggtcaactgaatggaagggtcttctgaaagactactgggaacgattcagcaaatattgtgcagatgtgagtaaactggatggcagaaaggtagagagaatgcttgaagaaaaatttggtcctatcctcttttccgatgtttacaaggattgtagaatttgccctagttgttctgaaggaaccttgagattcaaagttagtaggtacggtgaaggctattttgtaggttgtgatcgacatccaaaatgcaagtacattgctcgctcactgtcacagcaagaagatgaaactgaacccatagaagaaaatgcaaaatcttttgaacccaggttacttggtgtcatgcctgattctgatcaaaaggtgtttttgaaacaagggccatatggctactatgttcaagttggagaggacaaaaaaggtctgtttccaaaaagggtttccctttccaaggtcaaagatatagactctgttactctagaagatgcaattgagcttttgcaatatcccaaaatcctgggaaaacatcctgaagatgataatcttgtacttataacacattctaaggttggatacaacatcaagcacaggagatttattgctcaagtgccaaagaacatggacccaaagaagatgacacttgagcgtgcactcaagcttctgagtagtaaaagtgtcagacggattggtcgtctaaaggggaaggtcgaaaagaaggaacccattgaatggcattagctgagcctgcctgcactcgtgtgtgcaaaaaaaaaaaaaaaattcagagagaagtcaacattcatagcatgcagaggttcagcctttcgtgtgtttaactgcttatgatgagagcggagaagggggccccatgtgtgacaaagaacaagtgccaagggaatgcacaaccagacatattcgggtcatatctttgatttcatatttttcctttagtcatcaacatcataagctgcattgaacgcgcggacacagaataccagactataaaattctgagcttaacaaagatgagagggtggtttcatcacctattttacataatcgctgcatttcctaattactttcacattttgtactagagataaatgcatcttttaccacaggaaacccattttagttgtgaccgtcgtgtaggttatgtactcatgtgtaagaattgtatatgctacttcacagctgaaattccatctgttttgcactccttttttttaatttgttttcaccggttgatcccgaataacggctagtcttagtaatgctgtcgcgggaatttttttttttacttttgaatacctttacgaacatcgtaagtttttcaccattcaaccgattggatccacttttaaatgtctttagttcagtagcactacttagttttgtctatgaaaaaatgtctcaccaataagtactggagagatgtaaaagtaaaactgagctgtggtataggtactagaagacgtccacgttctttcactcatgcatagcatagcctgttggtcaaagtaaatatcagacagagtaaaatacatccagacagcaaacttcaatttcagacattcctgttctagctcctggttcgttgacacactaaagcacacgttcacctctccattctcggtcacgcagagacctcagcgccaccacacgctcgccatccacctactcatacctgtagatgaagtcggagttgccgaccatggcattgagcacctgcgagacgaggaagccgctgccggcgatgacggccacgatgagcagcgccgtgacggggttcttgagcagctccactatgggctgcagcaccgtgtacgccacccctgtgctcaccgtcacaacgtacagcgcgtaccgccgcatgttgtcccagaactcctccaccagggggccctctggccccagcgccagggcggggcctggccccgcggacagggccagcgccacggtcacgcccaccgtgatgccgccgaggagcgcccacgtcggcagagcgcacgtcctgccgccgccgccggcctcgttattattgcccgctgcagcgagctcttgacgcaagtggctctcctcctccctagctgctgcgatgctttcgtgaggcgctatggcaaggaggcgttttgcgtgctgctgcggggttggtggttcacaggaggagagcccagctcggacgacggcggtgaggccatggccgcgtccgggagacagccgatgtaggtggtggaggagagagagctggttcatcttgtgcaggcgccgtcgcttggtggttgttttttgtgataaggcttctccaaccatccatctctccctatacgtactttatactctttttattaccttcctccccccaccccccaaactttcacttctccaaccgttcaacctagcaatttcatatcgccattaaccgggaccacgccgctggacacgcgaggatcatggcggactacttcagcgataacccggtctacagtgattggcagttccgac

SEQ ID NO: 62238 - DNA, 4007 bp, Zea Mays
attttttgtcctttttgtgcctttgatgcttctcatctaggaattgttagacatatgttaggctcacacggttgggcccttttgtctgacggcttaggccttttgcctcttgtatatttgctaagatgattagagataggcaatgatatcctcgattgatcctatttctataaaccagcccataggaatacttgcctatatatacgtgtaccctgcacctcctctaatcaatgtgaccattcaagagccatatcttatcttaaaattgtgttagttatgtaaggcttgccttgttttttggtcgtgtatgtaaggttatcgttgggcatggtggttgcacttggctattttggcctttctcataatgcaatggatcggaagtacgtgacagcaaaaagtcgagttctacaccctgagttccgtggtcgaatggtctcggcattccttttgcaccatttctctgaggtttctgattacaactttacagctaacatggagacagaggtttttaaatatttctcagcctatgttttctgtgcgcttctttgttttcagtttatgccatagttttagaaacctgtttaagctgcctggttagtggtcactgctatgggttaaaccaatatgaggattcaggaaatcagcatctcaatggacattggtacacttctaattttgctcatgattattcttggatttaagacattaggaacattgctgtctgtagttgtggagctaattcaagattgttgtcatggacttaatgctttggtctattatccaggcataggccaattttgccttaactattctctatatgcaagtaatttgtccctagtgattctgggtgcgtggatcatctggaagcatataaatagatgtgtctttgagggctttgctcccaaccttgcggttgctcagcaggcagctagggaggggataaatctttgggctatagctggcgccaaagcctttcactgtcatagggtaggtttggctcgtgtggtctctttgacctttatttatttcttcttcttagtatattgaggcgcagttctcctgcgttttcgagaaaaaaatggtctagttggttttctatggaagtgttcttgtacgctttggacttggttcctggtcctctttggaccttctttactctttttaatatattaatacgcagctctcctgcgtattcaataaaaaacttgtaggcgtttttaggttctctttctttgttgcccttgctgaataacgtgactcataagttaatgaaccatcactcccacttcccaccttactatataattgagggaacaagttcatttaacctactttcttaatctttgtgcaccactctagaacaacctacatttgggaaaaatggtagtgatccttttacaagaacatctttcagtaataggctagcacaaaaaatagttggttatactaacactgtgttgaagtttcttttcttttacataatagctagataatgtctctgctgggtcaactgaatggaagggtcttctgaaagactactgggaacgattcagcaaatattgtgcagatgtgagtaaactggatggcagaaaggtagagagaatgcttgaagaaaaatttggtcctatcctcttttccgatgtttacaaggattgtagaatttgccctagttgttctgaaggaaccttgagattcaaagttagtaggtacggtgaaggctattttgtaggttgtgatcgacatccaaaatgcaagtacattgctcgctcactgtcacagcaagaagatgaaactgaacccatagaagaaaatgcaaaatcttttgaacccaggttacttggtgtcatgcctgattctgatcaaaaggtgtttttgaaacaagggccatatggctactatgttcaagttggagaggacaaaaaaggtctgtttccaaaaagggtttccctttccaaggtcaaagatatagactctgttactctagaagatgcaattgagcttttgcaatatcccaaaatcctgggaaaacatcctgaagatgataatcttgtacttataacacattctaaggttggatacaacatcaagcacaggagatttattgctcaagtgccaaagaacatggacccaaagaagatgacacttgagcgtgcactcaagcttctgagtagtaaaagtgtcagacggattggtcgtctaaaggggaaggtcgaaaagaaggaacccattgaatggcattagctgagcctgcctgcactcgtgtgtgcaaaaaaaaaaaaaaaattcagagagaagtcaacattcatagcatgcagaggttcagcctttcgtgtgtttaactgcttatgatgagagcggagaagggggccccatgtgtgacaaagaacaagtgccaagggaatgcacaaccagacatattcgggtcatatctttgatttcatatttttcctttagtcatcaacatcataagctgcattgaacgcgcggacacagaataccagactataaaattctgagcttaacaaagatgagagggtggtttcatcacctattttacataatcgctgcatttcctaattactttcacattttgtactagagataaatgcatcttttaccacaggaaacccattttagttgtgaccgtcgtgtaggttatgtactcatgtgtaagaattgtatatgctacttcacagctgaaattccatctgttttgcactccttttttttaatttgttttcaccggttgatcccgaataacggctagtcttagtaatgctgtcgcgggaatttttttttttacttttgaatacctttacgaacatcgtaagtttttcaccattcaaccgattggatccacttttaaatgtctttagttcagtagcactacttagttttgtctatgaaaaaatgtctcaccaataagtactggagagatgtaaaagtaaaactgagctgtggtataggtactagaagacgtccacgttctttcactcatgcatagcatagcctgttggtcaaagtaaatatcagacagagtaaaatacatccagacagcaaacttcaatttcagacattcctgttctagctcctggttcgttgacacactaaagcacacgttcacctctccattctcggtcacgcagagacctcagcgccaccacacgctcgccatccacctactcatacctgtagatgaagtcggagttgccgaccatggcattgagcacctgcgagacgaggaagccgctgccggcgatgacggccacgatgagcagcgccgtgacggggttcttgagcagctccactatgggctgcagcaccgtgtacgccacccctgtgctcaccgtcacaacgtacagcgcgtaccgccgcatgttgtcccagaactcctccaccagggggccctctggccccagcgccagggcggggcctggccccgcggacagggccagcgccacggtcacgcccaccgtgatgccgccgaggagcgcccacgtcggcagagcgcacgtcctgccgccgccgccggcctcgttattattgcccgctgcagcgagctcttgacgcaagtggctctcctcctccctagctgctgcgatgctttcgtgaggcgctatggcaaggaggcgttttgcgtgctgctgcggggttggtggttcacaggaggagagcccagctcggacgacggcggtgaggccatggccgcgtccgggagacagccgatgtaggtggtggaggagagagagctggttcatcttgtgcaggcgccgtcgcttggtggttgttttttgtgataaggcttctccaaccatccatctctccctatacgtactttatactctttttattaccttcctccccccaccccccaaactttcacttctccaaccgttcaacctagcaatttcatatcgccattaaccgggaccacgccgctggacacgcgaggatcatggcggactacttcagcgataacccggtctacagtgattggcagttccgac

SEQ ID NO: 62239 - DNA, 997 bp, Zea Mays
  misc_feature (996)..(997): n is a, c, g, or t
caggtttcttatttttgttgcagagcagaaaatttaattcttgcatctgatcctgaccgtgaaggtgaagcgattgcttggcacatcaaagaaatgcttgaacaacaaggtgtactgggttttgatgtgactgttgcaagagttgttttccatgaaatatctgaggatgcaataaagaaggctttaatgtccccgaggtatattgacatggacttagtcaatgcttatcttgcacgccgttcccttgattatctaattgggtttggcatatcaccacttctgtggaggaagttgcctggttgccaatcagctggacgggtccaatctgctgctttggcccttgtgtgcgatcgagaagctgaaatagaacagtttaaggcacatgagtactggacagtacagacagacttcaaaatacaatcagcagatccttcaaatgccacatgtattccattctgtataaagcatttgaattcaaaaaagctggatcaactttccataccctctcaagaagaagcgcaagctatagaaaagatgattcattcttctacatttgaagttttaggtgttaaaagaagtaaaattcacaagaatcctccattgccatatattacatccagccttcagcaggatgcagcaaacaaactccattttactgcaggatataccatgaagattgcccaaaacctttatgagggtatcaacctttcctcagaagaaacaactgggttaataacgtacataagaactgatgggttccatatttctgatggagctgtggaggacattcgttcactagttaaagaaagatatggtcagaagtacgtttcggaggacattaggaagtatttaaagaaggtgaaaaatgctcaagaagcccatgaagccattaggcccaccagtataaggaggccgccatattcaagtggatgttggcattcctgaaggagagatgaattttcattccactgcatcaaaactggacttcaagggatnn

SEQ ID NO: 62240 - DNA, 1109 bp, Zea Mays
  misc_feature (1108)..(1109): n is a, c, g, or t
gtttgagtattcaggtttcttatttttgttgcagagcagaaaatttaattcttgcatctgatcctgaccgtgaaggtgaagcgattgcttggcacatcaaagaaatgcttgaacaacaaggtgtactgggttttgatgtgactgttgcaagagttgttttccatgaaatatctgaggatgcaataaagaaggctttaatgtccccgaggtatattgacatggacttagtcaatgcttatcttgcacgccgttcccttgattatctaattgggtttggcatatcaccacttctgtggaggaagttgcctggttgccaatcagctggacgggtccaatctgctgctttggcccttgtgtgcgatcgagaagctgaaatagaacagtttaaggcacatgagtactggacagtacagacagacttcaaaatacaatcagcagatccttcaaatgccacatgtattccattctgtataaagcatttgaattcaaaaaagctggatcaactttccataccctctcaagaagaagcgcaagctatagaaaagatgattcattcttctacatttgaagttttaggtgttaaaagaagtaaaattcacaagaatcctccattgccatatattacatccagccttcagcaggatgcagcaaacaaactccattttactgcaggatataccatgaagattgcccaaaacctttatgagggtatcaacctttcctcagaagaaacaactgggttaataacgtacataagaactgatgggttccatatttctgatggagctgtggaggacattcgttcactagttaaagaaagatatggtcagaagtacgtttcggaggacattaggaagtatttaaagaaggtgaaaaatgctcaagaagcccatgaagccattaggcccaccagtataaggaggccgccatcatcattggttggaatacttgatgatgattctctaaaactgtacactctaatatggaaaaggacaatggcttgccaaatggaagcttccagaactgagatgattcaagtggatgttggcattcctgaaggagagatgaattttcattccactgcatcaaaactggacttcaagggatnn

SEQ ID NO: 62241 - DNA, 2090 bp, Zea Mays
  misc_feature (2089)..(2090): n is a, c, g, or t
ctatttattttcttttcagcttcaattcgaggtgtttcagagatattcttcttcaccctggcccttttcacctttccgcccttgtaaaatgtgtggggttgcatttaggagcaattcaacaaggaaaatatcttcaagaaataattttggggttgccttacagcccaaaagtagtgcctttattactcctcggctctttggcagctatagttctgtatgtttcagagccacagccagctgtggaattgctttaaaggctaataatattggcaattcacgaccattctcaactacatacagtaaaaaaataaggtttcttgttaaaaataagatttcattcagtaatctaaatatgagaaggaaagacggaagtgttgcacatagtttgcttcatagatctgagaaatgccaaagcacattagctacatgtagcaccattgttgatgaggcttcaacatctactagtaacaacagcaagagtgttactgatgctaagactgacactgccaagaggaagagttcaagaggaagcaaaaaggaagttgatggagatatgaaagaaaaggaagtacataccaataaaaagaggatatttgctagaactcgtaaagctgcaacaaagacgtctgataatattagcacgaaccaagaaaacaagaagactgataattgtaaattgaaaaggggtgctgatagtttcaaagagaaaaaagtaaataatagggcaaagtcaaaagcagaggtttctgctgcttcttctgtacctgaaatttgtatgcaatcctctattgatggttcagttattgagaaaaagccactggtgccattgtatcctcccagagccaaatcagttgtggttgtggaatcagccacaaaagcaaaagttattcagaagtaccttggggacatgtatgaagtgttaccaagctatggtcatgtgagagatttagcaggtagatctaaatctgtccgccccgatgatgacttcagcatggtctgggaggtgcctgctgctgcctggacacaccttaagagcattaaagttgcactgcaaaggtgaagcgattgcttggcacatcaaagaaatgcttgaacaacaaggtgtactgggttttgatgtgactgttgcaagagttgttttccatgaaatatctgaggatgcaataaagaaggctttaatgtccccgaggtatattgacatggacttagtcaatgcttatcttgcacgccgttcccttgattatctaattgggtttggcatatcaccacttctgtggaggaagttgcctggttgccaatcagctggacgggtccaatctgctgctttggcccttgtgtgcgatcgagaagctgaaatagaacagtttaaggcacatgagtactggacagtacagacagacttcaaaatacaatcagcagatccttcaaatgccacatgtattccattctgtataaagcatttgaattcaaaaaagctggatcaactttccataccctctcaagaagaagcgcaagctatagaaaagatgattcattcttctacatttgaagttttaggtgttaaaagaagtaaaattcacaagaatcctccattgccatatattacatccagccttcagcaggatgcagcaaacaaactccattttactgcaggatataccatgaagattgcccaaaacctttatgagggtatcaacctttcctcagaagaaacaactgggttaataacgtacataagaactgatgggttccatatttctgatggagctgtggaggacattcgttcactagttaaagaaagatatggtcagaagtacgtttcggaggacattaggaagtatttaaagaaggtgaaaaatgctcaagaagcccatgaagccattaggcccaccagtataaggaggccgccatcatcattggttggaatacttgatgatgattctctaaaactgtacactctaatatggaaaaggacaatggcttgccaaatggaagcttccagaactgagatgattcaagtggatgttggcattcctgaaggagagatgaattttcattccactgcatcaaaactggacttcaagggatnn

SEQ ID NO: 62242 - DNA, 2245 bp, Zea Mays
  misc_feature (2244)..(2245): n is a, c, g, or t
ttccgctgctccttcctcggcaccgccgcctcgcaatccgctcccgcttcgcccgtaaaaccctagctaaaccctagccgaaagaaacaatgtctctcctcccctgagcgcgctcgtggccgccccttgttggccatggctctccagctccgccgcctcctcccgcacggatacgcccagcgacaccgcgccgtcatccacgcgctatcgctgctgccgccgccgcccgcaatgcttcaattcgaggtgtttcagagatattcttcttcaccctggcccttttcacctttccgcccttgtaaaatgtgtggggttgcatttaggagcaattcaacaaggaaaatatcttcaagaaataattttggggttgccttacagcccaaaagtagtgcctttattactcctcggctctttggcagctatagttctgtatgtttcagagccacagccagctgtggaattgctttaaaggctaataatattggcaattcacgaccattctcaactacatacagtaaaaaaataaggtttcttgttaaaaataagatttcattcagtaatctaaatatgagaaggaaagacggaagtgttgcacatagtttgcttcatagatctgagaaatgccaaagcacattagctacatgtagcaccattgttgatgaggcttcaacatctactagtaacaacagcaagagtgttactgatgctaagactgacactgccaagaggaagagttcaagaggaagcaaaaaggaagttgatggagatatgaaagaaaaggaagtacataccaataaaaagaggatatttgctagaactcgtaaagctgcaacaaagacgtctgataatattagcacgaaccaagaaaacaagaagactgataattgtaaattgaaaaggggtgctgatagtttcaaagagaaaaaagtaaataatagggcaaagtcaaaagcagaggtttctgctgcttcttctgtacctgaaatttgtatgcaatcctctattgatggttcagttattgagaaaaagccactggtgccattgtatcctcccagagccaaatcagttgtggttgtggaatcagccacaaaagcaaaagttattcagaagtaccttggggacatgtatgaagtgttaccaagctatggtcatgtgagagatttagcaggtagatctaaatctgtccgccccgatgatgacttcagcatggtctgggaggtgcctgctgctgcctggacacaccttaagagcattaaagttgcactgcaaagagcagaaaatttaattcttgcatctgatcctgaccgtgaaggtgaagcgattgcttggcacatcaaagaaatgcttgaacaacaaggtgtactgggttttgatgtgactgttgcaagagttgttttccatgaaatatctgaggatgcaataaagaaggctttaatgtccccgaggtatattgacatggacttagtcaatgcttatcttgcacgccgttcccttgattatctaattgggtttggcatatcaccacttctgtggaggaagttgcctggttgccaatcagctggacgggtccaatctgctgctttggcccttgtgtgcgatcgagaagctgaaatagaacagtttaaggcacatgagtactggacagtacagacagacttcaaaatacaatcagcagatccttcaaatgccacatgtattccattctgtataaagcatttgaattcaaaaaagctggatcaactttccataccctctcaagaagaagcgcaagctatagaaaagatgattcattcttctacatttgaagttttaggtgttaaaagaagtaaaattcacaagaatcctccattgccatatattacatccagccttcagcaggatgcagcaaacaaactccattttactgcaggatataccatgaagattgcccaaaacctttatgagggtatcaacctttcctcagaagaaacaactgggttaataacgtacataagaactgatgggttccatatttctgatggagctgtggaggacattcgttcactagttaaagaaagatatggtcagaagtacgtttcggaggacattaggaagtatttaaagaaggtgaaaaatgctcaagaagcccatgaagccattaggcccaccagtataaggaggccgccatattcaagtggatgttggcattcctgaaggagagatgaattttcattccactgcatcaaaactggacttcaagggatnn

SEQ ID NO: 62243 - DNA, 1208 bp, Zea Mays
  misc_feature (1207)..(1208): n is a, c, g, or t
ttccgctgctccttcctcggcaccgccgcctcgcaatccgctcccgcttcgcccgtaaaaccctagctaaaccctagccgaaagaaacaatgtctctcctcccctgagcgcgctcgtggccgccccttgttggccatggctctccagctccgccgcctcctcccgcacggatacgcccagcgacaccgcgccgtcatccacgcgctatcgctgctgccgccgccgcccgcaatgagcagaaaatttaattcttgcatctgatcctgaccgtgaaggtgaagcgattgcttggcacatcaaagaaatgcttgaacaacaaggtgtactgggttttgatgtgactgttgcaagagttgttttccatgaaatatctgaggatgcaataaagaaggctttaatgtccccgaggtatattgacatggacttagtcaatgcttatcttgcacgccgttcccttgattatctaattgggtttggcatatcaccacttctgtggaggaagttgcctggttgccaatcagctggacgggtccaatctgctgctttggcccttgtgtgcgatcgagaagctgaaatagaacagtttaaggcacatgagtactggacagtacagacagacttcaaaatacaatcagcagatccttcaaatgccacatgtattccattctgtataaagcatttgaattcaaaaaagctggatcaactttccataccctctcaagaagaagcgcaagctatagaaaagatgattcattcttctacatttgaagttttaggtgttaaaagaagtaaaattcacaagaatcctccattgccatatattacatccagccttcagcaggatgcagcaaacaaactccattttactgcaggatataccatgaagattgcccaaaacctttatgagggtatcaacctttcctcagaagaaacaactgggttaataacgtacataagaactgatgggttccatatttctgatggagctgtggaggacattcgttcactagttaaagaaagatatggtcagaagtacgtttcggaggacattaggaagtatttaaagaaggtgaaaaatgctcaagaagcccatgaagccattaggcccaccagtataaggaggccgccatattcaagtggatgttggcattcctgaaggagagatgaattttcattccactgcatcaaaactggacttcaagggatnn

SEQ ID NO: 62244 - DNA, 2153 bp, Zea Mays
  misc_feature (2152)..(2153): n is a, c, g, or t
tctggttccgctgctccttcctcggcaccgccgcctcgcaatccgctcccgcttcgcccgtaaaaccctagctaaaccctagccgaaagaaacaatgtctctcctcccctgagcgcgctcgtggccgccccttgttggccatggctctccagctccgccgcctcctcccgcacggatacgcccagcgacaccgcgccgtcatccacgcgctatcgctgctgccgccgccgcccgcaatgcttcaattcgaggtgtttcagagatattcttcttcaccctggcccttttcacctttccgcccttgtaaaatgtgtggggttgcatttaggagcaattcaacaaggaaaatatcttcaagaaataattttggggttgccttacagcccaaaagtagtgcctttattactcctcggctctttggcagctatagttctgtatgtttcagagccacagccagctgtggaattgctttaaaggctaataatattggcaattcacgaccattctcaactacatacagtaaaaaaataaggtttcttgttaaaaataagatttcattcagtaatctaaatatgagaaggaaagacggaagtgttgcacatagtttgcttcatagatctgagaaatgccaaagcacattagctacatgtagcaccattgttgatgaggcttcaacatctactagtaacaacagcaagagtgttactgatgctaagactgacactgccaagaggaagagttcaagaggaagcaaaaaggaagttgatggagatatgaaagaaaaggaagtacataccaataaaaagaggatatttgctagaactcgtaaagctgcaacaaagacgtctgataatattagcacgaaccaagaaaacaagaagactgataattgtaaattgaaaaggggtgctgatagtttcaaagagaaaaaagtaaataatagggcaaagtcaaaagcagaggtttctgctgcttcttctgtacctgaaatttgtatgcaatcctctattgatggttcagttattgagaaaaagccactggtgccattgtatcctcccagagccaaatcagttgtggttgtggaatcagccacaaaagcaaaagttattcagaagtaccttggggacatgtatgaagtgttaccaagctatggtcatgtgagagatttagcaggtagatctaaatctgtccgccccgatgatgacttcagcatggtctgggaggtgcctgctgctgcctggacacaccttaagagcattaaagttgcactgcaaagaaaatttaattcttgcatctgatcctgaccgtgaaggtgaagcgattgcttggcacatcaaagaaatgcttgaacaacaaggtgtactgggttttgatgtgactgttgcaagagttgttttccatgaaatatctgaggatgcaataaagaaggctttaatgtccccgaggtttgcctggttgccaatcagctggacgggtccaatctgctgctttggcccttgtgtgcgatcgagaagctgaaatagaacagtttaaggcacatgagtactggacagtacagacagacttcaaaatacaatcagcagatccttcaaatgccacatgtattccattctgtataaagcatttgaattcaaaaaagctggatcaactttccataccctctcaagaagaagcgcaagctatagaaaagatgattcattcttctacatttgaagttttaggtgttaaaagaagtaaaattcacaagaatcctccattgccatatattacatccagccttcagcaggatgcagcaaacaaactccattttactgcaggatataccatgaagattgcccaaaacctttatgagggtatcaacctttcctcagaagaaacaactgggttaataacgtacataagaactgatgggttccatatttctgatggagctgtggaggacattcgttcactagttaaagaaagatatggtcagaagtacgtttcggaggacattaggaagtatttaaagaaggtgaaaaatgctcaagaagcccatgaagccattaggcccaccagtataaggaggccgccatattcaagtggatgttggcattcctgaaggagagatgaattttcattccactgcatcaaaactggacttcaagggatnn

SEQ ID NO: 62245 - DNA, 2351 bp, Zea Mays
  misc_feature (2350)..(2351): n is a, c, g, or t
gtcaatctggttccgctgctccttcctcggcaccgccgcctcgcaatccgctcccgcttcgcccgtaaaaccctagctaaaccctagccgaaagaaacaatgtctctcctcccctgagcgcgctcgtggccgccccttgttggccatggctctccagctccgccgcctcctcccgcacggatacgcccagcgacaccgcgccgtcatccacgcgctatcgctgctgccgccgccgcccgcaatgcttcaattcgaggtgtttcagagatattcttcttcaccctggcccttttcacctttccgcccttgtaaaatgtgtggggttgcatttaggagcaattcaacaaggaaaatatcttcaagaaataattttggggttgccttacagcccaaaagtagtgcctttattactcctcggctctttggcagctatagttctgtatgtttcagagccacagccagctgtggaattgctttaaaggctaataatattggcaattcacgaccattctcaactacatacagtaaaaaaataaggtttcttgttaaaaataagatttcattcagtaatctaaatatgagaaggaaagacggaagtgttgcacatagtttgcttcatagatctgagaaatgccaaagcacattagctacatgtagcaccattgttgatgaggcttcaacatctactagtaacaacagcaagagtgttactgatgctaagactgacactgccaagaggaagagttcaagaggaagcaaaaaggaagttgatggagatatgaaagaaaaggaagtacataccaataaaaagaggatatttgctagaactcgtaaagctgcaacaaagacgtctgataatattagcacgaaccaagaaaacaagaagactgataattgtaaattgaaaaggggtgctgatagtttcaaagagaaaaaagtaaataatagggcaaagtcaaaagcagaggtttctgctgcttcttctgtacctgaaatttgtatgcaatcctctattgatggttcagttattgagaaaaagccactggtgccattgtatcctcccagagccaaatcagttgtggttgtggaatcagccacaaaagcaaaagttattcagaagtaccttggggacatgtatgaagtgttaccaagctatggtcatgtgagagatttagcaggtagatctaaatctgtccgccccgatgatgacttcagcatggtctgggaggtgcctgctgctgcctggacacaccttaagagcattaaagttgcactgcaaagaaaatttaattcttgcatctgatcctgaccgtgaaggtgaagcgattgcttggcacatcaaagaaatgcttgaacaacaaggtgtactgggttttgatgtgactgttgcaagagttgttttccatgaaatatctgaggatgcaataaagaaggctttaatgtccccgaggtatattgacatggacttagtcaatgcttatcttgcacgccgttcccttgattatctaattgggtttggcatatcaccacttctgtggaggaagttgcctggttgccaatcagctggacgggtccaatctgctgctttggcccttgtgtgcgatcgagaagctgaaatagaacagtttaaggcacatgagtactggacagtacagacagacttcaaaatacaatcagcagatccttcaaatgccacatgtattccattctgtataaagcatttgaattcaaaaaagctggatcaactttccataccctctcaagaagaagcgcaagctatagaaaagatgattcattcttctacatttgaagttttaggtgttaaaagaagtaaaattcacaagaatcctccattgccatatattacatccagccttcagcaggatgcagcaaacaaactccattttactgcaggatataccatgaagattgcccaaaacctttatgagggtatcaacctttcctcagaagaaacaactgggttaataacgtacataagaactgatgggttccatatttctgatggagctgtggaggacattcgttcactagttaaagaaagatatggtcagaagtacgtttcggaggacattaggaagtatttaaagaaggtgaaaaatgctcaagaagcccatgaagccattaggcccaccagtataaggaggccgccatcatcattggttggaatacttgatgatgattctctaaaactgtacactctaatatggaaaaggacaatggcttgccaaatggaagcttccagaactgagatgattcaagtggatgttggcattcctgaaggagagatgaattttcattccactgcatcaaaactggacttcaagggatnn

SEQ ID NO: 62246 - DNA, 1918 bp, Zea Mays
  misc_feature (1917)..(1918): n is a, c, g, or t
caatgcagcctgcagtactgcagtcaatctggttccgctgctccttcctcggcaccgccgcctcgcaatccgctcccgcttcgcccgtaaaaccctagctaaaccctagccgaaagaaacaatgtctctcctcccctgagcgcgctcgtggccgccccttgttggccatggctctccagctccgccgcctcctcccgcacggatacgcccagcgacaccgcgccgtcatccacgcgctatcgctgctgccgccgccgcccgcaatgcaagagtgttactgatgctaagactgacactgccaagaggaagagttcaagaggaagcaaaaaggaagttgatggagatatgaaagaaaaggaagtacataccaataaaaagaggatatttgctagaactcgtaaagctgcaacaaagacgtctgataatattagcacgaaccaagaaaacaagaagactgataattgtaaattgaaaaggggtgctgatagtttcaaagagaaaaaagtaaataatagggcaaagtcaaaagcagaggtttctgctgcttcttctgtacctgaaatttgtatgcaatcctctattgatggttcagttattgagaaaaagccactggtgccattgtatcctcccagagccaaatcagttgtggttgtggaatcagccacaaaagcaaaagttattcagaagtaccttggggacatgtatgaagtgttaccaagctatggtcatgtgagagatttagcaggtagatctaaatctgtccgccccgatgatgacttcagcatggtctgggaggtgcctgctgctgcctggacacaccttaagagcattaaagttgcactgcaaagaaaatttaattcttgcatctgatcctgaccgtgaaggtgaagcgattgcttggcacatcaaagaaatgcttgaacaacaaggtgtactgggttttgatgtgactgttgcaagagttgttttccatgaaatatctgaggatgcaataaagaaggctttaatgtccccgaggtatattgacatggacttagtcaatgcttatcttgcacgccgttcccttgattatctaattgggtttggcatatcaccacttctgtggaggaagttgcctggttgccaatcagctggacgggtccaatctgctgctttggcccttgtgtgcgatcgagaagctgaaatagaacagtttaaggcacatgagtactggacagtacagacagacttcaaaatacaatcagcagatccttcaaatgccacatgtattccattctgtataaagcatttgaattcaaaaaagctggatcaactttccataccctctcaagaagaagcgcaagctatagaaaagatgattcattcttctacatttgaagttttaggtgttaaaagaagtaaaattcacaagaatcctccattgccatatattacatccagccttcagcaggatgcagcaaacaaactccattttactgcaggatataccatgaagattgcccaaaacctttatgagggtatcaacctttcctcagaagaaacaactgggttaataacgtacataagaactgatgggttccatatttctgatggagctgtggaggacattcgttcactagttaaagaaagatatggtcagaagtacgtttcggaggacattaggaagtatttaaagaaggtgaaaaatgctcaagaagcccatgaagccattaggcccaccagtataaggaggccgccatcatcattggttggaatacttgatgatgattctctaaaactgtacactctaatatggaaaaggacaatggcttgccaaatggaagcttccagaactgagatgattcaagtggatgttggcattcctgaaggagagatgaattttcattccactgcatcaaaactggacttcaagggatnn

SEQ ID NO: 62247 - DNA, 2460 bp, Zea Mays
  misc_feature (2459)..(2460): n is a, c, g, or t
gttagttcttcggatttttaatgtacgagcgagggatagagatcactctaaagagtgctacgaaatctctacggtgaatagccttatattctagttacaaacatattcttcccgcaatcagattgtcaggaaaaaaaattgcattggagaaccgttagatttagaatgaacgtgggcaatgcagcctgcagtactgcagtcaatctggttccgctgctccttcctcggcaccgccgcctcgcaatccgctcccgcttcgcccgtaaaaccctagctaaaccctagccgaaagaaacaatgtctctcctcccctgagcgcgctcgtggccgccccttgttggccatggctctccagctccgccgcctcctcccgcacggatacgcccagcgacaccgcgccgtcatccacgcgctatcgctgctgccgccgccgcccgcaatgcttcaattcgaggtgtttcagagatattcttcttcaccctggcccttttcacctttccgcccttgtaaaatgtgtggggttgcatttaggagcaattcaacaaggaaaatatcttcaagaaataattttggggttgccttacagcccaaaagtagtgcctttattactcctcggctctttggcagctatagttctgtatgtttcagagccacagccagctgtggaattgctttaaaggctaataatattggcaattcacgaccattctcaactacatacagtaaaaaaataaggtttcttgttaaaaataagatttcattcagtaatctaaatatgagaaggaaagacggaagtgttgcacatagtttgcttcatagatctgagaaatgccaaagcacattagctacatgtagcaccattgttgatgaggcttcaacatctactagtaacaacagcaagagtgttactgatgctaagactgacactgccaagaggaagagttcaagaggaagcaaaaaggaagttgatggagatatgaaagaaaaggaagtacataccaataaaaagaggatatttgctagaactcgtaaagctgcaacaaagacgtctgataatattagcacgaaccaagaaaacaagaagactgataattgtaaattgaaaaggggtgctgatagtttcaaagagaaaaaagtaaataatagggcaaagtcaaaagcagaggtttctgctgcttcttctgtacctgaaatttgtatgcaatcctctattgatggttcagttattgagaaaaagccactggtgccattgtatcctcccagagccaaatcagttgtggttgtggaatcagccacaaaagcaaaagttattcagaagtaccttggggacatgtatgaagtgttaccaagctatggtcatgtgagagatttagcaggtagatctaaatctgtccgccccgatgatgacttcagcatggtctgggaggtgcctgctgctgcctggacacaccttaagagcattaaagttgcactgcaaagagcagaaaatttaattcttgcatctgatcctgaccgtgaaggtgaagcgattgcttggcacatcaaagaaatgcttgaacaacaaggtgtactgggttttgatgtgactgttgcaagagttgttttccatgaaatatctgaggatgcaataaagaaggctttaatgtccccgagttgcctggttgccaatcagctggacgggtccaatctgctgctttggcccttgtgtgcgatcgagaagctgaaatagaacagtttaaggcacatgagtactggacagtacagacagacttcaaaatacaatcagcagatccttcaaatgccacatgtattccattctgtataaagcatttgaattcaaaaaagctggatcaactttccataccctctcaagaagaagcgcaagctatagaaaagatgattcattcttctacatttgaagttttaggtgttaaaagaagtaaaattcacaagaatcctccattgccatatattacatccagccttcagcaggatgcagcaaacaaactccattttactgcaggatataccatgaagattgcccaaaacctttatgagggtatcaacctttcctcagaagaaacaactgggttaataacgtacataagaactgatgggttccatatttctgatggagctgtggaggacattcgttcactagttaaagaaagatatggtcagaagtacgtttcggaggacattaggaagtatttaaagaaggtgaaaaatgctcaagaagcccatgaagccattaggcccaccagtataaggaggccgccatcatcattggttggaatacttgatgatgattctctaaaactgtacactctaatatggaaaaggacaatggcttgccaaatggaagcttccagaactgagatgattcaagtggatgttggcattcctgaaggagagatgaattttcattccactgcatcaaaactggacttcaagggatnn

SEQ ID NO: 62248 - DNA, 2310 bp, Zea Mays
caatctggttccgctgctccttcctcggcaccgccgcctcgcaatccgctcccgcttcgcccgtaaaaccctagctaaaccctagccgaaagaaacaatgtctctcctcccctgagcgcgctcgtggccgccccttgttggccatggctctccagctccgccgcctcctcccgcacggatacgcccagcgacaccgcgccgtcatccacgcgctatcgctgctgccgccgccgcccgcaatgcttcaattcgaggtgtttcagagatattcttcttcaccctggcccttttcacctttccgcccttgtaaaatgtgtggggttgcatttaggagcaattcaacaaggaaaatatcttcaagaaataattttggggttgccttacagcccaaaagtagtgcctttattactcctcggctctttggcagctatagttctgtatgtttcagagccacagccagctgtggaattgctttaaaggctaataatattggcaattcacgaccattctcaactacatacagtaaaaaaataaggtttcttgttaaaaataagatttcattcagtaatctaaatatgagaaggaaagacggaagtgttgcacatagtttgcttcatagatctgagaaatgccaaagcacattagctacatgtagcaccattgttgatgaggcttcaacatctactagtaacaacagcaagagtgttactgatgctaagactgacactgccaagaggaagagttcaagaggaagcaaaaaggaagttgatggagatatgaaagaaaaggaagtacataccaataaaaagaggatatttgctagaactcgtaaagctgcaacaaagacgtctgataatattagcacgaaccaagaaaacaagaagactgataattgtaaattgaaaaggggtgctgatagtttcaaagagaaaaaagtaaataatagggcaaagtcaaaagcagaggtttctgctgcttcttctgtacctgaaatttgtatgcaatcctctattgatggttcagttattgagaaaaagccactggtgccattgtatcctcccagagccaaatcagttgtggttgtggaatcagccacaaaagcaaaagttattcagaagtaccttggggacatgtatgaagtgttaccaagctatggtcatgtgagagatttagcaggtagatctaaatctgtccgccccgatgatgacttcagcatggtctgggaggtgcctgctgctgcctggacacaccttaagagcattaaagttgcactgcaaagagcagaaaatttaattcttgcatctgatcctgaccgtgaaggtgaagcgattgcttggcacatcaaagaaatgcttgaacaacaaggtgtactgggttttgatgtgactgttgcaagagttgttttccatgaaatatctgaggatgcaataaagaaggctttaatgtccccgaggtatattgacatggacttagtcaatgcttatcttgcacgccgttcccttgattatctaattgggtttggcatatcaccacttctgtggaggaagttgcctggttgccaatcagctggacgggtccaatctgctgctttggcccttgtgtgcgatcgagaagctgaaatagaacagtttaaggcacatgagtactggacagtacagacagacttcaaaatacaatcagcagatccttcaaatgccacatgtattccattctgtataaagcatttgaattcaaaaaagctggatcaactttccataccctctcaagaagaagcgcaagctatagaaaagatgattcattcttctacatttgaagttttaggtgttaaaagaagtaaaattcacaagaatcctccattgccatatattacatccagccttcagcaggatgcagcaaacaaactccattttactgcaggatataccatgaagattgcccaaaacctttatgagggtatcaacctttcctcagaagaaacaactgggttaataacgtacataagaactgatgggttccatatttctgatggagctgtggaggacattcgttcactagttaaagaaagatatggtcagaagtacgtttcggaggacattaggaagtatttaaagaaggtgaaaaatgctcaagaagcccatgaagccattaggcccaccagtataaggaggccgccatcatcattggttggaatacttgatgatgattctctaaaactgtacactctaatatggaaaaggacaatggcttgccaaatggaagcttccagaactgagatgcccgacgtcgagcgcggcgaccttcaactctcac

SEQ ID NO: 62249 - DNA, 936 bp, Zea Mays
ccaaaccgtagccccttgctcctagctgccaacacccccctccctcgcactccccgctgggtagaagagccgtggtgcctacaccttcgcccactggcagagcaccaggtggttgatctccgagcattgttggctcgttgacgatggagaagagaaagggcctcgctcggcgttgggcggtggaactcccagatgcctcctcctcccctgtggccctgtcgttcttaacccgtctggttttgctagatcagcgcccatgggtcttcttcctttgatactgtcacaaccttccaaagtattctcattgactttgaaagatcagcttaaggcttgccctacctgatgatgggaccatcaccactgttcgacctaagcctgcaacgctggacttccttgggcttggcattggagggaccatggatggctccacggccaacaatggcctcccggcattaatggttggaggatagctggatatggggtcttcggcacaggtgcctgcgttgggaagatgccaagaggaagaccaacagacgtacgatcctgtgaagttttctccttttttctgcaatgcctcggcttgtccattctttcagtcacagatgtgcttttggtggagatagaagctctgtaagatgtggacctgtacgtagctcgatgctcctcccagtcctgctctctgtctgataaaaaaaatgcccttgaattgatacaattcgatcccagcagatgatccagaggttcaaaatcaccgtgcttttctgaaagtcattgcattttcaaagatgtattctgagttttcttgcgcatgtcctacttgagaaaaattgattatttagagcgtgtttggcatggctcaaaactccaagtaggagttagccggagcatgccaaacaacataactctaaagttgtaaactctatagagttttttaag

SEQ ID NO: 62250 - DNA, 970 bp, Zea Mays
cacaaccaaaccgtagccccttgctcctagctgccaacacccccctccctcgcactccccgctgggtagaagagccgtggtgcctacaccttcgcccactggcagagcaccaggtggttgatctccgagcattgttggctcgttgacgatggagaagagaaagggcctcgctcggcgttgggcggtggaactcccagatgcctcctcctcccctgtggccctgtcgttcttaacccgtctggttttgctagatcagcgcccatgggtcttcttcctttgatactgtcacaaccttccaaagtattctcattgactttgaaagatcagcttaagggactcaaattgcttcattatgcaaataggcttgccctacctgatgatgggaccatcaccactgttcgacctaagcctgcaacgctggacttccttgggcttggcattggagggaccatggatggctccacggccaacaatggcctcccggcattaatggttggaggatagctggatatggggtcttcggcacaggtgcctgcgttgggaagatgccaagaggaagaccaacagacgtacgatcctgtgaagttttctccttttttctgcaatgcctcggcttgtccattctttcagtcacagatgtgcttttggtggagatagaagctctgtaagatgtggacctgtacgtagctcgatgctcctcccagtcctgctctctgtctgataaaaaaaatgcccttgaattgatacaattcgatcccagcagatgatccagaggttcaaaatcaccgtgcttttctgaaagtcattgcattttcaaagatgtattctgagttttcttgcgcatgtcctacttgagaaaaattgattatttagagcgtgtttggcatggctcaaaactccaagtaggagttagccggagcatgccaaacaacataactctaaagttgtaaactctatagagttttttaag

SEQ ID NO: 62251 - DNA, 925 bp, Zea Mays
ccaaaccgtagccccttgctcctagctgccaacacccccctccctcgcactccccgctgggtagaagagccgtggtgcctacaccttcgcccactggcagagcaccaggtggttgatctccgagcattgttggctcgttgacgatggagaagagaaagggcctcgctcggcgttgggcggtggaactcccagatgcctcctcctcccctgtggccctgtcgttcttaacccgtctggttttgctagatcagcgcccatgggtcttcttcctttgatactgtcacaaccttccaaagtattctcattgactttgaaagatcagcttaaggtgattattacatgcctatcatgtattctgcagctaaagtaatacctggctaattattcacctttttatgcctgccatctagcttcaaacagcggcataaggcaataatgccaattggctacttattcacctttttagcagttttgttgccacagaagatcagccaaaccgatgacatgatatggcttagctattttaacttttcattgctttattagcaaaaggtagtttcctttttgttttttatagctaggtaatggcctcttgcaattgtcctctaacatatgtgtttgttttaagttttatttgaatttaataatgaggttgttatactaatattttgaaaatgcactttttatgttcacttaatacatattctgtcttccaattgtcctctaactgaagaaatcgttgccactgtcagacccagctgttcagcatgctctacaggtattcaacaattgcgaaagggcctctagctgagttggttaggtggtctgagtagcactcctcaggtcctgggttcgactccccgtgggagcgaatttcaggctgtggttaaaaaaatcccctcgtctgtcccatgccaaagcacag

SEQ ID NO: 62252 - DNA, 501 bp, Zea Mays
ccaaaccgtagccccttgctcctagctgccaacacccccctccctcgcactccccgctgggtagaagagccgtggtgcctacaccttcgcccactggcagagcaccaggtggttgatctccgagcattgttggctcgttgacgatggagaagagaaagggcctcgctcggcgttgggcggtggaactcccagatgcctcctcctcccctgtggccctgtcgttcttaacccgtctggttttgctagatcagcgcccatgggtcttcttcctttgatactgtcacaaccttccaaagtattctcattgactttgaaagatcagcttaagacccagctgttcagcatgctctacaggtattcaacaattgcgaaagggcctctagctgagttggttaggtggtctgagtagcactcctcaggtcctgggttcgactccccgtgggagcgaatttcaggctgtggttaaaaaaatcccctcgtctgtcccatgccaaagcacag

SEQ ID NO: 62253 - DNA, 1350 bp, Zea Mays
caaatgatgcaatatttttgctgttaatgcgactatatctgattctttcaatcctcctgggggaagaaggtttgcaacatagtgtcccaggcatgaaaaaggacagcttcactacaataatatctatattcaaaagtataaaatcttcacaggatgtggttgatggaagtaagaccaagactgtgtgtgctatatgtgatcttggtactcttattgcaaagaggttatgccaagaccaaacgagtttatcagaagctcaaacagttccattgcctgctcaactttacacgccgcttcatgataaccaaaatgaaaattctgtggagaataatgagcagatttggctgggatgtgagaaagtactggcccattttgaggctgtaaggactgcaaatatggataaggttgaatctcccaaacataagatgcttattgatgtgactgatgaatttggaaatgaagttcctcttggcaaaattgtcaaacttcttaaatcacgaggagaaaggaagattggggaaaagcagaaggcaccatctagtagttcagtaaatgcagagaacgatgatgttctgggtttagtaagagaaattaacttaaacaatcaagaagatttggaggaatcgcataaggacaagtctgagaagcgtcatacaaatgcaaaagatagtaaccagaaaccacttgatttttcttcacctaaacgcaaaagatcaatttctaagagtagaccacattcagcaaaaggtagtaaaagcagtgatgagcgtctactacatactcctaactcagagaggaccaatatctccttggaaactaagatgaaggagaaagacagagatgattcaactgatacagaactgttagtatctccaagcactagaacccctgtatctaaacaaaataagggtgctaagaaatccaatattaatattttgagcagtgttccaaagaagtctgctgatgcagacagtactaagagaactgttgaaccgagaagtctaaatgggtcactcaaaaggcaaaagtcaaaaccaatttctggtttactaaagtgctcaacacaagactcaagcagtacagacttggtaggacaccgaataaaagtttggtggcctttggataagagattttatgaaggtgccgtgcaatcatacgattcatccaagaaaaaacataggggtgctatacgatgacggagatgttgaagtgcttaacttggctaaagagaagtggatactgattgaaagtaatgactcatcagtgaagaggcaaaagaaggatcatcttgggacaaacccaggaagagcactggagataactagcagcagcaagtctcctcctagcctg

SEQ ID NO: 62254 - DNA, 1350 bp, Zea Mays
ttttatgtgggttattccaaatgatgcaatatttttgctgttaatgcgactatatctgattctttcaatcctcctgggggaagaaggtttgcaacatagtgtcccaggcatgaaaaaggacagcttcactacaataatatctatattcaaaagtataaaatcttcacaggatgtggttgatggaagtaagaccaagactgtgtgtgctatatgtgatcttggtactcttattgcaaagaggttatgccaagaccaaacgagtttatcagaagctcaaacagttccattgcctgctcaactttacacgccgcttcatgataaccaaaatgaaaattctgtggagaataatgagcagatttggctgggatgtgagaaagtactggcccattttgaggctgtaaggactgcaaatatggataaggttgaatctcccaaacataagatgcttattgatgtgactgatgaatttggaaatgaagttcctcttggcaaaattgtcaaacttcttaaatcacgaggagaaaggaagattggggaaaagcagaaggcaccatctagtagttcagtaaatgcagagaacgatgatgttctgggtttagtaagagaaattaacttaaacaatcaagaagatttggaggaatcgcataaggacaagtctgagaagcgtcatacaaatgcaaaagatagtaaccagaaaccacttgatttttcttcacctaaacgcaaaagatcaatttctaagagtagaccacattcagcaaaaggtagtaaaagcagtgatgagcgtctactacatactcctaactcagagaggaccaatatctccttggaaactaagatgaaggagaaagacagagatgattcaactgatacagaactgttagtatctccaagcactagaacccctgtatctaaacaaaataagggtgctaagaaatccaatattaatattttgagcagtgttccaaagacagtactaagagaactgttgaaccgagaagtctaaatgggtcactcaaaaggcaaaagtcaaaaccaatttctggtttactaaagtgctcaacacaagactcaagcagtacagacttggtaggacaccgaataaaagtttggtggcctttggataagagattttatgaaggtgccgtgcaatcatacgattcatccaagaaaaaacatagggtgctatacgatgacggagatgttgaagtgcttaacttggctaaagagaagtggatactgattgaaagtaatgactcatcagtgaagaggcaaaagaaggatcatcttgggacaaacccaggaagagcactggagataactagcagcagcaagtctcctcctagcctg

SEQ ID NO: 62255 - DNA, 2049 bp, Zea Mays
caatctttgggttgtatagcccagatagcgatgccaatttttgaaacccgaaaagaagagataataagtttcataactaaaaaaattcttgagtgcaacgatgatatggttcgaaattcttctaataaatctgaatggggtgatagcacagagaattgtttgctaaagatttatggcatcaaaacattggtgaagagctatctaccttgcaaagatgctcatgcacagccaggaatagagaagttaattgatattctgaagaatattcttacttacggtgacgtatctccaaatatggtctcaagtgctgctgataaggcccatttgaggcttgccgcagcaaaagctgttctccgcttatcaaaacaatgggaccataaagtgcctgttgatgtattttatttgactttgaggatttcacaggatgattttcctcaggtgaggaaattatttctttgtaaagttctgcaatatatcaaggaaagggccttggatgcaaaatatgcctgcaccttcatgtttggtgttaacgattatcatgccccgccgtacgaagagttcaagtacaatctgactgaagtggttcagatatgccaacaagttaagatgcgccaactttcagtccaagcagatatggatttgttgacggcttacccagaatacataatttcctttttggttcatgccctcgctcatgatccttcatccccggaaattgaagaacatgaaaacgtcaatgcatttggtccaatttactggcgactatatctgattctttcaatcctcctgggggaagaaggtttgcaacatagtgtcccaggcatgaaaaaggacagcttcactacaataatatctatattcaaaagtataaaatcttcacaggatgtggttgatggaagtaagaccaagactgtgtgtgctatatgtgatcttggtactcttattgcaaagaggttatgccaagaccaaacgagtttatcagaagctcaaacagttccattgcctgctcaactttacacgccgcttcatgataaccaaaatgaaaattctgtggagaataatgagcagatttggctgggatgtgagaaagtactggcccattttgaggctgtaaggactgcaaatatggataaggttgaatctcccaaacataagatgcttattgatgtgactgatgaatttggaaatgaagttcctcttggcaaaattgtcaaacttcttaaatcacgaggagaaaggaagattggggaaaagcagaaggcaccatctagtagttcagtaaatgcagagaacgatgatgttctgggtttagtaagagaaattaacttaaacaatcaagaagatttggaggaatcgcataaggacaagtctgagaagcgtcatacaaatgcaaaagatagtaaccagaaaccacttgatttttcttcacctaaacgcaaaagatcaatttctaagagtagaccacattcagcaaaaggtagtaaaagcagtgatgagcgtctactacatactcctaactcagagaggaccaatatctccttggaaactaagatgaaggagaaagacagagatgattcaactgatacagaactgttagtatctccaagcactagaacccctgtatctaaacaaaataagggtgctaagaaatccaatattaatattttgagcagtgttccaaagaagtctgctgatgcagacagtactaagagaactgttgaaccgagaagtctaaatgggtcactcaaaaggcaaaagtcaaaaccaatttctggtttactaaagtttattcctgaatgtggtgttgattttaagttttttgtcattagattttatgaaggtgccgtgcaatcatacgattcatccaagaaaaaacatagggtgctatacgatgacggagatgttgaagtgcttaacttggctaaagagaagtggatactgattgaaagtaatgactcatcagtgaagaggcaaaagaaggatcatcttgggacaaacccaggaagagcactggagataactagcagcagcaagtctcctcctagcctg

SEQ ID NO: 62256 - DNA, 2627 bp, Zea Mays
agaggcttgtggatttgttggaagagaagaaagtgaatataccatctatcttgcaatctttgggttgtatagcccagatagcgatgccaatttttgaaacccgaaaagaagagataataagtttcataactaaaaaaattcttgagtgcaacgatgatatggttcgaaattcttctaataaatctgaatggggtgatagcacagagaattgtttgctaaagatttatggcatcaaaacattggtgaagagctatctaccttgcaaagatgctcatgcacagccaggaatagagaagttaattgatattctgaagaatattcttacttacggtgacgtatctccaaatatggtctcaagtgctgctgataaggcccatttgaggcttgccgcagcaaaagctgttctccgcttatcaaaacaatgggaccataaagtgcctgttgatgtattttatttgactttgaggatttcacaggatgattttcctcaggtgaggaaattatttctttgtaaagttctgcaatatatcaaggaaagggccttggatgcaaaatatgcctgcaccttcatgtttggtgttaacgattatcatgccccgccgtacgaagagttcaagtacaatctgactgaagtggttcagatatgccaacaagttaagatgcgccaactttcagtccaagcagatatggatttgttgacggcttacccagaatacataatttcctttttggttcatgccctcgctcatgatccttcatccccggaaattgaagaacatgaaaacgtcaatgcatttggtccaatttactggatatcatggattcagtgcattttactggtcagtaggccttttgatttgggaggccttggaattcccaatctcctcactatgaactgggctctgcaaattcattggctttggctccagaaaactgctccttccaaaccttggagtgggttggatctcaaaatctctccccaggtcagggctctattccaggctgcggtggctaccactattggcaacggttcgacaacctttttttggaaggataggtggattcatgggtgctgtgtcaaggatacagctcccctcattgttgctgcagtgccaaagaagtatagagatgaaaggactgttcaacaggcccttacagatttaacttgggtgcaagatattcagggaaatctctcgctgaccggtattgagcaatatcttcagttatggagtaagggccttcagaagggttggagtgtagagtgtgtcaggtgtgcgtatgggggtgagtctgtgtgcaaacactggcgactatatctgattctttcaatcctcctgggggaagaaggtttgcaacatagtgtcccaggcatgaaaaaggacagcttcactacaataatatctatattcaaaagtataaaatcttcacaggatgtggttgatggaagtaagaccaagactgtgtgtgctatatgtgatcttggtactcttattgcaaagaggttatgccaagaccaaacgagtttatcagaagctcaaacagttccattgcctgctcaactttacacgccgcttcatgataaccaaaatgaaaattctgtggagaataatgagcagatttggctgggatgtgagaaagtactggcccattttgaggctgtaaggactgcaaatatggataaggttgaatctcccaaacataagatgcttattgatgtgactgatgaatttggaaatgaagttcctcttggcaaaattgtcaaacttcttaaatcacgaggagaaaggaagattggggaaaagcagaaggcaccatctagtagttcagtaaatgcagagaacgatgatgttctgggtttagtaagagaaattaacttaaacaatcaagaagatttggaggaatcgcataaggacaagtctgagaagcgtcatacaaatgcaaaagatagtaaccagaaaccacttgatttttcttcacctaaacgcaaaagatcaatttctaagagtagaccacattcagcaaaaggtagtaaaagcagtgatgagcgtctactacatactcctaactcagagaggaccaatatctccttggaaactaagatgaaggagaaagacagagatgattcaactgatacagaactgttagtatctccaagcactagaacccctgtatctaaacaaaataagggtgctaagaaatccaatattaatattttgagcagtgttccaaagaagtctgctgatgcagacagtactaagagaactgttgaaccgagaagtctaaatgggtcactcaaaaggcaaaagtcaaaaccaatttctggtttactaaagtgctcaacacaagactcaagcagtacagacttggtaggacaccgaataaaagtttggtggcctttggataagagattttatgaaggtgccgtgcaatcatacgattcatccaagaaaaaacatagggtgctatacgatgacggagatgttgaagtgcttaacttggctaaagagaagtggatactgattgaaagtaatgactcatcagtgaagaggcaaaagaaggatcatcttgggacaaacccaggaagagcactggagataactagcagcagcaagtctcctcctagcctg

SEQ ID NO: 62257 - DNA, 2132 bp, Zea Mays
agaggcttgtggatttgttggaagagaagaaagtgaatataccatctatcttgcaatctttgggttgtatagcccagatagcgatgccaatttttgaaacccgaaaagaagagataataagtttcataactaaaaaaattcttgagtgcaacgatgatatggttcgaaattcttctaataaatctgaatggggtgatagcacagagaattgtttgctaaagatttatggcatcaaaacattggtgaagagctatctaccttgcaaagatgctcatgcacagccaggaatagagaagttaattgatattctgaagaatattcttacttacggtgacgtatctccaaatatggtctcaagtgctgctgataaggcccatttgaggcttgccgcagcaaaagctgttctccgcttatcaaaacaatgggaccataaagtgcctgttgatgtattttatttgactttgaggatttcacaggatgattttcctcaggtgaggaaattatttctttgtaaagttctgcaatatatcaaggaaagggccttggatgcaaaatatgcctgcaccttcatgtttggtgttaacgattatcatgccccgccgtacgaagagttcaagtacaatctgactgaagtggttcagatatgccaacaagttaagatgcgccaactttcagtccaagcagatatggatttgttgacggcttacccagaatacataatttcctttttggttcatgccctcgctcatgatccttcatccccggaaattgaagaacatgaaaacgtcaatgcatttggtccaatttactggcgactatatctgattctttcaatcctcctgggggaagaaggtttgcaacatagtgtcccaggcatgaaaaaggacagcttcactacaataatatctatattcaaaagtataaaatcttcacaggatgtggttgatggaagtaagaccaagactgtgtgtgctatatgtgatcttggtactcttattgcaaagaggttatgccaagaccaaacgagtttatcagaagctcaaacagttccattgcctgctcaactttacacgccgcttcatgataaccaaaatgaaaattctgtggagaataatgagcagatttggctgggatgtgagaaagtactggcccattttgaggctgtaaggactgcaaatatggataaggttgaatctcccaaacataagatgcttattgatgtgactgatgaatttggaaatgaagttcctcttggcaaaattgtcaaacttcttaaatcacgaggagaaaggaagattggggaaaagcagaaggcaccatctagtagttcagtaaatgcagagaacgatgatgttctgggtttagtaagagaaattaacttaaacaatcaagaagatttggaggaatcgcataaggacaagtctgagaagcgtcatacaaatgcaaaagatagtaaccagaaaccacttgatttttcttcacctaaacgcaaaagatcaatttctaagagtagaccacattcagcaaaaggtagtaaaagcagtgatgagcgtctactacatactcctaactcagagaggaccaatatctccttggaaactaagatgaaggagaaagacagagatgattcaactgatacagaactgttagtatctccaagcactagaacccctgtatctaaacaaaataagggtgctaagaaatccaatattaatattttgagcagtgttccaaagaagtctgctgatgcagacagtactaagagaactgttgaaccgagaagtctaaatgggtcactcaaaaggcaaaagtcaaaaccaatttctggtttactaaagtgctcaacacaagactcaagcagtacagacttggtaggacaccgaataaaagtttggtggcctttggataagagattttatgaaggtgccgtgcaatcatacgattcatccaagaaaaaacatagggtgctatacgatgacggagatgttgaagtgcttaacttggctaaagagaagtggatactgattgaaagtaatgactcatcagtgaagaggcaaaagaaggatcatcttgggacaaacccaggaagagcactggagataactagcagcagcaagtctcctcctagcctg

SEQ ID NO: 62258 - DNA, 4412 bp, Zea Mays
atggagctgcctccttgctcatccccaccaaatctggcgtcgcctgggtcatctgtagcagaggcggctgctgctggagatggggatcggagggagcagcagcatgcggtagggaaggagatgagcgtgcgcatcatgagggagggagggtggtgctgcacctgtgtgagccatgagggaggagatgcggcggtgttgcgcttgtgtgaaggagaagtagagagcccgcaggcggatcactcaacacaggcactgtcatgtcttattttagtattaaatagcttggtcatgcatacctgtttgattgaaatacttttacttcatgtgctgcagaaagctgtggagtgcttacatggaatagagcagtcaccagtatcatcagtgatggaagctattcaaccaagtctaaaggctgttaccagagaagaattgctgaagcatgaggatgacaatgtcaaagttctcttggcaacatgtttctgtgaaattacaagaataactgcacctgatgctccctacaacgatgacattttaagggatatattctatctgatcgtgggtacatttggcggactcaatgatgttaatagtcaatcctttggcaggaaggttgctattcttgaaacagttgctagataccgagcatgtgttgtgatgttagatcttgaatgtgatgatctcatcacaaacatgtttcaaacatttttagttgttgtcagtgagagtcatgaagaatacattgtaaagtcaatgcagacaataatgacccttattatagatgagagtgaagatgtacacgagagtcttctacgtgtactgttgtcagcattggggcagaaaaaaactggtgctgcaatgtctgcgcgtaaacttgcttgcagtgtcatcgagcattctgctacaaagcttgaaccttatctaaagaaatttctaatgtcatcatgggctgggaatgtcagttcttctaatgatcaaattgatcaccagggagttgtatttgatttatatcagtgtgctccgaaggttcttaaggtgatcgtgccatatattactggggaactactggcagatgaagtagataatcggtccaagtcagttgaattacttggggaaattttttccttacctggatcccctattgtggaatgcttcgagactcttttcacagagtttctcaagagactgaccgatagagttgttgaaattcgtatttctgtggttgagtatttgaagagatgtctaatatcaaatccttcccgagctgaagctcctgaaatcatcaaggcactttgtgacagactgttggattatgaagaaaatgtccggaagggagtggtagctgcactttgtgatgtagctacccattctcctgatgctattccaattgatacaattaaagtagtagctgagcgtgtccgtgataaatcgttggctgtgaagtgctataccatggagaggttggcagatatttacaagctatactgccagaggggttttgatagctcaacaaattctgatgattttgagtggatacctggaaaaatattaagatgtctttatgacaaagattttaggccagagtcaatcaactctattttgtgtggttcattgttcccaccagagtttccaatgaaaggaagagtgaaacattgggttacagctgcgacatactttgataaagttgagatgaaagctcttgaacaaattctcctgcagaagcaaagactgcaacaagaaatgatgaaatacatatcacttcggcaactaagccaggaagatgcccctgatctgcaaaaaagaatcatcggatgtttccggaacatatctcgcttatttagtgattctgcaaagtgtgaggagaacttgaacatgcttcatcagctaaaagatgctgatatctggaaaatattcactagcctgcttaattgttcaactacatttgagaaagcttggtctcttcgggcagatttgcttaagatatttggtgaaaaacatgtgctttataattttgttggcgcattagcaatgggatgttcatatttacttgtaaacaaggagtatgcaaaagagatcctttctgaagcttctgaacagaagacttctgggaatacaaaactcatctcatcatgcatgaatcttctaacggcaatatctagtttctttccgtctcttttgtctggacttgaagaagacattgttgaactcctgaaagaggataatgaagtgcttaaagagggtattgcacatgtgttatcgaaggctggtggcactattcgtgaacagttagcctcaacaagttcccttgatcttctattagagcgtttatgcttagagggtacacggaggcaggctaaatactctgttcatgcacttgctgccattacaaaagatgatggtcttatgtcactatctgttctttacaaggatatggttcgaaattcttctaataaatctgaatggggtgatagcacagagaattgtttgctaaagatttatggcatcaaaacattggtgaagagctatctaccttgcaaagatgctcatgcacagccaggaatagagaagttaattgatattctgaagaatattcttacttacggtgacgtatctccaaatatggtctcaagtgctgctgataaggcccatttgaggcttgccgcagcaaaagctgttctccgcttatcaaaacaatgggaccataaagtgcctgttgatgtattttatttgactttgaggatttcacaggatgattttcctcaggtgaggaaattatttctttgtaaagttctgcaatatatcaaggaaagggccttggatgcaaaatatgcctgcaccttcatgtttggtgttaacgattatcatgccccgccgtacgaagagttcaagtacaatctgactgaagtggttcagatatgccaacaagttaagatgcgccaactttcagtccaagcagatatggatttgttgacggcttacccagaatacataatttcctttttggttcatgccctcgctcatgatccttcatccccggaaattgaagaacatgaaaacgtcaatgcatttggtccaatttactggcgactatatctgattctttcaatcctcctgggggaagaaggtttgcaacatagtgtcccaggcatgaaaaaggacagcttcactacaataatatctatattcaaaagtataaaatcttcacaggatgtggttgatggaagtaagaccaagactgtgtgtgctatatgtgatcttggtactcttattgcaaagaggttatgccaagaccaaacgagtttatcagaagctcaaacagttccattgcctgctcaactttacacgccgcttcatgataaccaaaatgaaaattctgtggagaataatgagcagatttggctgggatgtgagaaagtactggcccattttgaggctgtaaggactgcaaatatggataaggttgaatctcccaaacataagatgcttattgatgtgactgatgaatttggaaatgaagttcctcttggcaaaattgtcaaacttcttaaatcacgaggagaaaggaagattggggaaaagcagaaggcaccatctagtagttcagtaaatgcagagaacgatgatgttctgggtttagtaagagaaattaacttaaacaatcaagaagatttggaggaatcgcataaggacaagtctgagaagcgtcatacaaatgcaaaagatagtaaccagaaaccacttgatttttcttcacctaaacgcaaaagatcaatttctaagagtagaccacattcagcaaaaggtagtaaaagcagtgatgagcgtctactacatactcctaactcagagaggaccaatatctccttggaaactaagatgaaggagaaagacagagatgattcaactgatacagaactgttagtatctccaagcactagaacccctgtatctaaacaaaataagggtgctaagaaatccaatattaatattttgagcagtgttccaaagaagtctgctgatgcagacagtactaagagaactgttgaaccgagaagtctaaatgggtcactcaaaaggcaaaagtcaaaaccaatttctggtttactaaagtgctcaacacaagactcaagcagtacagacttggtaggacaccgaataaaagtttggtggcctttggataagagattttatgaaggtgccgtgcaatcatacgattcatccaagaaaaaacatagggtgctatacgatgacggagatgttgaagtgcttaacttggctaaagagaagtggatactgattgaaagtaatgactcatcagtgaagaggcaaaagaaggatcatcttgggacaaacccaggaagtcaccttgcagagcactggagataactagcagcagcaagtctcctcctagcctg

SEQ ID NO: 62259 - DNA, 4275 bp, Zea Mays
caaaagccgagggagcccttccttctcagattagaacccaaacgagtgcgctttgaagcgggggctgcgagctcggtgcgcgaattgggcggtcgatcaggcgcggcggccgggcatggcggccgtggagcagttgaaggagctgggggagaagctgcaggcggtggcgccggcgcctgcggacgaactcgccaagcttctcgaaaaagctgtggagtgcttacatggaatagagcagtcaccagtatcatcagtgatggaagctattcaaccaagtctaaaggctgttaccagagaagaattgctgaagcatgaggatgacaatgtcaaagttctcttggcaacatgtttctgtgaaattacaagaataactgcacctgatgctccctacaacgatgacattttaagggatatattctatctgatcgtgggtacatttggcggactcaatgatgttaatagtcaatcctttggcaggaaggttgctattcttgaaacagttgctagataccgagcatgtgttgtgatgttagatcttgaatgtgatgatctcatcacaaacatgtttcaaacatttttagttgttgtcagtgagagtcatgaagaatacattgtaaagtcaatgcagacaataatgacccttattatagatgagagtgaagatgtacacgagagtcttctacgtgtactgttgtcagcattggggcagaaaaaaactggtgctgcaatgtctgcgcgtaaacttgcttgcagtgtcatcgagcattctgctacaaagcttgaaccttatctaaagaaatttctaatgtcatcatgggctgggaatgtcagttcttctaatgatcaaattgatcaccagggagttgtatttgatttatatcagtgtgctccgaaggttcttaaggtgatcgtgccatatattactggggaactactggcagatgaagtagataatcggtccaagtcagttgaattacttggggaaattttttccttacctggatcccctattgtggaatgcttcgagactcttttcacagagtttctcaagagactgaccgatagagttgttgaaattcgtatttctgtggttgagtatttgaagagatgtctaatatcaaatccttcccgagctgaagctcctgaaatcatcaaggcactttgtgacagactgttggattatgaagaaaatgtccggaagggagtggtagctgcactttgtgatgtagctacccattctcctgatgctattccaattgatacaattaaagtagtagctgagcgtgtccgtgataaatcgttggctgtgaagtgctataccatggagaggttggcagatatttacaagctatactgccagaggggttttgatagctcaacaaattctgatgattttgagtggatacctggaaaaatattaagatgtctttatgacaaagattttaggccagagtcaatcaactctattttgtgtggttcattgttcccaccagagtttccaatgaaaggaagagtgaaacattgggttacagctgcgacatactttgataaagttgagatgaaagctcttgaacaaattctcctgcagaagcaaagactgcaacaagaaatgatgaaatacatatcacttcggcaactaagccaggaagatgcccctgatctgcaaaaaagaatcatcggatgtttccggaacatatctcgcttatttagtgattctgcaaagtgtgaggagaacttgaacatgcttcatcagctaaaagatgctgatatctggaaaatattcactagcctgcttaattgttcaactacatttgagaaagcttggtctcttcgggcagatttgcttaagatatttggtgaaaaacatgtgctttataattttgttggcgcattagcaatgggatgttcatatttacttgtaaacaaggagtatgcaaaagagatcctttctgaagcttctgaacagaagacttctgggaatacaaaactcatctcatcatgcatgaatcttctaacggcaatatctagtttctttccgtctcttttgtctggacttgaagaagacattgttgaactcctgaaagaggataatgaagtgcttaaagagggtattgcacatgtgttatcgaaggctggtggcactattcgtgaacagttagcctcaacaagttcccttgatcttctattagagcgtttatgcttagagggtacacggaggcaggctaaatactctgttcatgcacttgctgccattacaaaagatgatggtcttatgtcactatctgttctttacaaggatatggttcgaaattcttctaataaatctgaatggggtgatagcacagagaattgtttgctaaagatttatggcatcaaaacattggtgaagagctatctaccttgcaaagatgctcatgcacagccaggaatagagaagttaattgatattctgaagaatattcttacttacggtgacgtatctccaaatatggtctcaagtgctgctgataaggcccatttgaggcttgccgcagcaaaagctgttctccgcttatcaaaacaatgggaccataaagtgcctgttgatgtattttatttgactttgaggatttcacaggatgattttcctcaggtgaggaaattatttctttgtaaagttctgcaatatatcaaggaaagggccttggatgcaaaatatgcctgcaccttcatgtttggtgttaacgattatcatgccccgccgtacgaagagttcaagtacaatctgactgaagtggttcagatatgccaacaagttaagatgcgccaactttcagtccaagcagatatggatttgttgacggcttacccagaatacataatttcctttttggttcatgccctcgctcatgatccttcatccccggaaattgaagaacatgaaaacgtcaatgcatttggtccaatttactggcgactatatctgattctttcaatcctcctgggggaagaaggtttgcaacatagtgtcccaggcatgaaaaaggacagcttcactacaataatatctatattcaaaagtataaaatcttcacaggatgtggttgatggaagtaagaccaagactgtgtgtgctatatgtgatcttggtactcttattgcaaagaggttatgccaagaccaaacgagtttatcagaagctcaaacagttccattgcctgctcaactttacacgccgcttcatgataaccaaaatgaaaattctgtggagaataatgagcagatttggctgggatgtgagaaagtactggcccattttgaggctgtaaggactgcaaatatggataaggttgaatctcccaaacataagatgcttattgatgtgactgatgaatttggaaatgaagttcctcttggcaaaattgtcaaacttcttaaatcacgaggagaaaggaagattggggaaaagcagaaggcaccatctagtagttcagtaaatgcagagaacgatgatgttctgggtttagtaagagaaattaacttaaacaatcaagaagatttggaggaatcgcataaggacaagtctgagaagcgtcatacaaatgcaaaagatagtaaccagaaaccacttgatttttcttcacctaaacgcaaaagatcaatttctaagagtagaccacattcagcaaaaggtagtaaaagcagtgatgagcgtctactacatactcctaactcagagaggaccaatatctccttggaaactaagatgaaggagaaagacagagatgattcaactgatacagaactgttagtatctccaagcactagaacccctgtatctaaacaaaataagggtgctaagaaatccaatattaatattttgagcagtgttccaaagaagtctgctgatgcagacagtactaagagaactgttgaaccgagaagtctaaatgggtcactcaaaaggcaaaagtcaaaaccaatttctggtttactaaagtgctcaacacaagactcaagcagtacagacttggtaggacaccgaataaaagtttggtggcctttggataagagagattttatgaaggtgccgtgcaatcatacgattcatccaagaaaaaacatagggtgctatacgatgacggagatgttgaagtgcttaacttggctaaagagaagtggatactgattgaaagtaatgactcatcagtgaagaggcaaaagaaggatcatcttgggacaaacccaggaagagcactggagataactagcagcagcaagtctcctcctagcctg

SEQ ID NO: 62260 - DNA, 4599 bp, Zea Mays
ctaccccttcacgccaatttcgaaacagcgcgagacgagaccgcgagagtagccaaaagccgagggagcccttccttctcagattagaacccaaacgagtgcgctttgaagcgggggctgcgagctcggtgcgcgaattgggcggtcgatcaggcgcggcggccgggcatggcggccgtggagcagttgaaggagctgggggagaagctgcaggcggtggcgccggcgcctgcggacgaactcgccaagcttctcgaaaaagctgtggagtgcttacatggaatagagcagtcaccagtatcatcagtgatggaagctattcaaccaagtctaaaggctgttaccagagaagaattgctgaagcatgaggatgacaatgtcaaagttctcttggcaacatgtttctgtgaaattacaagaataactgcacctgatgctccctacaacgatgacattttaagggatatattctatctgatcgtgggtacatttggcggactcaatgatgttaatagtcaatcctttggcaggaaggttgctattcttgaaacagttgctagataccgagcatgtgttgtgatgttagatcttgaatgtgatgatctcatcacaaacatgtttcaaacatttttagttgttgtcagtgagagtcatgaagaatacattgtaaagtcaatgcagacaataatgacccttattatagatgagagtgaagatgtacacgagagtcttctacgtgtactgttgtcagcattggggcagaaaaaaactggtgctgcaatgtctgcgcgtaaacttgcttgcagtgtcatcgagcattctgctacaaagcttgaaccttatctaaagaaatttctaatgtcatcatgggctgggaatgtcagttcttctaatgatcaaattgatcaccagggagttgtatttgatttatatcagtgtgctccgaaggttcttaaggtgatcgtgccatatattactggggaactactggcagatgaagtagataatcggtccaagtcagttgaattacttggggaaattttttccttacctggatcccctattgtggaatgcttcgagactcttttcacagagtttctcaagagactgaccgatagagttgttgaaattcgtatttctgtggttgagtatttgaagagatgtctaatatcaaatccttcccgagctgaagctcctgaaatcatcaaggcactttgtgacagactgttggattatgaagaaaatgtccggaagggagtggtagctgcactttgtgatgtagctacccattctcctgatgctattccaattgatacaattaaagtagtagctgagcgtgtccgtgataaatcgttggctgtgaagtgctataccatggagaggttggcagatatttacaagctatactgccagaggggttttgatagctcaacaaattctgatgattttgagtggatacctggaaaaatattaagatgtctttatgacaaagattttaggccagagtcaatcaactctattttgtgtggttcattgttcccaccagagtttccaatgaaaggaagagtgaaacattgggttacagctgcgacatactttgataaagttgagatgaaagctcttgaacaaattctcctgcagaagcaaagactgcaacaagaaatgatgaaatacatatcacttcggcaactaagccaggaagatgcccctgatctgcaaaaaagaatcatcggatgtttccggaacatatctcgcttatttagtgattctgcaaagtgtgaggagaacttgaacatgcttcatcagctaaaagatgctgatatctggaaaatattcactagcctgcttaattgttcaactacatttgagaaagcttggtctcttcgggcagatttgcttaagatatttggtgaaaaacatgtgctttataattttgttggcgcattagcaatgggatgttcatatttacttgtaaacaaggagtatgcaaaagagatcctttctgaagcttctgaacagaagacttctgggaatacaaaactcatctcatcatgcatgaatcttctaacggcaatatctagtttctttccgtctcttttgtctggacttgaagaagacattgttgaactcctgaaagaggataatgaagtgcttaaagagggtattgcacatgtgttatcgaaggctggtggcactattcgtgaacagttagcctcaacaagttcccttgatcttctattagagcgtttatgcttagagggtacacggaggcaggctaaatactctgttcatgcacttgctgccattacaaaagatgatggtcttatgtcactatctgttctttacaaggatatggttcgaaattcttctaataaatctgaatggggtgatagcacagagaattgtttgctaaagatttatggcatcaaaacattggtgaagagctatctaccttgcaaagatgctcatgcacagccaggaatagagaagttaattgatattctgaagaatattcttacttacggtgacgtatctccaaatatggtctcaagtgctgctgataaggcccatttgaggcttgccgcagcaaaagctgttctccgcttatcaaaacaatgggaccataaagtgcctgttgatgtattttatttgactttgaggatttcacaggatgattttcctcaggtgaggaaattatttctttgtaaagttctgcaatatatcaaggaaagggccttggatgcaaaatatgcctgcaccttcatgtttggtgttaacgattatcatgccccgccgtacgaagagttcaagtacaatctgactgaagtggttcagatatgccaacaagttaagatgcgccaactttcagtccaagcagatatggatttgttgacggcttacccagaatacataatttcctttttggttcatgccctcgctcatgatccttcatccccggaaattgaagaacatgaaaacgtcaatgcatttggtccaatttactggcgactatatctgattctttcaatcctcctgggggaagaaggtttgcaacatagtgtcccaggcatgaaaaaggacagcttcactacaataatatctatattcaaaagtataaaatcttcacaggatgtggttgatggaagtaagaccaagactgtgtgtgctatatgtgatcttggtactcttattgcaaagaggttatgccaagaccaaacgagtttatcagaagctcaaacagttccattgcctgctcaactttacacgccgcttcatgataaccaaaatgaaaattctgtggagaataatgagcagatttggctgggatgtgagaaagtactggcccattttgaggctgtaaggactgcaaatatggataaggttgaatctcccaaacataagatgcttattgatgtgactgatgaatttggaaatgaagttcctcttggcaaaattgtcaaacttcttaaatcacgaggagaaaggaagattggggaaaagcagaaggcaccatctagtagttcagtaaatgcagagaacgatgatgttctgggtttagtaagagaaattaacttaaacaatcaagaagatttggaggaatcgcataaggacaagtctgagaagcgtcatacaaatgcaaaagatagtaaccagaaaccacttgatttttcttcacctaaacgcaaaagatcaatttctaagagtagaccacattcagcaaaaggtagtaaaagcagtgatgagcgtctactacatactcctaactcagagaggaccaatatctccttggaaactaagatgaaggagaaagacagagatgattcaactgatacagaactgttagtatctccaagcactagaacccctgtatctaaacaaaataagggtgctaagaaatccaatattaatattttgagcagtgttccaaagaagtctgctgatgcagacagtactaagagaactgttgaaccgagaagtctaaatgggtcactcaaaaggcaaaagtcaaaaccaatttctggtttactaaagtgctcaacacaagactcaagcagtacagacttggtaggacaccgaataaaagtttggtggcctttggataagagattttatgaaggtgccgtgcaatcatacgattcatccaagaaaaaacatagggtgctatacgatgacggagatgttgaagtgcttaacttggctaaagagaagtggatactgattgaaagtaatgactcatcagtgaagaggcaaaagaaggatcatcttgggacaaacccaggaaggtgagctggtattttgtttaatttagaatctactctaataaactgctgtgccactgttggagaagctaagaaacaggcatatgcaaagcattggattaacataaataactaaacatatactacctccatttttctttatttgatgccggatagtacaaatatacgctaacaaacgtcaaattaaaaaaacggagggggttgttagtattaaagtcctctgtatatatagtagcatgtggtgtcatttataaactacactcagtcaccttgcagagcactggagataactagcagcagcaagtctcctcctagcctg

SEQ ID NO: 62261 - DNA, 4410 bp, Zea Mays
ctggactccgagacccaaaccagaccgactcgatcccaattctcaaaccagctttggcattcgtctctctctctccctaccccttcacgccaatttcgaaacagcgcgagacgagaccgcgagagtagccaaaagccgagggagcccttccttctcagattagaacccaaacgagtgcgctttgaagcgggggctgcgagctcggtgcgcgaattgggcggtcgatcaggcgcggcggccgggcatggcggccgtggagcagttgaaggagctgggggagaagctgcaggcggtggcgccggcgcctgcggacgaactcgccaagcttctcgaatgctgcagaaagctgtggagtgcttacatggaatagagcagtcaccagtatcatcagtgatggaagctattcaaccaagtctaaaggctgttaccagagaagaattgctgaagcatgaggatgacaatgtcaaagttctcttggcaacatgtttctgtgaaattacaagaataactgcacctgatgctccctacaacgatgacattttaagggatatattctatctgatcgtgggtacatttggcggactcaatgatgttaatagtcaatcctttggcaggaaggttgctattcttgaaacagttgctagataccgagcatgtgttgtgatgttagatcttgaatgtgatgatctcatcacaaacatgtttcaaacatttttagttgttgtcagtgagagtcatgaagaatacattgtaaagtcaatgcagacaataatgacccttattatagatgagagtgaagatgtacacgagagtcttctacgtgtactgttgtcagcattggggcagaaaaaaactggtgctgcaatgtctgcgcgtaaacttgcttgcagtgtcatcgagcattctgctacaaagcttgaaccttatctaaagaaatttctaatgtcatcatgggctgggaatgtcagttcttctaatgatcaaattgatcaccagggagttgtatttgatttatatcagtgtgctccgaaggttcttaaggtgatcgtgccatatattactggggaactactggcagatgaagtagataatcggtccaagtcagttgaattacttggggaaattttttccttacctggatcccctattgtggaatgcttcgagactcttttcacagagtttctcaagagactgaccgatagagttgttgaaattcgtatttctgtggttgagtatttgaagagatgtctaatatcaaatccttcccgagctgaagctcctgaaatcatcaaggcactttgtgacagactgttggattatgaagaaaatgtccggaagggagtggtagctgcactttgtgatgtagctacccattctcctgatgctattccaattgatacaattaaagtagtagctgagcgtgtccgtgataaatcgttggctgtgaagtgctataccatggagaggttggcagatatttacaagctatactgccagaggggttttgatagctcaacaaattctgatgattttgagtggatacctggaaaaatattaagatgtctttatgacaaagattttaggccagagtcaatcaactctattttgtgtggttcattgttcccaccagagtttccaatgaaaggaagagtgaaacattgggttacagctgcgacatactttgataaagttgagatgaaagctcttgaacaaattctcctgcagaagcaaagactgcaacaagaaatgatgaaatacatatcacttcggcaactaagccaggaagatgcccctgatctgcaaaaaagaatcatcggatgtttccggaacatatctcgcttatttagtgattctgcaaagtgtgaggagaacttgaacatgcttcatcagctaaaagatgctgatatctggaaaatattcactagcctgcttaattgttcaactacatttgagaaagcttggtctcttcgggcagatttgcttaagatatttggtgaaaaacatgtgctttataattttgttggcgcattagcaatgggatgttcatatttacttgtaaacaaggagtatgcaaaagagatcctttctgaagcttctgaacagaagacttctgggaatacaaaactcatctcatcatgcatgaatcttctaacggcaatatctagtttctttccgtctcttttgtctggacttgaagaagacattgttgaactcctgaaagaggataatgaagtgcttaaagagggtattgcacatgtgttatcgaaggctggtggcactattcgtgaacagttagcctcaacaagttcccttgatcttctattagagcgtttatgcttagagggtacacggaggcaggctaaatactctgttcatgcacttgctgccattacaaaagatgatggtcttatgtcactatctgttctttacaaggatatggttcgaaattcttctaataaatctgaatggggtgatagcacagagaattgtttgctaaagatttatggcatcaaaacattggtgaagagctatctaccttgcaaagatgctcatgcacagccaggaatagagaagttaattgatattctgaagaatattcttacttacggtgacgtatctccaaatatggtctcaagtgctgctgataaggcccatttgaggcttgccgcagcaaaagctgttctccgcttatcaaaacaatgggaccataaagtgcctgttgatgtattttatttgactttgaggatttcacaggatgattttcctcaggtgaggaaattatttctttgtaaagttctgcaatatatcaaggaaagggccttggatgcaaaatatgcctgcaccttcatgtttggtgttaacgattatcatgccccgccgtacgaagagttcaagtacaatctgactgaagtggttcagatatgccaacaagttaagatgcgccaactttcagtccaagcagatatggatttgttgacggcttacccagaatacataatttcctttttggttcatgccctcgctcatgatccttcatccccggaaattgaagaacatgaaaacgtcaatgcatttggtccaatttactggcgactatatctgattctttcaatcctcctgggggaagaaggtttgcaacatagtgtcccaggcatgaaaaaggacagcttcactacaataatatctatattcaaaagtataaaatcttcacaggatgtggttgatggaagtaagaccaagactgtgtgtgctatatgtgatcttggtactcttattgcaaagaggttatgccaagaccaaacgagtttatcagaagctcaaacagttccattgcctgctcaactttacacgccgcttcatgataaccaaaatgaaaattctgtggagaataatgagcagatttggctgggatgtgagaaagtactggcccattttgaggctgtaaggactgcaaatatggataaggttgaatctcccaaacataagatgcttattgatgtgactgatgaatttggaaatgaagttcctcttggcaaaattgtcaaacttcttaaatcacgaggagaaaggaagattggggaaaagcagaaggcaccatctagtagttcagtaaatgcagagaacgatgatgttctgggtttagtaagagaaattaacttaaacaatcaagaagatttggaggaatcgcataaggacaagtctgagaagcgtcatacaaatgcaaaagatagtaaccagaaaccacttgatttttcttcacctaaacgcaaaagatcaatttctaagagtagaccacattcagcaaaaggtagtaaaagcagtgatgagcgtctactacatactcctaactcagagaggaccaatatctccttggaaactaagatgaaggagaaagacagagatgattcaactgatacagaactgttagtatctccaagcactagaacccctgtatctaaacaaaataagggtgctaagaaatccaatattaatattttgagcagtgttccaaagaagtctgctgatgcagacagtactaagagaactgttgaaccgagaagtctaaatgggtcactcaaaaggcaaaagtcaaaaccaatttctggtttactaaagtgctcaacacaagactcaagcagtacagacttggtaggacaccgaataaaagtttggtggcctttggataagagattttatgaaggtgccgtgcaatcatacgattcatccaagaaaaaacatagggtgctatacgatgacggagatgttgaagtgcttaacttggctaaagagaagtggatactgattgaaagtaatgactcatcagtgaagaggcaaaagaaggatcatcttgggacaaacccaggaagagcactggagataactagcagcagcaagtctcctcctagcctg

SEQ ID NO: 62262 - DNA, 4414 bp, Zea Mays
caaactgctgggctggactccgagacccaaaccagaccgactcgatcccaattctcaaaccagctttggcattcgtctctctctctccctaccccttcacgccaatttcgaaacagcgcgagacgagaccgcgagagtagccaaaagccgagggagcccttccttctcagattagaacccaaacgagtgcgctttgaagcgggggctgcgagctcggtgcgcgaattgggcggtcgatcaggcgcggcggccgggcatggcggccgtggagcagttgaaggagctgggggagaagctgcaggcggtggcgccggcgcctgcggacgaactcgccaagcttctcgaaaaagctgtggagtgcttacatggaatagagcagtcaccagtatcatcagtgatggaagctattcaaccaagtctaaaggctgttaccagagaagaattgctgaagcatgaggatgacaatgtcaaagttctcttggcaacatgtttctgtgaaattacaagaataactgcacctgatgctccctacaacgatgacattttaagggatatattctatctgatcgtgggtacatttggcggactcaatgatgttaatagtcaatcctttggcaggaaggttgctattcttgaaacagttgctagataccgagcatgtgttgtgatgttagatcttgaatgtgatgatctcatcacaaacatgtttcaaacatttttagttgttgtcagtgagagtcatgaagaatacattgtaaagtcaatgcagacaataatgacccttattatagatgagagtgaagatgtacacgagagtcttctacgtgtactgttgtcagcattggggcagaaaaaaactggtgctgcaatgtctgcgcgtaaacttgcttgcagtgtcatcgagcattctgctacaaagcttgaaccttatctaaagaaatttctaatgtcatcatgggctgggaatgtcagttcttctaatgatcaaattgatcaccagggagttgtatttgatttatatcagtgtgctccgaaggttcttaaggtgatcgtgccatatattactggggaactactggcagatgaagtagataatcggtccaagtcagttgaattacttggggaaattttttccttacctggatcccctattgtggaatgcttcgagactcttttcacagagtttctcaagagactgaccgatagagttgttgaaattcgtatttctgtggttgagtatttgaagagatgtctaatatcaaatccttcccgagctgaagctcctgaaatcatcaaggcactttgtgacagactgttggattatgaagaaaatgtccggaagggagtggtagctgcactttgtgatgtagctacccattctcctgatgctattccaattgatacaattaaagtagtagctgagcgtgtccgtgataaatcgttggctgtgaagtgctataccatggagaggttggcagatatttacaagctatactgccagaggggttttgatagctcaacaaattctgatgattttgagtggatacctggaaaaatattaagatgtctttatgacaaagattttaggccagagtcaatcaactctattttgtgtggttcattgttcccaccagagtttccaatgaaaggaagagtgaaacattgggttacagctgcgacatactttgataaagttgagatgaaagctcttgaacaaattctcctgcagaagcaaagactgcaacaagaaatgatgaaatacatatcacttcggcaactaagccaggaagatgcccctgatctgcaaaaaagaatcatcggatgtttccggaacatatctcgcttatttagtgattctgcaaagtgtgaggagaacttgaacatgcttcatcagctaaaagatgctgatatctggaaaatattcactagcctgcttaattgttcaactacatttgagaaagcttggtctcttcgggcagatttgcttaagatatttggtgaaaaacatgtgctttataattttgttggcgcattagcaatgggatgttcatatttacttgtaaacaaggagtatgcaaaagagatcctttctgaagcttctgaacagaagacttctgggaatacaaaactcatctcatcatgcatgaatcttctaacggcaatatctagtttctttccgtctcttttgtctggacttgaagaagacattgttgaactcctgaaagaggataatgaagtgcttaaagagggtattgcacatgtgttatcgaaggctggtggcactattcgtgaacagttagcctcaacaagttcccttgatcttctattagagcgtttatgcttagagggtacacggaggcaggctaaatactctgttcatgcacttgctgccattacaaaagatgatggtcttatgtcactatctgttctttacaaggatatggttcgaaattcttctaataaatctgaatggggtgatagcacagagaattgtttgctaaagatttatggcatcaaaacattggtgaagagctatctaccttgcaaagatgctcatgcacagccaggaatagagaagttaattgatattctgaagaatattcttacttacggtgacgtatctccaaatatggtctcaagtgctgctgataaggcccatttgaggcttgccgcagcaaaagctgttctccgcttatcaaaacaatgggaccataaagtgcctgttgatgtattttatttgactttgaggatttcacaggatgattttcctcaggtgaggaaattatttctttgtaaagttctgcaatatatcaaggaaagggccttggatgcaaaatatgcctgcaccttcatgtttggtgttaacgattatcatgccccgccgtacgaagagttcaagtacaatctgactgaagtggttcagatatgccaacaagttaagatgcgccaactttcagtccaagcagatatggatttgttgacggcttacccagaatacataatttcctttttggttcatgccctcgctcatgatccttcatccccggaaattgaagaacatgaaaacgtcaatgcatttggtccaatttactggcgactatatctgattctttcaatcctcctgggggaagaaggtttgcaacatagtgtcccaggcatgaaaaaggacagcttcactacaataatatctatattcaaaagtataaaatcttcacaggatgtggttgatggaagtaagaccaagactgtgtgtgctatatgtgatcttggtactcttattgcaaagaggttatgccaagaccaaacgagtttatcagaagctcaaacagttccattgcctgctcaactttacacgccgcttcatgataaccaaaatgaaaattctgtggagaataatgagcagatttggctgggatgtgagaaagtactggcccattttgaggctgtaaggactgcaaatatggataaggttgaatctcccaaacataagatgcttattgatgtgactgatgaatttggaaatgaagttcctcttggcaaaattgtcaaacttcttaaatcacgaggagaaaggaagattggggaaaagcagaaggcaccatctagtagttcagtaaatgcagagaacgatgatgttctgggtttagtaagagaaattaacttaaacaatcaagaagatttggaggaatcgcataaggacaagtctgagaagcgtcatacaaatgcaaaagatagtaaccagaaaccacttgatttttcttcacctaaacgcaaaagatcaatttctaagagtagaccacattcagcaaaaggtagtaaaagcagtgatgagcgtctactacatactcctaactcagagaggaccaatatctccttggaaactaagatgaaggagaaagacagagatgattcaactgatacagaactgttagtatctccaagcactagaacccctgtatctaaacaaaataagggtgctaagaaatccaatattaatattttgagcagtgttccaaagaagtctgctgatgcagacagtactaagagaactgttgaaccgagaagtctaaatgggtcactcaaaaggcaaaagtcaaaaccaatttctggtttactaaagtgctcaacacaagactcaagcagtacagacttggtaggacaccgaataaaagtttggtggcctttggataagagattttatgaaggtgccgtgcaatcatacgattcatccaagaaaaaacatagggtgctatacgatgacggagatgttgaagtgcttaacttggctaaagagaagtggatactgattgaaagtaatgactcatcagtgaagaggcaaaagaaggatcatcttgggacaaacccaggaagagcactggagataactagcagcagcaagtctcctcctagcctg

SEQ ID NO: 62263 - DNA, 2546 bp, Zea Mays
caatcacgtacgaggaggcagactgcaagcacagccacttcgccagcgcgcctgcctcccaagtcccaagcagcgagctagtataggtgtgcagtgccgacctcccctccggcgatcgcccggccggccctcacggagtcctccgctctatcgccggcacgctctgtgcttataggcccgtttattttaccaaaggaccgaagcgccagagctatctacgcacaaaggcaaagtgctcctgctccgcctccgtcgatcttcgtctccggcttctgtcgcggatcgcggtgcagccggagcggccctgcagtatctacattctggtcggcagacaccatgcatgtctctttcgacgagccatctgtactgtactgtactacatgacgcagaaacaggacaggccaacagcaggaaaacgaagggacggcagcgcgacagcgcgcggccgccgtggttgttgcatcgtgcggtggagcttcggtagcgccctcgttatttaatggctcgcaggaccgtgcatcgctctcgctccgtgtaggtttattgcatacgtactagctaccactgttggtctgtcacgccggaggcaggtcgcagttattactttaacccggggccccatcggcgatggcggccaacggcggtgaccacacgagcgctagaccgcacgttgtcctgctccctagcgccggcatgggccacctggtcccgttcgcccgcctggcggtggcgctgtcggagggacacggctgcaacgtgtccgtggccgcggtgcagcccaccgtgtcgtcggcggagtccaggctcctcgacgcgctcttcgtcgccgcggccccggccgtccgccggctcgacttccgcctggcgccgttcgacgagtccgagttcccgggcgccgaccctttcttcctccgcttcgaggccacgcgccggtccgcgccgctgctcggcccgctcctcgacgccgccgaggcgtccgcgctcgtcacggacatcgttctggcgtccgtcgccctgcccgtcgccagggagcggggcgtcccgtgctacgtcctcttcacgtcctctgccgcgatgctctccctatgcgcctatttccccgcctacctcgacgcccacgccgccgccggcagcgtgggcgtgggcgtcggcaatgtcgacatccccggcgtgttccggatcccaaagtcatccgtcccgcaggcgctgcacgaccccgaccatctcttcacccaacagttcgtcgccaacggtcgctgcctcgtggcctgtgacggcatccttgtcaacacgttcgacgcctttgagccggacgccgttacggccctgcgccaaggctccattactgtctccggcggcttcccgcctgtgttcaccgtggggcccatgcttccggtgagatttcaggcggaggagacggcggattacatgagatggctcagcgcgcagccgccacggtctgtggtctacgtcagcttcggcagccgtaaggccataccgagggaccagctccgggagctcgcagccgggctcgaggccagcggcaaacggttcctgtgggtggtgaagagcaccatcgtggaccgggacgacaccgccgacctcggcggcctgcttggtgacgggttcctcgagcgagtgcaggggcgcgcgttcgttaccatggggtgggtggagcaagaggagatcctgcagcacggttccgtcggcctattcatcagtcactgcgggtggaactcgttgacggaggcagcggcgttcggtgtgccggtgctagcgtggccgaggttcggcgaccagcgcgtcaacgccgcactggtggcgcgcagcgggctgggcgcgtgggaggaggggtggacctgggatggagaggaagggctgacgactcgaaaggaggtggctaagaagataaaaggcatgatggggtatgatgcggtggcggaaaaggcagcgaaggtcggcgacgccgccgccgcggcaatagccaagtgcggcacgagctaccagagcttagaggaattcgttcagcggtgtcgggacgcggagcgtaagtaggctcgactgatttctgcgagcctgtaacagatacttggttcctgtgacgctgactgtagatcattttcggttgctagagttattttcgccggcctcttcctagccggctgcttatttttaggttggtctttgcttaaagccgccgaaaattaagctttgaaccctatctaattcaatcttttctcttccacgcactcgtttctttcaccgcgcgatgcctccacgctctcggcatccacgcgcggccgccccgttctctaccgaccgagccgtcgccccatctgccgccggccccaaccgggccagccaccggcgtctccgccctcggcaccagccagcagtccaaccaccgctgacgtcttcagtcgggccgcgccgcctcctctgccaccagccgaacggtcatcgccctcgcgtcgagctcccgtcttctgccggccacccttaagacgagatgttgattttttttgttattttatttattattttcg

SEQ ID NO: 62264 - DNA, 3919 bp, Zea Mays
cttgaaataaatattgttttagcctttcaaagggtgttcagcttgcgatcttcgcttggggcattgacctcacccaagtcttcgtcttccttctttggcagctgccagtttcatacaccactatttttatccagatccatccttggatttctcttcattccagatacatcttctctaaagcctaaaccccttgctctcttttcttccgatgtatagttggagagggcagtttcacctgcgaggctgaggtgagcaaccattgttggagagcaagcagccacatggccagcaccgctgccactccggaagcaggcagcaatcacagtgaagacggcaccacagtggagcttcccatcgtcgtcaccggcagcaccagccaagaatccattgatactccatccaccaggtacttgttagcccctagccatgtatccagctccagcttcaccgcagacattgagctcctgtggagactgcggaagtacctgctgcttcttggcatcttagctgttggtgttacatacaatgctggattgaccccacctggagggttctggtcgaagaacacacaagggcaatctggacatgaagcgggtgaccctgtcctccgggctctcttcttcccacggcacgaggtattcttctactgcaatgcaacagcctttgcagcgtctcttgtcctcatcatcttgcttctgagtaaaaacgtggcaaggcagaggctatggctccgctcaatgcaactcaccatggttctggacctgttcagcctgatgggggcctatgctgctggaagctgcagggcagtgaagtcctccatctacatctgggttctggtgctctctgttttcacatatattatgatccacatcctagtgttcatgaaagttgttccaagatttgtgtccgagaaaagatttgttccaaaacggctgaaagatgtggcgcggtctgtggagcgctggatcctatcccggtgtggtgttcacaggagtgaaaagaacagctctcacgagaaagatctagaggaagctcgcaagttcactctggtgcttgtgactttcgctgcaactgtggcataccaagcagggttgagtccaccgggtggtttttgggctgaaaatgatgagaacaaaactccagctacatctatgcttcgctctggaaaccttcctcgatataatacttttgttgtttgcaactcgacttccttcgttgcgtctttggtcacaatcatactgcttctaagcccagaactgagtcggcatggcatcagatccagagcggtgaccgtgtgtgttgttgtcgacatattgggccttgttggagcatatgctgcaggaagctgtaggagtgtggtcacatctgtctctgctgttttagtggctgttctagtatggatctgctttgcagttttagctgggatctttgttaacagatctgtagcagagtggtttgggaagaagatcaagccagatattatgaggtgcatcgacagatttggccgggtcttttcgtcgaaccatggcagaaagagatcaagaaatccggagggagagaattctattgcaagtcatcagcaaactgaagagagcataaaaggtgaagcagaagcagaaactgctagagtgccagaataccagcttccataccatcagctagctccagatattgaagagggtgaatgccctggggagcagcagagtccaggcaaacaacaacctacaaacattgaggttgtgtccatctcagagcatgcatctgtaaatgagaagcaagcagaaaatagcagcagtgtcatgtgcaagctgggaagtcagtctacagacccaaattcagctgcaaacgaggctatgactgaaactgaaacagaaaacatacaagatgcaaatatggaggaacaacaatcttccttggtggatggtcttaaaactcccactactgtggctgatcaagaatccacaaccgtggagtgcttgtccgacattgcacccaataaccataatggagccaccaacagtttcaaggaagagaaagaagcttcggagcagcatttgcaagccaatgagattgagagtttcagaaccaataatgtggccagacctgttgaaaatggcaacgttggcatgtatgaagtaactcccagacaagacgacggtgatgtaaatgctggtgccaatccaactgatgaacatctgaagaagtcccggacatacctccttcttctagccattcttgcagtatccctggcgtatcaatcaggtttaaatccaccaggtggtttctggacacaaagagggtcttacattatggggagtagtagggggacgaagagctccatatacatatggctgttggtatgccttgtgctggtttatgttgctgttcatgttctgatagcaacacatgtaatccctgaagggtgcaagaaggtcgtggcacagaagattgagaatttctcctgcagatacatatggacaaaggcttcgtttcggaaccggggaattgatggtaatggtagtgattgtgaggctgggcaaagccagaggagtgatgccgatgacaagacctgggagcggaggcgcaatctactgttgatgcttgctgttctagctgcaacagtcacgtaccaagctggcatcaaccctccaggaggtgtatggtctgatgatagctcagccagtggtaaaccaggagacccaatccttcagcacaacaattccaagcgctatgatgttttctactactcaaactcactctcattcgtggcatctgtagttatcacaatactgcttgtgaacaaggaatcctgcgagcatggtatcaagtcctatgcgctaagagtgtgtttggtggtgggcttggtgagcctcttgattgcctactctgcaggaagctctaggaaagcaagagaatctatctatctcatcgtcattgctgttgcagttctgattgctcttgtgattcaagtgcttcttctctcctgtacgcaagacagtctcagaggaccaactggacagtttatagaacgtctgctccagctgctttttgggacggacaaggcctggcatggagacacttctaaacagaaagaaagctcaggtcgtcccgagaaaaaagttcggaagaggcacaagtatttgatgctgcttgcagttttagctgcctccatcacgtatcaagctggtctcaacccacccggtggtttctggtccgacgacaatgaaggccatgtggaaggcaatcctggcctgaaaccacctggtgccttgtggtctgataacaaaggtcatttggcaggcaatcctgttctccttgatattaatcctcggcgctacgaaatattcttctgcttcaactctatctcgttcatggcatctattgtcgtagtcatgttcctgttgaacaaatctgcccggaagaaggccgtgccacttgaagtactgcacttgatcatgatactggacctgctggccctcatgactgcttttgctgctggaagctgcagaaaattcaggacttcagtctatgtgtatggtctagtgctcggtgtcgtggtataccttgtgatcgcagttcttttgtcaagtggcattgcaaaatgtctgagacccatggatagaaatagggtttcctctcagagaagtcctattcgcgctcctacagcaagcacaaggatacttggagaccatgcttgatggttccattcctttggtaatagtactagtttaatagtagtgtatgtatttggcttttcagtgtacgttatgttgtgggagtttgaattgaactgaaattcgacgctttatgttgttcatttcttttagaatgtaaaatcagtgcaatcatgaatctacatgtgtatgacgaaggttccaatgtatgcgatggaatgaaaggaaaattggtgccatagttt

SEQ ID NO: 62265 - DNA, 4291 bp, Zea Mays
agactctgcatgcactttactgtccttgtccttcagctccagtctgtgttgactgttgactaacagtgttgacgaggtcccacctagccaccacaagcccacaagtcattcacacttcgttgaaatgtcatacacgcatgcccatgcgctaataattgatttggatgttgtcgtctgtgtctgtgtggggtcatttagcctttcttttcttgaaataaatattgttttagcctttcaaagggtgttcagcttgcgatcttcgcttggggcattgacctcacccaagtcttcgtcttccttctttggcagctgccagtttcatacaccactatttttatccagatccatccttggatttctcttcattccagatacatcttctctaaagcctaaaccccttgctctcttttcttccgatgtatagttggagagggcagtttcacctgcgaggctgaggtgagcaaccattgttggagagcaagcagccacatggccagcaccgctgccactccggaagcaggcagcaatcacagtgaagacggcaccacagtggagcttcccatcgtcgtcaccggcagcaccagccaagaatccattgatactccatccaccaggtacttgttagcccctagccatgtatccagctccagcttcaccgcagacattgagctcctgtggagactgcggaagtacctgctgcttcttggcatcttagctgttggtgttacatacaatgctggattgaccccacctggagggttctggtcgaagaacacacaagggcaatctggacatgaagcgggtgaccctgtcctccgggctctcttcttcccacggcacgaggtattcttctactgcaatgcaacagcctttgcagcgtctcttgtcctcatcatcttgcttctgagtaaaaacgtggcaaggcagaggctatggctccgctcaatgcaactcaccatggttctggacctgttcagcctgatgggggcctatgctgctggaagctgcagggcagtgaagtcctccatctacatctgggttctggtgctctctgttttcacatatattatgatccacatcctagtgttcatgaaagttgttccaagatttgtgtccgagaaaagatttgttccaaaacggctgaaagatgtggcgcggtctgtggagcgctggatcctatcccggtgtggtgttcacaggagtgaaaagaacagctctcacgagaaagatctagaggaagctcgcaagttcactctggtgcttgtgactttcgctgcaactgtggcataccaagcagggttgagtccaccgggtggtttttgggctgaaaatgatgagaacaaaactccagctacatctatgcttcgctctggaaaccttcctcgatataatacttttgttgtttgcaactcgacttccttcgttgcgtctttggtcacaatcatactgcttctaagcccagaactgagtcggcatggcatcagatccagagcggtgaccgtgtgtgttgttgtcgacatattgggccttgttggagcatatgctgcaggaagctgtaggagtgtggtcacatctgtctctgctgttttagtggctgttctagtatggatctgctttgcagttttagctgggatctttgttaacagatctgtagcagagtggtttgggaagaagatcaagccagatattatgaggtgcatcgacagatttggccgggtcttttcgtcgaaccatggcagaaagagatcaagaaatccggagggagagaattctattgcaagtcatcagcaaactgaagagagcataaaaggtgaagcagaagcagaaactgctagagtgccagaataccagcttccataccatcagctagctccagatattgaagagggtgaatgccctggggagcagcagagtccaggcaaacaacaacctacaaacattgaggttgtgtccatctcagagcatgcatctgtaaatgagaagcaagcagaaaatagcagcagtgtcatgtgcaagctgggaagtcagtctacagacccaaattcagctgcaaacgaggctatgactgaaactgaaacagaaaacatacaagatgcaaatatggaggaacaacaatcttccttggtggatggtcttaaaactcccactactgtggctgtttcaaggaagagaaagaagcttcggagcagcatttgcaagccaatgagattgagagtttcagaaccaataatgtggccagacctgttgaaaatggcaacgttggcatgtatgaagtaactcccagacaagacgacggtgatgtaaatgctggtgccaatccaactgatgaacatctgaagaagtcccggacatacctccttcttctagccattcttgcagtatccctggcgtatcaatcaggtttaaatccaccaggtggtttctggacacaaagaggtaccaacaattcacctaagagcacccatcatcgtccctatcatttaccgggtgatcccatccttgaggatactcgccatcgacgctatattgcattcttctatttaaacgccatcgcctttgtggcatcccttgtcatgatcatcatgctcctgaaccggaggatgagctacaagggcataaaacgatatgcgctgcagatggctatgatagttgatcttcttgctctaacagggtcttacattatggggagtagtagggggacgaagagctccatatacatatggctgttggtatgccttgtgctggtttatgttgctgttcatgttctgatagcaacacatgtaatccctgaagggtgcaagaaggtcgtggcacagaagattgagaatttctcctgcagatacatatggacaaaggcttcgtttcggaaccggggaattgatggtaatggtagtgattgtgaggctgggcaaagccagaggagtgatgccgatgacaagacctgggagcggaggcgcaatctactgttgatgcttgctgttctagctgcaacagtcacgtaccaagctggcatcaaccctccaggaggtgtatggtctgatgatagctcagccagtggtaaaccaggagacccaatccttcagcacaacaattccaagcgctatgatgttttctactactcaaactcactctcattcgtggcatctgtagttatcacaatactgcttgtgaacaaggaatcctgcgagcatggtatcaagtcctatgcgctaagagtgtgtttggtggtgggcttggtgagcctcttgattgcctactctgcaggaagctctaggaaagcaagagaatctatctatctcatcgtcattgctgttgcagttctgattgctcttgtgattcaagtgcttcttctctcctgtacgcaagacagtctcagaggaccaactggacagtttatagaacgtctgctccagctgctttttgggacggacaaggcctggcatggagacacttctaaacagaaagaaagctcaggtcgtcccgagaaaaaagttcggaagaggcacaagtatttgatgctgcttgcagttttagctgcctccatcacgtatcaagctggtctcaacccacccggtggtttctggtccgacgacaatgaaggccatgtggaaggcaatcctggcctgaaaccacctggtgccttgtggtctgataacaaaggtcatttggcaggcaatcctgttctccttgatattaatcctcggcgctacgaaatattcttctgcttcaactctatctcgttcatggcatctattgtcgtagtcatgttcctgttgaacaaatctgcccggaagaaggccgtgccacttgaagtactgcacttgatcatgatactggacctgctggccctcatgactgcttttgctgctggaagctgcagaaaattcaggacttcagtctatgtgtatggtctagtgctcggtgtcgtggtataccttgtgatcgcagttcttttgtcaagtggcattgcaaaatgtctgagacccatggatagaaatagggtttcctctcagagaagtcctattcgcgctcctacagcaagcacaaggatacttggagaccatgcttgatggttccattcctttggtaatagtactagtttaatagtagtgtatgtatttggcttttcagtgtacgttatgttgtgggagtttgaattgaactgaaattcgacgctttatgttgttcatttcttttagaatgtaaaatcagtgcaatcatgaatctacatgtgtatgacgaaggttccaatgtatgcgatggaatgaaaggaaaattggtgccatagttt

SEQ ID NO: 62266 - DNA, 4294 bp, Zea Mays
gcgcgatctgctgttaagaaagctcaagcaccgtaaagaaagttttccgtgggagaggaaaaaaaaaagactctgcatgcactttactgtccttgtccttcagctccagtctgtgttgactgttgactaacagtgttgacgaggtcccacctagccaccacaagcccacaagtcattcacacttcgttgaaatgtcatacacgcatgcccatgcgctaataattgatttggatgttgtcgtctgtgtctgtgtggggtcatttagcctttcttttcttgaaataaatattgttttagcctttcaaagggtgttcagcttgcgatcttcgcttggggcattgacctcacccaagtcttcgtcttccttctttggcagctgccagtttcatacaccactatttttatccagatccatccttggatttctcttcattccagatacatcttctctaaagcctaaaccccttgctctcttttcttccgatgtatagttggagagggcagtttcacctgcgaggctgaggtgagcaaccattgttggagagcaagcagccacatggccagcaccgctgccactccggaagcaggcagcaatcacagtgaagacggcaccacagtggagcttcccatcgtcgtcaccggcagcaccagccaagaatccattgatactccatccaccaggtacttgttagcccctagccatgtatccagctccagcttcaccgcagacattgagctcctgtggagactgcggaagtacctgctgcttcttggcatcttagctgttggtgttacatacaatgctggattgaccccacctggagggttctggtcgaagaacacacaagggcaatctggacatgaagcgggtgaccctgtcctccgggctctcttcttcccacggcacgagcctgatgggggcctatgctgctggaagctgcagggcagtgaagtcctccatctacatctgggttctggtgctctctgttttcacatatattatgatccacatcctagtgttcatgaaagttgttccaagatttgtgtccgagaaaagatttgttccaaaacggctgaaagatgtggcgcggtctgtggagcgctggatcctatcccggtgtggtgttcacaggagtgaaaagaacagctctcacgagaaagatctagaggaagctcgcaagttcactctggtgcttgtgactttcgctgcaactgtggcataccaagcagggttgagtccaccgggtggtttttgggctgaaaatgatgagaacaaaactccagctacatctatgcttcgctctggaaaccttcctcgatataatacttttgttgtttgcaactcgacttccttcgttgcgtctttggtcacaatcatactgcttctaagcccagaactgagtcggcatggcatcagatccagagcggtgaccgtgtgtgttgttgtcgacatattgggccttgttggagcatatgctgcaggaagctgtaggagtgtggtcacatctgtctctgctgttttagtggctgttctagtatggatctgctttgcagttttagctgggatctttgttaacagatctgtagcagagtggtttgggaagaagatcaagccagatattatgaggtgcatcgacagatttggccgggtcttttcgtcgaaccatggcagaaagagatcaagaaatccggagggagagaattctattgcaagtcatcagcaaactgaagagagcataaaaggtgaagcagaagcagaaactgctagagtgccagaataccagcttccataccatcagctagctccagatattgaagagggtgaatgccctggggagcagcagagtccaggcaaacaacaacctacaaacattgaggttgtgtccatctcagagcatgcatctgtaaatgagaagcaagcagaaaatagcagcagtgtcatgtgcaagctgggaagtcagtctacagacccaaattcagctgcaaacgaggctatgactgaaactgaaacagaaaacatacaagatgcaaatatggaggaacaacaatcttccttggtggatggtcttaaaactcccactactgtggctgatcaagaatccacaaccgtggagtgcttgtccgacattgcacccaataaccataatggagccaccaacagtttcaaggaagagaaagaagcttcggagcagcatttgcaagccaatgagattgagagtttcagaaccaataatgtggccagacctgttgaaaatggcaacgttggcatgtatgaagtaactcccagacaagacgacggtgatgtaaatgctggtgccaatccaactgatgaacatctgaagaagtcccggacatacctccttcttctagccattcttgcagtatccctggcgtatcaatcaggtttaaatccaccaggtggtttctggacacaaagaggtaccaacaattcacctaagagcacccatcatcgtccctatcatttaccgggtgatcccatccttgaggatactcgccatcgacgctatattgcattcttctatttaaacgccatcgcctttgtggcatcccttgtcatgatcatcatgctcctgaaccggaggatgagctacaagggcataaaacgatatgcgctgcagatggctatgatagttgatcttcttgctctaacagggtcttacattatggggagtagtagggggacgaagagctccatatacatatggctgttggtatgccttgtgctggtttatgttgctgttcatgttctgatagcaacacatgtaatccctgaagggtgcaagaaggtcgtggcacagaagattgagaatttctcctgcagatacatatggacaaaggcttcgtttcggaaccggggaattgatggtaatggtagtgattgtgaggctgggcaaagccagaggagtgatgccgatgacaagacctgggagcggaggcgcaatctactgttgatgcttgctgttctagctgcaacagtcacgtaccaagctggcatcaaccctccaggaggtgtatggtctgatgatagctcagccagtggtaaaccaggagacccaatccttcagcacaacaattccaagcgctatgatgttttctactactcaaactcactctcattcgtggcatctgtagttatcacaatactgcttgtgaacaaggaatcctgcgagcatggtatcaagtcctatgcgctaagagtgtgtttggtggtgggcttggtgagcctcttgattgcctactctgcaggaagctctaggaaagcaagagaatctatctatctcatcgtcattgctgttgcagttctgattgctcttgtgattcaagtgcttcttctctcctgtacgcaagacagtctcagaggaccaactggacagtttatagaacgtctgctccagctgctttttgggacggacaaggcctggcatggagacacttctaaacagaaagaaagctcaggtcgtcccgagaaaaaagttcggaagaggcacaagtatttgatgctgcttgcagttttagctgcctccatcacgtatcaagctggtctcaacccacccggtggtttctggtccgacgacaatgaaggccatgtggaaggcaatcctggcctgaaaccacctggtgccttgtggtctgataacaaaggtcatttggcaggcaatcctgttctccttgatattaatcctcggcgctacgaaatattcttctgcttcaactctatctcgttcatggcatctattgtcgtagtcatgttcctgttgaacaaatctgcccggaagaaggccgtgccacttgaagtactgcacttgatcatgatactggacctgctggccctcatgactgcttttgctgctggaagctgcagaaaattcaggacttcagtctatgtgtatggtctagtgctcggtgtcgtggtataccttgtgatcgcagttcttttgtcaagtggcattgcaaaatgtctgagacccatggatagaaatagggtttcctctcagagaagtcctattcgcgctcctacagcaagcacaaggatacttggagaccatgcttgatggttccattcctttggtaatagtactagtttaatagtagtgtatgtatttggcttttcagtgtacgttatgttgtgggagtttgaattgaactgaaattcgacgctttatgttgttcatttcttttagaatgtaaaatcagtgcaatcatgaatctacatgtgtatgacgaaggttccaatgtatgcgatggaatgaaaggaaaattggtgccatagttt

SEQ ID NO: 62267 - DNA, 2638 bp, Zea Mays
taagcaaaagatagagtcatagaaccctggcattgacataaaaccaccacatatatcccattggccattcccatctgctgatcctgaccggccgacccgtcggccgtcgccaactcgtctgctcagcccatctgtatcacaattcccaagagcttgagctccaagtacccggcctgcgcccacggccgggcccaggaaccgccgttctgctgcaccggcggcggaagaagagacggatagcgtggggatccggctgatgcgccggcggcaatgggcatttgggattccattctccccggcggcggccggcgcttcatcaagcgcaaggacagcgacgccggtgaggcaggtcgggcactagaggaactgaggggctcactgtacaacgactttcatacttcagaaggggccaggcgccagcagcagaagctttgtggccctattgttgcactgacattcaactttgtggttgctgttgggattatcatggcaaacaaaatggtgatgggtgctgttggatttaacttcccagttgcactgtcattaattcattaccttttcgcttttgctttaatgtctgttctcaaggcattatacttgctgccaattgcttctccttccaaatccactcctttctcctcattatttgctttaggtgctgtcatgtctttctccactgggcttgccaatatcagcttaaagcataacaggtttttatcagatggctaagatagctgtaactccaaccatagtggtagcagaatttattcttttcaagaaaaaggtttcccttcgaaaggttagcacgctggttgttgtctcatttggtgtggccgttgcaaccgttactgatttggagttcaatttctttggtgcttgtgtagcactagcttggattattcctagtgctgtaaacaaaatcctgtggtcaaatttacaacagagtggaaattggacagctcttgcgttaatgtggaagacaaccccaattaccatatttttctttattgttttgatgccattgttggatcctccaggccttttatctttcagttgggatttcaagaacagcagcacaattatcatatctgctttgttcggtttccttcttcagtggtctggtgccttggcacttggggcaacctcggctctcgcacatgttgtgctgggtcagttcaagacgattgttataatgctctctggttatctggtatttaaatctgatcctggattcaccagcctctgtggagctgttattgccctcgcagggatgtcagtgtacacttacctggggatgaaagagtcagccgccaacgctaggagaaattccttaaattcaaggcaaaattctcatttgaagaaggccaaggctattgtagatggagaaaatccagaaacaaagcctatggattctgtgtaaaatgagtgccgtcctcctgctaggtttaagaacctgccattggaagcaatgaggtttggtgagcatacttatggagtgagtttccttcaccaaccagttcatccgaaaacttaatttcactttctttagttcttgcttggagttctattattctttaggcaatggtggtcaaaattgttttcatcgttgatcacattcattgcacgtaggaattatcattgattctagttttaggtaactttggttactgttccaatccatatcctgtcatgctttatttgtttacttgccttgtggattctgttcctcagaaaatagatgaaaggtggctgaaaatggttcctggttgaatttgacattgtgcatgtttggattctagtttctattttgtagtgtggagcattgtgtgctcatgacattgcgtttatgaaatctcacacttaaagacttcgggttcaacaattgttcataaaaggaaagaacgcacccataggcacggaaagagatgacaaaaatggaaatgtacaagcatgtcaaagcaggacaaataaagggtcaactcaaagcttatgcagcagtccacggaatcactgaactgcatgaatcaggcaacggagcaagcagcaaagctttggcatgtctgaagcacccccatgaatttctgaaacgaagggcaaagatttagaatgaaagtttacaaggacaaagctgtcagctgggttccgacctgaaggggtggtaatggatcgtgatctaaatatttcttcacaatttcttagactcctaaataatagttcaaaaatgaatagaaatagagcttaaccctaatgcgatctaatcattaaactatatagtgtaaaatttggactccattgtcatctctaactgctctccttttcttcaaatggaacttgcccaccttaggttgtggccagtagatcgtgtatatgaccatagaaaacactattttgtactattatacactttagactgcactatttacagaataaagagaaagactgctagaggtagctacaaataagtagttccggccgtccaatatactgagaaagttaaaaccaagaacgaagtacttgaagctaaccctcatggatgaatgcatcttatctataggtgcataaaaagattacaacacttcaaccttaaacaagtggggaaaacaaatattgattctaaggtacttaggtacatatcaat

SEQ ID NO: 62268 - DNA, 4452 bp, Zea Mays
atttaatatgccttatccattgaggttgttgcttgagaggtccctacaaaataagaggaagtaaacataaaaagaggggttttgagcaatattaaagtatgtaggtcgatcaacaagaaagcttatatagaaatgtaagtgatggcatttgacatagaaatctggtattggtccatttagattgttgtgagacagatcccttgggaatcacaaaaacaaaatgaaacactaaaaaacaagttttgaagtatatataggtggaaaaggtatggtatatccagcatgcagaaaatagaagtcggctctcccagattttggatttcaccattacctgtgcatgtgatacattgtatcatatttacttaatctagccaacctctgtatcagtttgctcacatagaaagtgtgatttccattagtcatggccttagcactggcatagaaggctgcacctggaccgtcgtcttcaataattttcatgtgatcctgtatgaatagcatttcttcaattaaatcataaattggacaagaaattatccagaaagggtatgaaattatcagtcgaccaccacatatccataccttcacagtggatggttttgtgttgcgagaccccacatatatatgcctaatcgtatatgaagtctatgattcatgttgcaagttccatgtaattaattgtgtttgtgtgttaatgtgcagtctatgattgaactaagtcatgcacgggatgaagaagtcagtgacaccactacatctatcattgttctaggtatagatatttttctgtgacatttgttttggggaagttggctatgacgaacaccattgcaatttatttgcatcaaactaaagcagtgttgtctgctatgtttggctctgacgaacaccattgcaatttatttgcatcaaactaaacagttacagaatgaaagaagttagaaccaattggcaaatggcattacttgaatgattaaaaaaatggacatgatgtgcacctgcagcatctgagactgtatgctatgttttgctcatttcctttggtacctcctaccccaatcaaaatgttgcatgttcagacataaggcaagaaggttcagcgaaaaaaaggatacaaaatataagtattcaataatgatagaaattatgaaaaaagattactgacacttacagcccatataaaaagcaaagtcacatcagcggtagtaataaattacagaagataaagaggagcattacagaaaacgcacctgatcctatggctgttaggagaacacaatcctcatgagcaaaccaagcatccaagacttccttttggaatgctttgagactggaaaatccaaaatgcttttgcaaaacagcactaattatgtccatttggttgaacacagataatcttctactgtaagaatataaagcatagaatatagttgttaataagtactaaagaatgaacgatcatgcttacaacaacctttggagtgacacattgattcttagatgatttcaaccagaaaagtcactctaatgcaataatagaccacactctatgatgacaagaacattgatccataaaacaaataaaaattataaaatgcagatatcaaggagagacaatcggtatggacctatttgggctatctgggagagaccaacatccaatgaaaaatagacctatttgggctatctgggagagaccaacacaaccagttgacagtataaacaaaggtagaaaaatagactttggctgaacttgcagaagaaaaggaccggtatgaatctatctttgtttatgatcacaaaatgattaacagatgaccatctctctcttataacgacaccaaagaggactatctctttgatgaatcaagggcaagcaacaaatacatacatcctagatcaacaaatacactactctggttccaccatgatgccaaaggtagcttacagtgagacacagcgaaaggaattatttagtccagataaattaatgtacatatatacatagcaaggaatataaacaaccattgttttacatttgtcgatcgggtgttagtattaatttggtacaagaatcatataatacaaggaactttaaaaggaatcaaatagctgtagccattaatatgctatctagtcctaaaaaatacacaagacgctaactgggtagttaaaaaaaggcatgtatgtaccttgtcaaacgaaatggattgatttgcttctatcgacgtggaggcttgtccttctgttacccggtgaaacgaactataatatcagtgcagttaaagtataatcttgaaaatacaagatgatacaagactcatcacaggaatgaaaaagggctatgctgacttattaaacagcagtcaacacttattccaggttgtaatgttcgttgtcacatagtcatattacctcttctaaattgttcctagacattggagctcgttgcaagtggcaaatcccttatacttgaaggttgtaatgtagtggccccgttgcaacgcacgggcactgacctataacactgaagtctgggaatgaaacacttttggacaagagattgcatggaatattactaacttaaatgtcttctagatgacataattagttttcaaagatatgtattttaatacatttccttcttttcactatttgatagcttatttgtgtaaatagtttctcatttctgtctataactgtgcatacagtgatattgatacttttgtattttttattaggtaactgtattcaaggtgcaagccagtaggttgtaggttgcttgctcttaacaagcggctgtttgggattaaagttggaaatttctggtatgtgattagtattatccagttgcacatataatcatgatatagcagtcttgaaatgttgatacttttggcaactaactaatccttttcagttacgtgaaggagggacttgttcttggtcagctcacaggaaatcgatttacaattactctgaggtagtgtctttgcttataattcaatattttagcatgccagactacagtattttcctggtaccaaattctcatcacttgactccaaccatagtaacttcttaggctaaaaatatatatgcaacacaagaacttgggataatgtttttttaactttaccaggagcagtggttttcatttttaagaatcctgtggacacctacgctgaccacacactcagacatagatgaggctattcaagtaatcttggaacacgcgcaacacacatgctccattctccctgagaaataaatctcgatgcagcactggcgttcattcttgacaagaatcgaatgtgggcgggtagcgctccacccgagcgtctcactgtcgagcctgtttttaacattctattgtttgtacaactgcatgacatgtgcatttgtgacctatattgtttgctatgatacttcggtccacaatttcacatgcagcataccttgtagtcttgtacattctcttttaggaaaacagagcaaatggagatcttatgtttccttatattgatctaggggtgttactgcagaatctgaagacatgataaaaattgcagtagatggtctaggaaagaatggatttatcaactactatggtttgcaggtattatatcctcaagtttaaaactattgccctgttatttctgaagctcatcgattttatcttttcatctggttagcagtttggaagtggttcaataccaacacatcttgttggggctgctttgcttagaggagagtggaaggttgctgtaaacttgattcttgatccaagggaaggagagcgtgatgacatcaatgaattgcgcaaacattacaaagaacatggtgacattgatatggcactgagaaacttccctcgacacctcgtagctgagagggccatacttcaatgtctgaagaaatgccctggtaaccatctacaagcactcaagggtataccaagaacactgagaatgatctctaccactgtgtctagctctgcattcatattatgcatttatttgttaatgccatcaactgttaagttattcagtcacagcaaaggagatttctcgcattggcagcaggaggggcctggaagtggccgattgtaattgtttttgacacgcagattatttcgatggaataaaatatatattatgatttgtatcttttttatataaataataataacaactactacttagaataatattgataataacaactagtccagtacccgtgcgttgcaacgtcacacaaattatttaataataaaaagttagtgcataatagtacatacatacataataagatctaaaaacaggtgcacaagcaccaaactggaatatttggtagcaatcactagaaaaaatagcaccgatagtaatcctcctctacatacataacaatacctcgatttgctactcaaggttgctcagatcttgcatgaag

SEQ ID NO: 62269 - DNA, 5072 bp, Zea Mays
atttaatatgccttacacattatgaaatggaaggagcattactatttaatatgccttatccattgaggttgttgcttgagaggtccctacaaaataagaggaagtaaacataaaaagaggggttttgagcaatattaaagtatgtaggtcgatcaacaagaaagcttatatagaaatgtaagtgatggcatttgacatagaaatctggtattggtccatttagattgttgtgagacagatcccttgggaatcacaaaaacaaaatgaaacactaaaaaacaagttttgaagtatatataggtggaaaaggtatggtatatccagcatgcagaaaatagaagtcggctctcccagattttggatttcaccattacctgtgcatgtgatacattgtatcatatttacttaatctagccaacctctgtatcagtttgctcacatagaaagtgtgatttccattagtcatggccttagcactggcatagaaggctgcacctggaccgtcgtcttcaataattttcatgtgatcctgtatgaatagcatttcttcaattaaatcataaattggacaagaaattatccagaaagggtatgaaattatcagtcgaccaccacatatccataccttcacagtggatggttttgtgttgcgagaccccacatatatatgcctaatcgtatatgaagtctatgattcatgttgcaagttccatgtaattaattgtgtttgtgtgttaatgtgcagtctatgattgaactaagtcatgcacgggatgaagaagtcagtgacaccactacatctatcattgttctaggtatagatatttttctgtgacatttgttttggggaagttggctatgacgaacaccattgcaatttatttgcatcaaactaaagcagtgttgtctgctatgtttggctctgacgaacaccattgcaatttatttgcatcaaactaaacagttacagaatgaaagaagttagaaccaattggcaaatggcattacttgaatgattaaaaaaatggacatgatgtgcacctgcagcatctgagactgtatgctatgttttgctcatttcctttggtacctcctaccccaatcaaaatgttgcatgttcagacataaggcaagaaggttcagcgaaaaaaaggatacaaaatataagtattcaataatgatagaaattatgaaaaaagattactgacacttacagcccatataaaaagcaaagtcacatcagcggtagtaataaattacagaagataaagaggagcattacagaaaacgcacctgatcctatggctgttaggagaacacaatcctcatgagcaaaccaagcatccaagacttccttttggaatgctttgagactggaaaatccaaaatgcttttgcaaaacagcactaattatgtccatttggttgaacacagataatcttctactgtaagaatataaagcatagaatatagttgttaataagtactaaagaatgaacgatcatgcttacaacaacctttggagtgacacattgattcttagatgatttcaaccagaaaagtcactctaatgcaataatagaccacactctatgatgacaagaacattgatccataaaacaaataaaaattataaaatgcagatatcaaggagagacaatcggtatggacctatttgggctatctgggagagaccaacatccaatgaaaaatagacctatttgggctatctgggagagaccaacacaaccagttgacagtataaacaaaggtagaaaaatagactttggctgaacttgcagaagaaaaggaccggtatgaatctatctttgtttatgatcacaaaatgattaacagatgaccatctctctcttataacgacaccaaagaggactatctctttgatgaatcaagggcaagcaacaaatacatacatcctagatcaacaaatacactactctggttccaccatgatgccaaaggtagcttacagtgagacacagcgaaaggaattatttagtccagataaattaatgtacatatatacatagcaaggaatataaacaaccattgttttacatttgtcgatcgggtgttagtattaatttggtacaagaatcatataatacaaggaactttaaaaggaatcaaatagctgtagccattaatatgctatctagtcctaaaaaatacacaagacgctaactgggtagttaaaaaaaggcatgtatgtaccttgtcaaacgaaatggattgatttgcttctatcgacgtggaggcttgtccttctgttacccggtgaaacgaactataatatcagtgcagttaaagtataatcttgaaaatacaagatgatacaagactcatcacaggaatgaaaaagggctatgctgacttattaaacagcagtcaacacttattccaggttgtaatgttcgttgtcacatagtcatattacctcttctaaattgttcctagacattggagctcgttgcaagtggcaaatcccttatacttgaaggttgtaatgtagtggccccgttgcaacgcacgggcactgacctataacactgaagtctgggaatgaaacacttttggacaagagattgcatggaatattactaacttaaatgtcttctagatgacataattagttttcaaagatatgtattttaatacatttccttcttttcactatttgatagcttatttgtgtaaatagtttctcatttctgtctataactgtgcatacagtgatattgatacttttgtattttttattaggtaactgtattcaaggtgcaagccagtaggttgtaggttgcttgctcttaacaagcggctgtttgggattaaagttggaaatttctggtatgtgattagtattatccagttgcacatataatcatgatatagcagtcttgaaatgttgatacttttggcaactaactaatccttttcagttacgtgaaggagggacttgttcttggtcagctcacaggaaatcgatttacaattactctgaggtagtgtctttgcttataattcaatattttagcatgccagactacagtattttcctggtaccaaattctcatcacttgactccaaccatagtaacttcttaggctaaaaatatatatgcaacacaagaacttgggataatgtttttttaactttaccaggagcagtggttttcatttttaagaatcctgtggacacctacgctgaccacacactcagacatagatgaggctattcaagtaatcttggaacacgcgcaacacacatgctccattctccctgagaaataaatctcgatgcagcactggcgttcattcttgacaagaatcgaatgtgggcgggtagcgctccacccgagcgtctcactgtcgagcctgtttttaacattctattgtttgtacaactgcatgacatgtgcatttgtgacctatattgtttgctatgatacttcggtccacaatttcacatgcagcataccttgtagtcttgtacattctcttttaggaaaacagagcaaatggagatcttatgtttccttatattgatctaggggtgttactgcagaatctgaagacatgataaaaattgcagtagatggtctaggaaagaatggatttatcaactactatggtttgcaggtattatatcctcaagtttaaaactattgccctgttatttctgaagctcatcgattttatcttttcatctggttagcagtttggaagtggttcaataccaacacatcttgttggggctgctttgcttagaggagagtggaaggttgctgtaaacttgattcttgatccaagggaaggagatatcctacaaatattttatatgtgtccaattaggagtttgtattcagtcttgccagcttttgtttaaacataactaagtctgtacagcgtgatgacatcaatgaattgcgcaaacattacaaagaacatggtgacattgatatggcactgagaaacttccctcgacacctcgtagctgagagggccatagtaagtatagttaaccttttttaacgtacacttgttttcaagtcagacgatttgttggtcgttctggctgaccaacttggatgattaattgcgattggtccaaaccgacttggacgattgatcacgactaatcagacttgaaaacagctgtgatattacttgaataaaatgtggccttataattctttgtgccttgtttaaagcacatagttttgtacattttaactgattatttttttcttttcttccgttgtttgcatgtttccagcttcaatgtctgaagaaatgccctggtaaccatctacaagcactcaagggtataccaagaacactgagaatgatgtatgttgcatttttttatttacatatactccatttttctttgtattattattaagtgcaaattaaggtatgtaactttaggtggttcagaatatgctgcctatcccatctttcttggggaaaaaaggctttgttgttgatgtctcgtgtttatccccagtaagaatatatagctgttattcttgacttgtgcttaaaattgtttctcggtctctaataacagctctaccactgtgtctagctctgcattcatattatgcatttatttgttaatgccatcaactgttaagttattcagtcacagcaaaggagatttctcgcattggcagcaggaggggcctggaagtggccgattgtaattgtttttgacacgcagattatttcgatggaataaaatatatattatgatttgtatcttttttatataaataataataacaactactacttagaataatattgataataacaactagtccagtacccgtgcgttgcaacgtcacacaaattatttaataataaaaagttagtgcataatagtacatacatacataataagatctaaaaacaggtgcacaagcaccaaactggaatatttggtagcaatcactagaaaaaatagcaccgatagtaatcctcctctacatacataacaatacctcgatttgctactcaaggttgctcagatcttgcatgaag

SEQ ID NO: 62270 - DNA, 4418 bp, Zea Mays
atttaatatgccttacacattatgaaatggaaggagcattactatttaatatgccttatccattgaggttgttgcttgagaggtccctacaaaataagaggaagtaaacataaaaagaggggttttgagcaatattaaagtatgtaggtcgatcaacaagaaagcttatatagaaatgtaagtgatggcatttgacatagaaatctggtattggtccatttagattgttgtgagacagatcccttgggaatcacaaaaacaaaatgaaacactaaaaaacaagttttgaagtatatataggtggaaaaggtatggtatatccagcatgcagaaaatagaagtcggctctcccagattttggatttcaccattacctgtgcatgtgatacattgtatcatatttacttaatctagccaacctctgtatcagtttgctcacatagaaagtgtgatttccattagtcatggccttagcactggcatagaaggctgcacctggaccgtcgtcttcaataattttcatgtgatcctgtatgaatagcatttcttcaattaaatcataaattggacaagaaattatccagaaagggtatgaaattatcagtcgaccaccacatatccataccttcacagtggatggttttgtgttgcgagaccccacatatatatgcctaatcgtatatgaagtctatgattcatgttgcaagttccatgtaattaattgtgtttgtgtgttaatgtgcagtctatgattgaactaagtcatgcacgggatgaagaagtcagtgacaccactacatctatcattgttctaggtatagatatttttctgtgacatttgttttggggaagttggctatgacgaacaccattgcaatttatttgcatcaaactaaagcagtgttgtctgctatgtttggctctgacgaacaccattgcaatttatttgcatcaaactaaacagttacagaatgaaagaagttagaaccaattggcaaatggcattacttgaatgattaaaaaaatggacatgatgtgcacctgcagcatctgagactgtatgctatgttttgctcatttcctttggtacctcctaccccaatcaaaatgttgcatgttcagacataaggcaagaaggttcagcgaaaaaaaggatacaaaatataagtattcaataatgatagaaattatgaaaaaagattactgacacttacagcccatataaaaagcaaagtcacatcagcggtagtaataaattacagaagataaagaggagcattacagaaaacgcacctgatcctatggctgttaggagaacacaatcctcatgagcaaaccaagcatccaagacttccttttggaatgctttgagactggaaaatccaaaatgcttttgcaaaacagcactaattatgtccatttggttgaacacagataatcttctactgtaagaatataaagcatagaatatagttgttaataagtactaaagaatgaacgatcatgcttacaacaacctttggagtgacacattgattcttagatgatttcaaccagaaaagtcactctaatgcaataatagaccacactctatgatgacaagaacattgatccataaaacaaataaaaattataaaatgcagatatcaaggagagacaatcggtatggacctatttgggctatctgggagagaccaacatccaatgaaaaatagacctatttgggctatctgggagagaccaacacaaccagttgacagtataaacaaaggtagaaaaatagactttggctgaacttgcagaagaaaaggaccggtatgaatctatctttgtttatgatcacaaaatgattaacagatgaccatctctctcttataacgacaccaaagaggactatctctttgatgaatcaagggcaagcaacaaatacatacatcctagatcaacaaatacactactctggttccaccatgatgccaaaggtagcttacagtgagacacagcgaaaggaattatttagtccagataaattaatgtacatatatacatagcaaggaatataaacaaccattgttttacatttgtcgatcgggtgttagtattaatttggtacaagaatcatataatacaaggaactttaaaaggaatcaaatagctgtagccattaatatgctatctagtcctaaaaaatacacaagacgctaactgggtagttaaaaaaaggcatgtatgtaccttgtcaaacgaaatggattgatttgcttctatcgacgtggaggcttgtccttctgttacccggtgaaacgaactataatatcagtgcagttaaagtataatcttgaaaatacaagatgatacaagactcatcacaggaatgaaaaagggctatgctgacttattaaacagcagtcaacacttattccaggttgtaatgttcgttgtcacatagtcatattacctcttctaaattgttcctagacattggagctcgttgcaagtggcaaatcccttatacttgaaggttgtaatgtagtggccccgttgcaacgcacgggcactgacctataacactgaagtctgggaatgaaacacttttggacaagagattgcatggaatattactaacttaaatgtcttctagatgacataattagttttcaaagatatgtattttaatacatttccttcttttcactatttgatagcttatttgtgtaaatagtttctcatttctgtctataactgtgcatacagtgatattgatacttttgtattttttattaggtaactgtattcaaggtgcaagccagtaggttgtaggttgcttgctcttaacaagcggctgtttgggattaaagttggaaatttctgttacgtgaaggagggacttgttcttggtcagctcacaggaaatcgatttacaattactctgagaatctgaagacatgataaaaattgcagtagatggtctaggaaagaatggatttatcaactactatggtttgcaggtattatatcctcaagtttaaaactattgccctgttatttctgaagctcatcgattttatcttttcatctggttagcagtttggaagtggttcaataccaacacatcttgttggggctgctttgcttagaggagagtggaaggttgctgtaaacttgattcttgatccaagggaaggagatatcctacaaatattttatatgtgtccaattaggagtttgtattcagtcttgccagcttttgtttaaacataactaagtctgtacagcgtgatgacatcaatgaattgcgcaaacattacaaagaacatggtgacattgatatggcactgagaaacttccctcgacacctcgtagctgagagggccatagtaagtatagttaaccttttttaacgtacacttgttttcaagtcagacgatttgttggtcgttctggctgaccaacttggatgattaattgcgattggtccaaaccgacttggacgattgatcacgactaatcagacttgaaaacagctgtgatattacttgaataaaatgtggccttataattctttgtgccttgtttaaagcacatagttttgtacattttaactgattatttttttcttttcttccgttgtttgcatgtttccagcttcaatgtctgaagaaatgccctggtaaccatctacaagcactcaagggtataccaagaacactgagaatgatgtatgttgcatttttttatttacatatactccatttttctttgtattattattaagtgcaaattaaggtatgtaactttaggtggttcagaatatgctgcctatcccatctttcttggggaaaaaaggctttgttgttgatgtctcgtgtttatccccagtaagaatatatagctgttattcttgacttgtgcttaaaattgtttctcggtctctaataacagctctaccactgtgtctagctctgcattcatattatgcatttatttgttaatgccatcaactgttaagttattcagtcacagcaaaggagatttctcgcattggcagcaggaggggcctggaagtggccgattgtaattgtttttgacacgcagattatttcgatggaataaaatatatattatgatttgtatcttttttatataaataataataacaactactacttagaataatattgataataacaactagtccagtacccgtgcgttgcaacgtcacacaaattatttaataataaaaagttagtgcataatagtacatacatacataataagatctaaaaacaggtgcacaagcaccaaactggaatatttggtagcaatcactagaaaaaatagcaccgatagtaatcctcctctacatacataacaatacctcgatttgctactcaaggttgctcagatcttgcatgaag

SEQ ID NO: 62271 - DNA, 2343 bp, Zea Mays
cgtgaggaccgccgactgctgtttccgcgtcatgccaattgggccgggtgtagctagactaggtcgtatctcttgcaagaagtgggtgctataaatttacataccggccttggtgtcgaatcagctccatggccacttccaagctcatcactataactatgactatcctcctcttcctaatcgtagggtttataccagaactctgcgtcgccgctagtagtgaccatgaacagttcgtcttcaatggcttcaccggcagcaacctgagcttagatggcgcagccagaatcacgtcgactggcctcatcgagctgactaatgattcggcccggatcaagggtcatgcgtttcacccatctccgctgcgcttccgccggtcctccgatggcacggtccagtccttttccgtctcctttgtgtttggcatcctctcttcattcggggacataaacgacaaccatgtcggcatagacatcaacagcctcaactccttgaaatcctacgcggcaggcttctacaacgatcagaacagtggcaggttcacgaacctacccctgattggaagccagcagccaatccaagcatgggtggagtatgacggcaacaagacgcggatcgatgtgaccatagcccctctaggcctcgcaaaacctctgacgccactgctgtctctagccttcaacctttccacagtactcacggaggaagaagcgtacattggcttctcatcttccacaggcctgagcacggggcatcacattattcttggctggagcttcgggatgaatcgccctgctccagccatcgactccaccaagctacccaagctaccctaccttgggccaagagccccctctaaactcctagagatcgtccttccgatcgcgtccgcccttttcgtgttagtggttggcactacggctgtgattctcgtcaggagacatctcaggtataaggaggatgtacgtgaagattgggaggtcgagtatggcccccagaggttcacgtacaaagacctgtcccacgccaccaaaggcttcagttccaagcacttggtcggcgtaggaggctttgggagggtgtacaggggagtgctcccaaagtcgagatcgcaagtggcggtaaagacggtaccatacaactcgaagcaaggcgtaaagcagttcaccgccgaagttgccagcatggggcacctccagcacagcaacatcgtgcagctgcacgggtactgcaggaggaagggcgagtttttcctagtgtacgactacatggtgaacggaagcctcgacaggtacctgtacggctacggcggcgaagagggcaggccgccgggggccacagccacagtagtactagactgggcgcagaggttcaagatcgtcagagacatcgcgtcgggtctgctctacctccacgaggagtgggacaaagtcgtcgtccatcgggacgtcaagcccagcaatgttctcctcgacaacaacatgaatggccgcctgggagatttcggccttgccaggttgtatgaccatggcactgacccacacaccacgcacgtggttgggacgatagggtacctggctccggagcttgcgcacagaggcaaggcaagcactcgcaccgacgttttcgcctttggcgtcttcgttcttgaggtcacctgcggaaggaagcccgttgtcgtcagtgaagacacagacaccccaggcagaggcacgcagctgatgctggtcgattgggttattcagaactggcacaaagggtcactcgttgatgccatagatatcaaactgcagggtagatatgacgtcgaccaggcatgcctcgcgttgaagttgggactgctgtgctcacacccgtctcctgatgcaaggccaagcatgaggcaagttctgcagtatctcgatggtgatctgccgctaccggagctgctaccggcgcacttcagttttcatatgctcgccttgctgcagagtgaaacacggcttaacacatcaacggtgtcattgtatccatcaccagcgatgaccatgatggactatggttcagtatcattttcactagatggaagatagcaataataatgtcgtggcttggctagcttgctgccgtcgttgcccagtttatcttggttaacaataaaatataggataaatatgttagatgtgttgtgtggtaaggacatgcattccacaaatactcctcttgtaccagctggttgtgccaattgtaatgaaaatctaggtgttctatatagaaaaatttatttggaattgcaagaagaaattacatccaacacctcaatctttagttaggagaacatgttcatgaaaattttgattggat

SEQ ID NO: 62272 - DNA, 3294 bp, Zea Mays
ctcttttcaaatttatctcgaacttaatccatttcaggagaactgcgcatcattaaattaagaagaaagaaggtcccagagaccaaaacatcaagagttacaaggacccattaatgaggctgaaaacacagaaaaaattgtctaatatagatcgagctatctatcaacggagatcattgcctatttgagatcggtctatccatcctagccatataggcacgctatacagtgattctaacaatcacaacagagcaacacaccaccagaacagaggaagttgatctggtggcccttctccaagtctagatgcgcacatacctctactgaatcagttgcaggcgcatgaagatggacacccgcagcaaatgcgtccagctgtcttcctatattatagaagaacagtgtgatcctgatctgatatagtcgtagcctgatatacaagcacattctattctaattcttgcagctgtgtaatttcaggtacaatttgatggccaacagagtattactattactaattttggcatccagaagcgaatctggcatatattcacaaatgcttgcaaaaattgctggtcatttcttaagaaatttaaagagtcaactgccccactcaagaatgcttgctatatctgctttgaacacattattgcaaggatcacctcataagacatctgcacaaaattctaagcaaccaatagatcaccctgaagattgcaatatttcatcaacagaagagattttgaatgagataatccgggaggaaggattcatgaatgagacactgaacagtttatctcatgttcatattatttccgacaatgatggttcgtcaaaagcgagttatggggcatcatcttttcaaagcggatctgacaaagcaataacttacttctattttgatttctctgcctcatggccacgtactcctagttggatttctttactgcgtggtcacacattctattccagttttgctaggatattcaaaaggcttatacagcaatgtggaatgccagtaatctcttctcttcagagtacactagaagagtttttaatttcaaaagagagaccaaggcaatgtgtcgctgctgaagcgatggctgggatgctgcactctgatatcattgggaatctggaatgtgagaacaactggttgatggcccagttgcataagattatgttagcaccatctgtggagtcagctcctgaatgggcagcttgtattcgatatgctgttacaggaaaagaaagagctggaactcgtgctcctgttctcaggcaaaaagtattagaatgcttatgtactcctcttcctcattccatggcaactagcgtacttgcgaagagatattcttttctgtccgttgctctaatagaaatttctccacccaaaatgtccccagcagagaagcaataccatgttaaaattcttgatgaactacttgacagcatgaaccattcatctgctcaggtaagagaagcaattggtattgccatgtgtgttacaacctcaaatatgagactttctgggttatttggcactggatgttcaccgcaaggccttcatggggatgtaagcatgattgaacaaacaggaaataaatattggtctgaacgtttgacagatggagctaatgaattagccgtaagtatacaaaatagtactcaatctaagcaactagaatcaacatcagattcggctgaagatagcatggatgatagagagcaggctgatgctaaaaggatggaaacgatatttcattttatgatcgcatctttgaagtctgggcgatcttctgttctactggacactattattaggcttgtgtacccaattctctcactacaggaaacatcaaataaagatttatcattgcttgctaagtcagctttcgagttgctgaaatggaggattctacatcggccttttcttgaaactgctattacgtctattcttcctttagtcagtgatcctaactggcgtaccagatctgcactgttatcgtatctcaggacctttacctacaggcacacattcatactttctggctcagagaaatcacaaatctggcaaacaatagaaaaattacttgtggacaaccaagttgaggttagggagcatgctgctggtgttcttgcaagcttaatgaagggtatagatgaagatctatcaaaggatttccgtgaacggtcatatgcacaagcccagcatatttttgttgcacggagaagaaatttgaagttttctgttggtaccatccatggtgcagtccttgctttgacagcttcggtcctttctgttccatacgacatgcctagctggcttccttctaatgtctcgctacttgctcgcttcatccgggagcctccccctataagatcaacagtcacgaaagctgttgcagaatttaagcgcacccatgctgacacatggagcatccagaaggacgcattcactgaagacgaactggaggttctccgtgatacatcttcctcctcgtcgtacttcgcttagattaaaatttcaaaggccataggatattctctggtactggtgttgtgtatatgaatttataactgttgaagtgtcggtgtttttcataaagtatatccttgtacgtacctagttttatttcatcaacagatgccttcgtacaactgagatgaagttatgcagtctactgtataccgtctggacatagcggaagcattatggcatgtgggatccttgcgtgggctgagaaattgttaacatccaaatcttttgcccagtcaacgacgtgaataagatgctgcctagtttaaccgcataatgcatctctggcaactctaatagcagagtcaacgggctagatataaacttgcccatgttcattagaagcaagaaagaatcagccattgacattaagaagtacatgagcacccccgatgcaaacgtctatagccctaatcatacttgtttcttgcttcctccattttacaatacttgttcataatcttatcaaaatgtcacataatatctcttcatgaagatattagcacggtagttcatgtagtattttcattcttgacctaatcaaatgctttcgtagatggatggtttaaagtatctcctagaatttgtgcctagctttgtttcttccataatcagttgccacatcgtttaaacctaacaactccatctatcccaaaataaaccaacttgtagggttctactagggtcgttctatattaaattattttagatttcatcaaatttataaaaagataacgtaaataattatgacacca

SEQ ID NO: 62273 - DNA, 2858 bp, Zea Mays
attatcactcttttcaaatttatctcgaacttaatccatttcaggtacaatttgatggccaacagagtattactattactaattttggcatccagaagcgaatctggcatatattcacaaatgcttgcaaaaattgctggtcatttcttaagaaatttaaagagtcaactgccccactcaagaatgcttgctatatctgctttgaacacattattgcaaggatcacctcataagacatctgcacaaaattctaagcaaccaatagatcaccctgaagattgcaatatttcatcaacagaagagattttgaatgagataatccgggaggaaggattcatgaatgagacactgaacagtttatctcatgttcatattatttccgacaatgatggttcgtcaaaagcgagttatggggcatcatcttttcaaagcggatctgacaaagcaataacttacttctattttgatttctctgcctcatggccacgtactcctagttggatttctttactgcgtggtcacacattctattccagttttgctaggatattcaaaaggcttatacagcaatgtggaatgccagtaatctcttctcttcagagtacactagaagagtttttaatttcaaaagagagaccaaggcaatgtgtcgctgctgaagcgatggctgggatgctgcactctgatatcattgggaatctggaatgtgagaacaactggttgatggcccagttgcataagattatgttagcaccatctgtggagtcagctcctgaatgggcagcttgtattcgatatgctgttacaggaaaagaaagagctggaactcgtgctcctgttctcaggcaaaaagtattagaatgcttatgtactcctcttcctcattccatggcaactagcgtacttgcgaagagatattcttttctgtccgttgctctaatagaaatttctccacccaaaatgtccccagcagagaagcaataccatgttaaaattcttgatgaactacttgacagcatgaaccattcatctgctcaggtaagagaagcaattggtattgccatgtgtgttacaacctcaaatatgagactttctgggttatttggcactggatgttcaccgcaaggccttcatggggatgtaagcatgattgaacaaacaggaaataaatattggtctgaacgtttgacagatggagctaatgaattagccgtaagtatacaaaatagtactcaatctaagcaactagaatcaacatcagattcggctgaagatagcatggatgatagagagcaggctgatgctaaaaggatggaaacgatatttcattttatgatcgcatctttgaagtctgggcgatcttctgttctactggacactattattaggcttgtgtacccaattctctcactacaggaaacatcaaataaagatttatcattgcttgctaagtcagctttcgagttgctgaaatggaggattctacatcggccttttcttgaaactgctattacgtctattcttcctttagtcagtgatcctaactggcgtaccagatctgcactgttatcgtatctcaggacctttacctacaggcacacattcatactttctggctcagagaaatcacaaatctggcaaacaatagaaaaattacttgtggacaaccaagttgaggttagggagcatgctgctggtgttcttgcaagcttaatgaagggtatagatgaagatctatcaaaggatttccgtgaacggtcatatgcacaagcccagcatatttttgttgcacggagaagaaatttgaagttttctgttggtaccatccatggtgcagtccttgctttgacagcttcggtcctttctgttccatacgacatgcctagctggcttccttctaatgtctcgctacttgctcgcttcatccgggagcctccccctataagatcaacagtcacgaaagctgttgcagaatttaagcgcacccatgctgacacatggagcatccagaaggacgcattcactgaagacgaactggaggttctccgtgatacatcttcctcctcgtcgtacttcgcttagattaaaatttcaaaggccataggatattctctggtactggtgttgtgtatatgaatttataactgttgaagtgtcggtgtttttcataaagtatatccttgtacgtacctagttttatttcatcaacagatgccttcgtacaactgagatgaagttatgcagtctactgtataccgtctggacatagcggaagcattatggcatgtgggatccttgcgtgggctgagaaattgttaacatccaaatcttttgcccagtcaacgacgtgaataagatgctgcctagtttaaccgcataatgcatctctggcaactctaatagcagagtcaacgggctagatataaacttgcccatgttcattagaagcaagaaagaatcagccattgacattaagaagtacatgagcacccccgatgcaaacgtctatagccctaatcatacttgtttcttgcttcctccattttacaatacttgttcataatcttatcaaaatgtcacataatatctcttcatgaagatattagcacggtagttcatgtagtattttcattcttgacctaatcaaatgctttcgtagatggatggtttaaagtatctcctagaatttgtgcctagctttgtttcttccataatcagttgccacatcgtttaaacctaacaactccatctatcccaaaataaaccaacttgtagggttctactagggtcgttctatattaaattattttagatttcatcaaatttataaaaagataacgtaaataattatgacacca

SEQ ID NO: 62274 - DNA, 6012 bp, Zea Mays
aaaataatgtggagcggaggaatgggttcctatatcaagtggcaatggttcatacccctttccagtggaggttcctgggaacacaagatttttattttccagtaagaccagaacactttccaaggcaattgcaaagtctgttgtataccttttgaagcctaaaagtttagcatttgagtattttgagaagctcattaattttttggaacagttctatcatccgtcaaatgggggtcgttggacctactcattggaacgcttcctgcgctatcttgttgtttactttgagaaacgccttcagcatgaacaatttgttatggcagttgaggaccatgatcaatcttatctgggaaaggaagaaaggtctgtttttgtcaaagctatcttgaaattattggatcgtggtcagtacagcaaggataattctcttgctgaaacagtttccgttgcaacttcgatcctgtcttatattgaaccaaccctcgtgcttcagtttgttgcaaaaaacttccaacgagccttagagacaactacagctacccatcagttaaagaacgctgtcacatctgttgcattttctggacgtgctcttcttctatgttctttatgttcatctcagaatgatgatagcagtgttgttgattcattcagtgatcttgttgtcgcttccctttcaaatgcgttacttggcatggatgccaatgatccacctaaaactattgctacaatgcagttaattgggtctatcttttcaaatctagctgcagttagtgatgatgtgcctatattgctccaatctactactctatcgaactggctagatgaattcttttcccgactgttttctgtgcttcataatctggaatcaagtagtcccattaatgagggttaccaaagctcattcatgtcagggacttttcttgttgacagtccatattacttttgtatgcttgaaattcttctagggaagttatcaaaacccttatttaatcagtccctgaagagaattgccaagttcgttaatgcaaatatcctccctggtgctacttcagaagttgggcttctttgttgtgcctgtgttcattcttatcctgaggaggcttcagtctaccttgtaaagccaatcttagagaccatcatgtcatcctttgaggggactccaaccactggttatgtaggaagagtagttgcagataaagcatctaccaaggctgcactttctcctgctctggaaacagcaatagattactatctgagggttttggccatatccatcagttatgccggtcctaccttactcaattataaggaggaactaaatcacataataacatctgcgttccagtccccttcttggaaggttaatggagctggggatcatctccttcgctctctgctaggaaatctggtttcttattacccaattgatcagtacaagccattcacttgtcagcctattggaaatattattgaaccatgggggtgttcgaaagctcatcaggatagggaggatgaaatgcttaatttccctccaaagtggcatgatccaagtcatgatgaactctcttttgcaaatgaattactacaacttcatttccagtcagctttagaagatcttttgactatttgtcagacaaaagttcattctgacacaggagatgagaaggagcacctaaaaataaccctgttacgcattcattctgcattgcatggtgtaatgtcttgtttaccagaaattcgcccgtcatataaagatgggaggtccctggaagtggagtcggctttcttcatagcaggatctgctggtagcactgttggaagctcagaaatgcgtgaaaaggctgcagaatttgtgcacatagcttgcaggtacttattaaaggaaagaactgatgacagtattcttctatcccttgttgtgcgtgtcattgatgctttggtaaactatggaagcttggaataccaagaatggtcaagccatgttcaagcttggaaactagaatctgcttccataattgagcctccatgcaacttcattgttccatttcatgctcaaggaaaaaagagacctagatgggcacttgttgacaaagcaaacttgcatagtacatggaggtgttcacaatcatcatatcacagatacagaatgaatgcagatgtttcgccatctgtccccatgattaatttgatgaatgatctcttagatctctcactacacaactatgaaactgttcgatcgtatgctggaagatcgcttacaaaattgttgaaacgttggccttctctaatttctaattgtgttctcacactcacgggaaatttgcgtgacccaaaagctcctgaacatgttgttcttggttcttgcagcattctgatctcacagactgttttaagacacttgaccactgattctgtttccctctcttcctttatcatgggaattctggaaagctctcatcatgaatcgttgaagtgtcagaaagctattactgagctctttgtaacatataatatacgtttctctggaatatcaaggagcttctttaaaactcctgaaaatcaagctgacaagccaggatttctcagtctaatttctcaaattaatgctttgggctttgagactaatggactacattggaggagaactgcgcatcattaaattaagaagaaagaaggtcccagagaccaaaacatcaagagttacaaggacccattaatgaggctgaaaacacagaaaaaattgtctaatatagatcgagctatctatcaacggagatcattgcctatttgagatcggtctatccatcctagccatataggcacgctatacagtgattctaacaatcacaacagagcaacacaccaccagaacagaggaagttgatctggtggcccttctccaagtctagatgcgcacatacctctactgaatcagttgcaggcgcatgaagatggacacccgcagcaaatgcgtccagctgtcttcctatattatagaagaacagtgtgatcctgatctgatatagtcgtagcctgatatacaagcacattctattctaattcttgcagctgtgtaatttcaggtacaatttgatggccaacagagtattactattactaattttggcatccagaagcgaatctggcatatattcacaaatgcttgcaaaaattgctgaagagattttgaatgagataatccgggaggaaggattcatgaatgagacactgaacagtttatctcatgttcatattatttccgacaatgatggttcgtcaaaagcgagttatggggcatcatcttttcaaagcggatctgacaaagcaataacttacttctattttgatttctctgcctcatggccacgtactcctagttggatttctttactgcgtggtcacacattctattccagttttgctaggatattcaaaaggcttatacagcaatgtggaatgccagtaatctcttctcttcagagtacactagaagagtttttaatttcaaaagagagaccaaggcaatgtgtcgctgctgaagcgatggctgggatgctgcactctgatatcattgggaatctggaatgtgagaacaactggttgatggcccagttgcataagattatgttagcaccatctgtggagtcagctcctgaatgggcagcttgtattcgatatgctgttacaggaaaagaaagagctggaactcgtgctcctgttctcaggcaaaaagtattagaatgcttatgtactcctcttcctcattccatggcaactagcgtacttgcgaagagatattcttttctgtccgttgctctaatagaaatttctccacccaaaatgtccccagcagagaagcaataccatgttaaaattcttgatgaactacttgacagcatgaaccattcatctgctcaggtaagagaagcaattggtattgccatgtgtgttacaacctcaaatatgagactttctgggttatttggcactggatgttcaccgcaaggccttcatggggatgtaagcatgattgaacaaacaggaaataaatattggtctgaacgtttgacagatggagctaatgaattagccgtaagtatacaaaatagtactcaatctaagcaactagaatcaacatcagattcggctgaagatagcatggatgatagagagcaggctgatgctaaaaggatggaaacgatatttcattttatgatcgcatctttgaagtctgggcgatcttctgttctactggacactattattaggcttgtgtacccaattctctcactacaggaaacatcaaataaagatttatcattgcttgctaagtcagctttcgagttgctgaaatggaggattctacatcggccttttcttgaaactgctattacgtctattcttcctttagtcagtgatcctaactggcgtaccagatctgcactgttatcgtatctcaggacctttacctacaggcacacattcatactttctggctcagagaaatcacaaatctggcaaacaatagaaaaattacttgtggacaaccaagttgaggcaagtatatgttcatttgactctgtacagtgacatttattttcccattctgtgtcttgttactcaaattgtgtaatatcattgcattatcacgaaaatgtgtactatcactctatcagtgtacatgttagtgctgtgcagtgtaggtttcttttgtcaatgttttgtactttgttcttatacattcaggttagggagcatgctgctggtgttcttgcaagcttaatgaagggtatagatgaagatctatcaaaggatttccgtgaacggtcatatgcacaagcccagcatatttttgttgcacggagaagaaatttgaagttttctgttggtaccatccatggtgcagtccttgctttgacagcttcggtcctttctgttccatacgacatgcctagctggcttccttctaatgtctcgctacttgctcgcttcatccgggagcctccccctataagatcaacagtcacgaaagctgttgcagaatttaagcgcacccatgctgacacatggagcatccagaaggacgcattcactgaagacgaactggaggcaagctagaaatcttctccttcactgcctttcctactgctctacaccttacgctctttgtgatagttctgctttgaacatgcaggttctccgtgatacatcttcctcctcgtcgtacttcgcttagattaaaatttcaaaggccataggatattctctggtactggtgttgtgtatatgaatttataactgttgaagtgtcggtgtttttcataaagtatatccttgtacgtacctagttttatttcatcaacagatgccttcgtacaactgagatgaagttatgcagtctactgtataccgtctggacatagcggaagcattatggcatgtgggatccttgcgtgggctgagaaattgttaacatccaaatcttttgcccagtcaacgacgtgaataagatgctgcctagtttaaccgcataatgcatctctggcaactctaatagcagagtcaacgggctagatataaacttgcccatgttcattagaagcaagaaagaatcagccattgacattaagaagtacatgagcacccccgatgcaaacgtctatagccctaatcatacttgtttcttgcttcctccattttacaatacttgttcataatcttatcaaaatgtcacataatatctcttcatgaagatattagcacggtagttcatgtagtattttcattcttgacctaatcaaatgctttcgtagatggatggtttaaagtatctcctagaatttgtgcctagctttgtttcttccataatcagttgccacatcgtttaaacctaacaactccatctatcccaaaataaaccaacttgtagggttctactagggtcgttctatattaaattattttagatttcatcaaatttataaaaagataacgtaaataattatgacacca

SEQ ID NO: 62275 - DNA, 5457 bp, Zea Mays
aaaaaaataatgtggagcggaggaatgggttcctatatcaagtggcaatggttcatacccctttccagtggaggttcctgggaacacaagatttttattttccagtaagaccagaacactttccaaggcaattgcaaagtctgttgtataccttttgaagcctaaaagtttagcatttgagtattttgagaagctcattaattttttggaacagttctatcatccgtcaaatgggggtcgttggacctactcattggaacgcttcctgcgctatcttgttgtttactttgagaaacgccttcagcatgaacaatttgttatggcagttgaggaccatgatcaatcttatctgggaaaggaagaaaggtctgtttttgtcaaagctatcttgaaattattggatcgtggtcagtacagcaaggataattctcttgctgaaacagtttccgttgcaacttcgatcctgtcttatattgaaccaaccctcgtgcttcagtttgttgcaaaaaacttccaacgagccttagagacaactacagctacccatcagttaaagaacgctgtcacatctgttgcattttctggacgtgctcttcttctatgttctttatgttcatctcagaatgatgatagcagtgttgttgattcattcagtgatcttgttgtcgcttccctttcaaatgcgttacttggcatggatgccaatgatccacctaaaactattgctacaatgcagttaattgggtctatcttttcaaatctagctgcagttagtgatgatgtgcctatattgctccaatctactactctatcgaactggctagatgaattcttttcccgactgttttctgtgcttcataatctggaatcaagtagtcccattaatgagggttaccaaagctcattcatgtcagggacttttcttgttgacagtccatattacttttgtatgcttgaaattcttctagggaagttatcaaaacccttatttaatcagtccctgaagagaattgccaagttcgttaatgcaaatatcctccctggtgctacttcagaagttgggcttctttgttgtgcctgtgttcattcttatcctgaggaggcttcagtctaccttgtaaagccaatcttagagaccatcatgtcatcctttgaggggactccaaccactggttatgtaggaagagtagttgcagataaagcatctaccaaggctgcactttctcctgctctggaaacagcaatagattactatctgagggttttggccatatccatcagttatgccggtcctaccttactcaattataaggaggaactaaatcacataataacatctgcgttccagtccccttcttggaaggttaatggagctggggatcatctccttcgctctctgctaggaaatctggtttcttattacccaattgatcagtacaagccattcacttgtcagcctattggaaatattattgaaccatgggggtgttcgaaagctcatcaggatagggaggatgaaatgcttaatttccctccaaagtggcatgatccaagtcatgatgaactctcttttgcaaatgaattactacaacttcatttccagtcagctttagaagatcttttgactatttgtcagacaaaagttcattctgacacaggagatgagaaggagcacctaaaaataaccctgttacgcattcattctgcattgcatggtgtaatgtcttgtttaccagaaattcgcccgtcatataaagatgggaggtccctggaagtggagtcggctttcttcatagcaggatctgctggtagcactgttggaagctcagaaatgcgtgaaaaggctgcagaatttgtgcacatagcttgcaggtacttattaaaggaaagaactgatgacagtattcttctatcccttgttgtgcgtgtcattgatgctttggtaaactatggaagcttggaataccaagaatggtcaagccatgttcaagcttggaaactagaatctgcttccataattgagcctccatgcaacttcattgttccatttcatgctcaaggaaaaaagagacctagatgggcacttgttgacaaagcaaacttgcatagtacatggaggtgttcacaatcatcatatcacagatacagaatgaatgcagatgtttcgccatctgtccccatgattaatttgatgaatgatctcttagatctctcactacacaactatgaaactgttcgatcgtatgctggaagatcgcttacaaaattgttgaaacgttggccttctctaatttctaattgtgttctcacactcacgggaaatttgcgtgacccaaaagctcctgaacatgttgttcttggttcttgcagcattctgatctcacagactgttttaagacacttgaccactgattctgtttccctctcttcctttatcatgggaattctggaaagctctcatcatgaatcgttgaagtgtcagaaagctattactgagctctttgtaacatataatatacgtttctctggaatatcaaggagcttctttaaaactcctgaaaatcaagctgacaagccaggatttctcagtctaatttctcaaattaatgctttgggctttgagactaatggactacattggaggtacaatttgatggccaacagagtattactattactaattttggcatccagaagcgaatctggcatatattcacaaatgcttgcaaaaattgctggtcatttcttaagaaatttaaagagtcaactgccccactcaagaatgcttgctatatctgctttgaacacattattgcaaggatcacctcataagacatctgcacaaaattctaagcaaccaatagatcaccctgaagattgcaatatttcatcaacagaagagattttgaatgagataatccgggaggaaggattcatgaatgagacactgaacagtttatctcatgttcatattatttccgacaatgatggttcgtcaaaagcgagttatggggcatcatcttttcaaagcggatctgacaaagcaataacttacttctattttgatttctctgcctcatggccacgtactcctagttggatttctttactgcgtggtcacacattctattccagttttgctaggatattcaaaaggcttatacagcaatgtggaatgccagtaatctcttctcttcagagtacactagaagagtttttaatttcaaaagagagaccaaggcaatgtgtcgctgctgaagcgatggctgggatgctgcactctgatatcattgggaatctggaatgtgagaacaactggttgatggcccagttgcataagattatgttagcaccatctgtggagtcagctcctgaatgggcagcttgtattcgatatgctgttacaggaaaagaaagagctggaactcgtgctcctgttctcaggcaaaaagtattagaatgcttatgtactcctcttcctcattccatggcaactagcgtacttgcgaagagatattcttttctgtccgttgctctaatagaaatttctccacccaaaatgtccccagcagagaagcaataccatgttaaaattcttgatgaactacttgacagcatgaaccattcatctgctcaggtaagagaagcaattggtattgccatgtgtgttacaacctcaaatatgagactttctgggttatttggcactggatgttcaccgcaaggccttcatggggatgtaagcatgattgaacaaacaggaaataaatattggtctgaacgtttgacagatggagctaatgaattagccgtaagtatacaaaatagtactcaatctaagcaactagaatcaacatcagattcggctgaagatagcatggatgatagagagcaggctgatgctaaaaggatggaaacgatatttcattttatgatcgcatctttgaagtctgggcgatcttctgttctactggacactattattaggcttgtgtacccaattctctcactacaggaaacatcaaataaagatttatcattgcttgctaagtcagctttcgagttgctgaaatggaggattctacatcggccttttcttgaaactgctattacgtctattcttcctttagtcagtgatcctaactggcgtaccagatctgcactgttatcgtatctcaggacctttacctacaggcacacattcatactttctggctcagagaaatcacaaatctggcaaacaatagaaaaattacttgtggacaaccaagttgaggttagggagcatgctgctggtgttcttgcaagcttaatgaagggtatagatgaagatctatcaaaggatttccgtgaacggtcatatgcacaagcccagcatatttttgttgcacggagaagaaatttgaagttttctgttggtaccatccatggtgcagtccttgctttgacagcttcggtcctttctgttccatacgacatgcctagctggcttccttctaatgtctcgctacttgctcgcttcatccgggagcctccccctataagatcaacagtcacgaaagctgttgcagaatttaagcgcacccatgctgacacatggagcatccagaaggacgcattcactgaagacgaactggaggttctccgtgatacatcttcctcctcgtcgtacttcgcttagattaaaatttcaaaggccataggatattctctggtactggtgttgtgtatatgaatttataactgttgaagtgtcggtgtttttcataaagtatatccttgtacgtacctagttttatttcatcaacagatgccttcgtacaactgagatgaagttatgcagtctactgtataccgtctggacatagcggaagcattatggcatgtgggatccttgcgtgggctgagaaattgttaacatccaaatcttttgcccagtcaacgacgtgaataagatgctgcctagtttaaccgcataatgcatctctggcaactctaatagcagagtcaacgggctagatataaacttgcccatgttcattagaagcaagaaagaatcagccattgacattaagaagtacatgagcacccccgatgcaaacgtctatagccctaatcatacttgtttcttgcttcctccattttacaatacttgttcataatcttatcaaaatgtcacataatatctcttcatgaagatattagcacggtagttcatgtagtattttcattcttgacctaatcaaatgctttcgtagatggatggtttaaagtatctcctagaatttgtgcctagctttgtttcttccataatcagttgccacatcgtttaaacctaacaactccatctatcccaaaataaaccaacttgtagggttctactagggtcgttctatattaaattattttagatttcatcaaatttataaaaagataacgtaaataattatgacacca

SEQ ID NO: 62276 - DNA, 6248 bp, Zea Mays
atgcaggtcggcgacgacagactaggccgaggtgggtcgcgccagggcgtcggtgtcagcggttggtgcttagtgcctggtggctgccggccaggccgatgcggggcgagacagggaagagatgggggaggaaagaggcacctaggtaaagaaaggaggcgccagggggccgcggcggcgggcgaccgaccatggctgacggcggccaggaattttattaaagcgaagagtgacattgcttctgaggatcttcaggctcttgtaaagcttggactggaggtatttcatgcgtcacataacaagtttgttgtccagattaagtggggaggtctgctcataaggcttttaagaaagcatgggaagaggctttcacttgttgtgcaatggagaccactttatgagacgttgataaggactcatttcaagagaaacatgggccctgagggctggaaagtaaggaagcaacactttgagactgtgacctctttagtgtgtgcatctaggaatttctttactgaaggtgtggctgctgaaatttggtcagagttcaggcccttgctggaaaatccatggcataactcagcatttgaaggtgttggatttctcaggctgtttcttccagcgaactcgaggaatcaggatcactttacaactgattggattagaaattgtctggacatatgggattctgtcacaaattgtaacttctgggacatccaatgggcttccatcatagcacgttgtataaaaaattcaagatctgtgaactgggatgcttttcttcccttgttattcacaagatacttgaacatgtttgaggttcctatatcaagtggcaatggttcatacccctttccagtggaggttcctgggaacacaagatttttattttccagtaagaccagaacactttccaaggcaattgcaaagtctgttgtataccttttgaagcctaaaagtttagcatttgagtattttgagaagctcattaattttttggaacagttctatcatccgtcaaatgggggtcgttggacctactcattggaacgcttcctgcgctatcttgttgtttactttgagaaacgccttcagcatgaacaatttgttatggcagttgaggaccatgatcaatcttatctgggaaaggaagaaaggtctgtttttgtcaaagctatcttgaaattattggatcgtggtcagtacagcaaggataattctcttgctgaaacagtttccgttgcaacttcgatcctgtcttatattgaaccaaccctcgtgcttcagtttgttgcaaaaaacttccaacgagccttagagacaactacagctacccatcagttaaagaacgctgtcacatctgttgcattttctggacgtgctcttcttctatgttctttatgttcatctcagaatgatgatagcagtgttgttgattcattcagtgatcttgttgtcgcttccctttcaaatgcgttacttggcatggatgccaatgatccacctaaaactattgctacaatgcagttaattgggtctatcttttcaaatctagctgcagttagtgatgatgtgcctatattgctccaatctactactctatcgaactggctagatgaattcttttcccgactgttttctgtgcttcataatctggaatcaagtagtcccattaatgagggttaccaaagctcattcatgtcagggacttttcttgttgacagtccatattacttttgtatgcttgaaattcttctagggaagttatcaaaacccttatttaatcagtccctgaagagaattgccaagttcgttaatgcaaatatcctccctggtgctacttcagaagttgggcttctttgttgtgcctgtgttcattcttatcctgaggaggcttcagtctaccttgtaaagccaatcttagagaccatcatgtcatcctttgaggggactccaaccactggttatgtaggaagagtagttgcagataaagcatctaccaaggctgcactttctcctgctctggaaacagcaatagattactatctgagggttttggccatatccatcagttatgccggtcctaccttactcaattataaggaggaactaaatcacataataacatctgcgttccagtccccttcttggaaggttaatggagctggggatcatctccttcgctctctgctaggaaatctggtttcttattacccaattgatcagtacaagccattcacttgtcagcctattggaaatattattgaaccatgggggtgttcgaaagctcatcaggatagggaggatgaaatgcttaatttccctccaaagtggcatgatccaagtcatgatgaactctcttttgcaaatgaattactacaacttcatttccagtcagctttagaagatcttttgactatttgtcagacaaaagttcattctgacacaggagatgagaaggagcacctaaaaataaccctgttacgcattcattctgcattgcatggtgtaatgtcttgtttaccagaaattcgcccgtcatataaagatgggaggtccctggaagtggagtcggctttcttcatagcaggatctgctggtagcactgttggaagctcagaaatgcgtgaaaaggctgcagaatttgtgcacatagcttgcaggtacttattaaaggaaagaactgatgacagtattcttctatcccttgttgtgcgtgtcattgatgctttggtaaactatggaagcttggaataccaagaatggtcaagccatgttcaagcttggaaactagaatctgcttccataattgagcctccatgcaacttcattgttccatttcatgctcaaggaaaaaagagacctagatgggcacttgttgacaaagcaaacttgcatagtacatggaggtgttcacaatcatcatatcacagatacagaatgaatgcagatgtttcgccatctgtccccatgattaatttgatgaatgatctcttagatctctcactacacaactatgaaactgttcgatcgtatgctggaagatcgcttacaaaattgttgaaacgttggccttctctaatttctaattgtgttctcacactcacgggaaatttgcgtgacccaaaagctcctgaacatgttgttcttggttcttgcagcattctgatctcacagactgttttaagacacttgaccactgattctgtttccctctcttcctttatcatgggaattctggaaagctctcatcatgaatcgttgaagtgtcagaaagctattactgagctctttgtaacatataatatacgtttctctggaatatcaaggagcttctttaaaactcctgaaaatcaagctgacaagccaggatttctcagtctaatttctcaaattaatgctttgggctttgagactaatggactacattggaggtacaatttgatggccaacagagtattactattactaattttggcatccagaagcgaatctggcatatattcacaaatgcttgcaaaaattgctggtcatttcttaagaaatttaaagagtcaactgccccactcaagaatgcttgctatatctgctttgaacacattattgcaaggatcacctcataagacatctgcacaaaattctaagcaaccaatagatcaccctgaagattgcaatatttcatcaacagaagagattttgaatgagataatccgggaggaaggattcatgaatgagacactgaacagtttatctcatgttcatattatttccgacaatgatggttcgtcaaaagcgagttatggggcatcatcttttcaaagcggatctgacaaagcaataacttacttctattttgatttctctgcctcatggccacgtactcctagttggatttctttactgcgtggtcacacattctattccagttttgctaggatattcaaaaggcttatacagcaatgtggaatgccagtaatctcttctcttcagagtacactagaagagtttttaatttcaaaagagagaccaaggcaatgtgtcgctgctgaagcgatggctgggatgctgcactctgatatcattgggaatctggaatgtgagaacaactggttgatggcccagttgcataagattatgttagcaccatctgtggagtcagctcctgaatgggcagcttgtattcgatatgctgttacaggaaaagaaagagctggaactcgtgctcctgttctcaggcaaaaagtattagaatgcttatgtactcctcttcctcattccatggcaactagcgtacttgcgaagagatattcttttctgtccgttgctctaatagaaatttctccacccaaaatgtccccagcagagaagcaataccatgttaaaattcttgatgaactacttgacagcatgaaccattcatctgctcaggtaagagaagcaattggtattgccatgtgtgttacaacctcaaatatgagactttctgggttatttggcactggatgttcaccgcaaggccttcatggggatgtaagcatgattgaacaaacaggaaataaatattggtctgaacgtttgacagatggagctaatgaattagccgtaagtatacaaaatagtactcaatctaagcaactagaatcaacatcagattcggctgaagatagcatggatgatagagagcaggctgatgctaaaaggatggaaacgatatttcattttatgatcgcatctttgaagtctgggcgatcttctgttctactggacactattattaggcttgtgtacccaattctctcactacaggaaacatcaaataaagatttatcattgcttgctaagtcagctttcgagttgctgaaatggaggattctacatcggccttttcttgaaactgctattacgtctattcttcctttagtcagtgatcctaactggcgtaccagatctgcactgttatcgtatctcaggacctttacctacaggcacacattcatactttctggctcagagaaatcacaaatctggcaaacaatagaaaaattacttgtggacaaccaagttgaggttagggagcatgctgctggtgttcttgcaagcttaatgaagggtatagatgaagatctatcaaaggatttccgtgaacggtcatatgcacaagcccagcatatttttgttgcacggagaagaaatttgaagttttctgttggtaccatccatggtgcagtccttgctttgacagcttcggtcctttctgttccatacgacatgcctagctggcttccttctaatgtctcgctacttgctcgcttcatccgggagcctccccctataagatcaacagtcacgaaagctgttgcagaatttaagcgcacccatgctgacacatggagcatccagaaggacgcattcactgaagacgaactggaggttctccgtgatacatcttcctcctcgtcgtacttcgcttagattaaaatttcaaaggccataggatattctctggtactggtgttgtgtatatgaatttataactgttgaagtgtcggtgtttttcataaagtatatccttgtacgtacctagttttatttcatcaacagatgccttcgtacaactgagatgaagttatgcagtctactgtataccgtctggacatagcggaagcattatggcatgtgggatccttgcgtgggctgagaaattgttaacatccaaatcttttgcccagtcaacgacgtgaataagatgctgcctagtttaaccgcataatgcatctctggcaactctaatagcagagtcaacgggctagatataaacttgcccatgttcattagaagcaagaaagaatcagccattgacattaagaagtacatgagcacccccgatgcaaacgtctatagccctaatcatacttgtttcttgcttcctccattttacaatacttgttcataatcttatcaaaatgtcacataatatctcttcatgaagatattagcacggtagttcatgtagtattttcattcttgacctaatcaaatgctttcgtagatggatggtttaaagtatctcctagaatttgtgcctagctttgtttcttccataatcagttgccacatcgtttaaacctaacaactccatctatcccaaaataaaccaacttgtagggttctactagggtcgttctatattaaattattttagatttcatcaaatttataaaaagataacgtaaataattatgacacca

SEQ ID NO: 62277 - DNA, 7063 bp, Zea Mays
ctctcgttcgatacaaattaatgaattataatggtatgtttataatatcaacatcaggaatagtaatgttatgatttgaattaaccttttggccaactttaccccgctactgtccccttccacacgaggccgtgcgtcaacgataacagcaccggatggtcgtgtggagcaccggccgccctagccccaggtctctctcccttgggtcgtcgtcgtcgtcgtcgtctccacggctacacccacatcttgtcttggaggcgaagaaagaaatcggccaagtatcccgcgccgcccaagtctccccaactaaccccccaaacctaccaccacccatccattttcgccttggcttgacccgcggagctctgactcagagggcatccacggcggcggcagtgcgagggtccgagggaagattggaggatgcacctctacaacgcgtggctaccgccaccggtgtcgaccgcggcgcgtggggaggcagctgcctttgcgggcgctgtgcggaccgccgcggacgcgtggctgcccggggactccgactccgcctacgccacactcaagtggatctccgtgttcgacctttttattaaagcgaagagtgacattgcttctgaggatcttcaggctcttgtaaagcttggactggaggtatttcatgcgtcacataacaagtttgttgtccagattaagtggggaggtctgctcataaggcttttaagaaagcatgggaagaggctttcacttgttgtgcaatggagaccactttatgagacgttgataaggactcatttcaagagaaacatgggccctgagggctggaaagtaaggaagcaacactttgagactgtgacctctttagtgtgtgcatctaggaatttctttactgaaggtgtggctgctgaaatttggtcagagttcaggcccttgctggaaaatccatggcataactcagcatttgaaggtgttggatttctcaggctgtttcttccagcgaactcgaggaatcaggatcactttacaactgattggattagaaattgtctggacatatgggattctgtcacaaattgtaacttctgggacatccaatgggcttccatcatagcacgttgtataaaaaattcaagatctgtgaactgggatgcttttcttcccttgttattcacaagatacttgaacatgtttgaggttcctatatcaagtggcaatggttcatacccctttccagtggaggttcctgggaacacaagatttttattttccagtaagaccagaacactttccaaggcaattgcaaagtctgttgtataccttttgaagcctaaaagtttagcatttgagtattttgagaagctcattaattttttggaacagttctatcatccgtcaaatgggggtcgttggacctactcattggaacgcttcctgcgctatcttgttgtttactttgagaaacgccttcagcatgaacaatttgttatggcagttgaggaccatgatcaatcttatctgggaaaggaagaaaggtctgtttttgtcaaagctatcttgaaattattggatcgtggtcagtacagcaaggataattctcttgctgaaacagtttccgttgcaacttcgatcctgtcttatattgaaccaaccctcgtgcttcagtttgttgcaaaaaacttccaacgagccttagagacaactacagctacccatcagttaaagaacgctgtcacatctgttgcattttctggacgtgctcttcttctatgttctttatgttcatctcagaatgatgatagcagtgttgttgattcattcagtgatcttgttgtcgcttccctttcaaatgcgttacttggcatggatgccaatgatccacctaaaactattgctacaatgcagttaattgggtctatcttttcaaatctagctgcagttagtgatgatgtgcctatattgctccaatctactactctatcgaactggctagatgaattcttttcccgactgttttctgtgcttcataatctggaatcaagtagtcccattaatgagggttaccaaagctcattcatgtcagggacttttcttgttgacagtccatattacttttgtatgcttgaaattcttctagggaagttatcaaaacccttatttaatcagtccctgaagagaattgccaagttcgttaatgcaaatatcctccctggtgctacttcagaagttgggcttctttgttgtgcctgtgttcattcttatcctgaggaggcttcagtctaccttgtaaagccaatcttagagaccatcatgtcatcctttgaggggactccaaccactggttatgtaggaagagtagttgcagataaagcatctaccaaggctgcactttctcctgctctggaaacagcaatagattactatctgagggttttggccatatccatcagttatgccggtcctaccttactcaattataaggaggaactaaatcacataataacatctgcgttccagtccccttcttggaaggttaatggagctggggatcatctccttcgctctctgctaggaaatctggtttcttattacccaattgatcagtacaagccattcacttgtcagcctattggaaatattattgaaccatgggggtgttcgaaagctcatcaggatagggaggatgaaatgcttaatttccctccaaagtggcatgatccaagtcatgatgaactctcttttgcaaatgaattactacaacttcatttccagtcagctttagaagatcttttgactatttgtcagacaaaagttcattctgacacaggagatgagaaggagcacctaaaaataaccctgttacgcattcattctgcattgcatggtgtaatgtcttgtttaccagaaattcgcccgtcatataaagatgggaggtccctggaagtggagtcggctttcttcatagcaggatctgctggtagcactgttggaagctcagaaatgcgtgaaaaggctgcagaatttgtgcacatagcttgcaggtacttattaaaggaaagaactgatgacagtattcttctatcccttgttgtgcgtgtcattgatgctttggtaaactatggaagcttggaataccaagaatggtcaagccatgttcaagcttggaaactagaatctgcttccataattgagcctccatgcaacttcattgttccatttcatgctcaaggaaaaaagagacctagatgggcacttgttgacaaagcaaacttgcatagtacatggaggtgttcacaatcatcatatcacagatacagaatgaatgcagatgtttcgccatctgtccccatgattaatttgatgaatgatctcttagatctctcactacacaactatgaaactgttcgatcgtatgctggaagatcgcttacaaaattgttgaaacgttggccttctctaatttctaattgtgttctcacactcacgggaaatttgcgtgacccaaaagctcctgaacatgttgttcttggttcttgcagcattctgatctcacagactgttttaagacacttgaccactgattctgtttccctctcttcctttatcatgggaattctggaaagctctcatcatgaatcgttgaagtgtcagaaagctattactgagctctttgtaacatataatatacgtttctctggaatatcaaggagcttctttaaaactcctgaaaatcaagctgacaagccaggatttctcagtctaatttctcaaattaatgctttgggctttgagactaatggactacattggaggagaactgcgcatcattaaattaagaagaaagaaggtcccagagaccaaaacatcaagagttacaaggacccattaatgaggctgaaaacacagaaaaaattgtctaatatagatcgagctatctatcaacggagatcattgcctatttgagatcggtctatccatcctagccatataggcacgctatacagtgattctaacaatcacaacagagcaacacaccaccagaacagaggaagttgatctggtggcccttctccaagtctagatgcgcacatacctctactgaatcagttgcaggcgcatgaagatggacacccgcagcaaatgcgtccagctgtcttcctatattatagaagaacagtgtgatcctgatctgatatagtcgtagcctgatatacaagcacattctattctaattcttgcagctgtgtaatttcaggtacaatttgatggccaacagagtattactattactaattttggcatccagaagcgaatctggcatatattcacaaatgcttgcaaaaattgctggtcatttcttaagaaatttaaagagtcaactgccccactcaagaatgcttgctatatctgctttgaacacattattgcaaggatcacctcataagacatctgcacaaaattctaagcaaccaatagatcaccctgaagattgcaatatttcatcaacagaagagattttgaatgagataatccgggaggaaggattcatgaatgagacactgaacagtttatctcatgttcatattatttccgacaatgatggttcgtcaaaagcgagttatggggcatcatcttttcaaagcggatctgacaaagcaataacttacttctattttgatttctctgcctcatggccacgtactcctagttggatttctttactgcgtggtcacacattctattccagttttgctaggatattcaaaaggcttatacagcaatgtggaatgccagtaatctcttctcttcagagtacactagaagagtttttaatttcaaaagagagaccaaggcaatgtgtcgctgctgaagcgatggctgggatgctgcactctgatatcattgggaatctggaatgtgagaacaactggttgatggcccagttgcataagattatgttagcaccatctgtggagtcagctcctgaatgggcagcttgtattcgatatgctgttacaggaaaagaaagagctggaactcgtgctcctgttctcaggcaaaaagtattagaatgcttatgtactcctcttcctcattccatggcaactagcgtacttgcgaagagatattcttttctgtccgttgctctaatagaaatttctccacccaaaatgtccccagcagagaagcaataccatgttaaaattcttgatgaactacttgacagcatgaaccattcatctgctcaggtaagagaagcaattggtattgccatgtgtgttacaacctcaaatatgagactttctgggttatttggcactggatgttcaccgcaaggccttcatggggatgtaagcatgattgaacaaacaggaaataaatattggtctgaacgtttgacagatggagctaatgaattagccgtaagtatacaaaatagtactcaatctaagcaactagaatcaacatcagattcggctgaagatagcatggatgatagagagcaggctgatgctaaaaggatggaaacgatatttcattttatgatcgcatctttgaagtctgggcgatcttctgttctactggacactattattaggcttgtgtacccaattctctcactacaggaaacatcaaataaagatttatcattgcttgctaagtcagctttcgagttgctgaaatggaggattctacatcggccttttcttgaaactgctattacgtctattcttcctttagtcagtgatcctaactggcgtaccagatctgcactgttatcgtatctcaggacctttacctacaggcacacattcatactttctggctcagagaaatcacaaatctggcaaacaatagaaaaattacttgtggacaaccaagttgaggttagggagcatgctgctggtgttcttgcaagcttaatgaagggtatagatgaagatctatcaaaggatttccgtgaacggtcatatgcacaagcccagcatatttttgttgcacggagaagaaatttgaagttttctgttggtaccatccatggtgcagtccttgctttgacagcttcggtcctttctgttccatacgacatgcctagctggcttccttctaatgtctcgctacttgctcgcttcatccgggagcctccccctataagatcaacagtcacgaaagctgttgcagaatttaagcgcacccatgctgacacatggagcatccagaaggacgcattcactgaagacgaactggaggttctccgtgatacatcttcctcctcgtcgtacttcgcttagattaaaatttcaaaggccataggatattctctggtactggtgttgtgtatatgaatttataactgttgaagtgtcggtgtttttcataaagtatatccttgtacgtacctagttttatttcatcaacagatgccttcgtacaactgagatgaagttatgcagtctactgtataccgtctggacatagcggaagcattatggcatgtgggatccttgcgtgggctgagaaattgttaacatccaaatcttttgcccagtcaacgacgtgaataagatgctgcctagtttaaccgcataatgcatctctggcaactctaatagcagagtcaacgggctagatataaacttgcccatgttcattagaagcaagaaagaatcagccattgacattaagaagtacatgagcacccccgatgcaaacgtctatagccctaatcatacttgtttcttgcttcctccattttacaatacttgttcataatcttatcaaaatgtcacataatatctcttcatgaagatattagcacggtagttcatgtagtattttcattcttgacctaatcaaatgctttcgtagatggatggtttaaagtatctcctagaatttgtgcctagctttgtttcttccataatcagttgccacatcgtttaaacctaacaactccatctatcccaaaataaaccaacttgtagggttctactagggtcgttctatattaaattattttagatttcatcaaatttataaaaagataacgtaaataattatgacacca

SEQ ID NO: 62278 - DNA, 6379 bp, Zea Mays
ctctcgttcgatacaaattaatgaattataatggtatgtttataatatcaacatcaggaatagtaatgttatgatttgaattaaccttttggccaactttaccccgctactgtccccttccacacgaggccgtgcgtcaacgataacagcaccggatggtcgtgtggagcaccggccgccctagccccaggtctctctcccttgggtcgtcgtcgtcgtcgtcgtctccacggctacacccacatcttgtcttggaggcgaagaaagaaatcggccaagtatcccgcgccgcccaagtctccccaactaaccccccaaacctaccaccacccatccattttcgccttggcttgacccgcggagctctgactcagagggcatccacggcggcggcagtgcgagggtccgagggaagattggaggatgcacctctacaacgcgtggctaccgccaccggtgtcgaccgcggcgcgtggggaggcagctgcctttgcgggcgctgtgcggaccgccgcggacgcgtggctgcccggggactccgactccgcctacgccacactcaagtggatctccgtgttcgacctttttattaaagcgaagagtgacattgcttctgaggatcttcaggctcttgtaaagcttggactggaggtatttcatgcgtcacataacaagtttgttgtccagattaagtggggaggtctgctcataaggcttttaagaaagcatgggaagaggctttcacttgttgtgcaatggagaccactttatgagacgttgataaggactcatttcaagagaaacatgggccctgagggctggaaagtaaggaagcaacactttgagactgtgacctctttagtgtgtgcatctaggaatttctttactgaaggtgtggctgctgaaatttggtcagagttcaggcccttgctggaaaatccatggcataactcagcatttgaaggtgttggatttctcaggctgtttcttccagcgaactcgaggaatcaggatcactttacaactgattggattagaaattgtctggacatatgggattctgtcacaaattgtaacttctgggacatccaatgggcttccatcatagcacgttgtataaaaaattcaagatctgtgaactgggatgcttttcttcccttgttattcacaagatacttgaacatgtttgaggttcctatatcaagtggcaatggttcatacccctttccagtggaggttcctgggaacacaagatttttattttccagtaagaccagaacactttccaaggcaattgcaaagtctgttgtataccttttgaagcctaaaagtttagcatttgagtattttgagaagctcattaattttttggaacagttctatcatccgtcaaatgggggtcgttggacctactcattggaacgcttcctgcgctatcttgttgtttactttgagaaacgccttcagcatgaacaatttgttatggcagttgaggaccatgatcaatcttatctgggaaaggaagaaaggtctgtttttgtcaaagctatcttgaaattattggatcgtggtcagtacagcaaggataattctcttgctgaaacagtttccgttgcaacttcgatcctgtcttatattgaaccaaccctcgtgcttcagtttgttgcaaaaaacttccaacgagccttagagacaactacagctacccatcagttaaagaacgctgtcacatctgttgcattttctggacgtgctcttcttctatgttctttatgttcatctcagaatgatgatagcagtgttgttgattcattcagtgatcttgttgtcgcttccctttcaaatgcgttacttggcatggatgccaatgatccacctaaaactattgctacaatgcagttaattgggtctatcttttcaaatctagctgcagttagtgatgatgtgcctatattgctccaatctactactctatcgaactggctagatgaattcttttcccgactgttttctgtgcttcataatctggaatcaagtagtcccattaatgagggttaccaaagctcattcatgtcagggacttttcttgttgacagtccatattacttttgtatgcttgaaattcttctagggaagttatcaaaacccttatttaatcagtccctgaagagaattgccaagttcgttaatgcaaatatcctccctggtgctacttcagaagttgggcttctttgttgtgcctgtgttcattcttatcctgaggaggcttcagtctaccttgtaaagccaatcttagagaccatcatgtcatcctttgaggggactccaaccactggttatgtaggaagagtagttgcagataaagcatctaccaaggctgcactttctcctgctctggaaacagcaatagattactatctgagggttttggccatatccatcagttatgccggtcctaccttactcaattataaggaggaactaaatcacataataacatctgcgttccagtccccttcttggaaggttaatggagctggggatcatctccttcgctctctgctaggaaatctggtttcttattacccaattgatcagtacaagccattcacttgtcagcctattggaaatattattgaaccatgggggtgttcgaaagctcatcaggatagggaggatgaaatgcttaatttccctccaaagtggcatgatccaagtcatgatgaactctcttttgcaaatgaattactacaacttcatttccagtcagctttagaagatcttttgactatttgtcagacaaaagttcattctgacacaggagatgagaaggagcacctaaaaataaccctgttacgcattcattctgcattgcatggtgtaatgtcttgtttaccagaaattcgcccgtcatataaagatgggaggtccctggaagtggagtcggctttcttcatagcaggatctgctggtagcactgttggaagctcagaaatgcgtgaaaaggctgcagaatttgtgcacatagcttgcaggtacttattaaaggaaagaactgatgacagtattcttctatcccttgttgtgcgtgtcattgatgctttggtaaactatggaagcttggaataccaagaatggtcaagccatgttcaagcttggaaactagaatctgcttccataattgagcctccatgcaacttcattgttccatttcatgctcaaggaaaaaagagacctagatgggcacttgttgacaaagcaaacttgcatagtacatggaggtgttcacaatcatcatatcacagatacagaatgaatgcagatgtttcgccatctgtccccatgattaatttgatgaatgatctcttagatctctcactacacaactatgaaactgttcgatcgtatgctggaagatcgcttacaaaattgttgaaacgttggccttctctaatttctaattgtgttctcacactcacgggaaatttgcgtgacccaaaagctcctgaacatgttgttcttggttcttgcagcattctgatctcacagactgttttaagacacttgaccactgattctgtttccctctcttcctttatcatgggaattctggaaagctctcatcatgaatcgttgaagtgtcagaaagctattactgagctctttgtaacatataatatacgtttctctggaatatcaaggagcttctttaaaactcctgaaaatcaagctgacaagccaggatttctcagtctaatttctcaaattaatgctttgggctttgagactaatggactacattggaggtacaatttgatggccaacagagtattactattactaattttggcatccagaagcgaatctggcatatattcacaaatgcttgcaaaaattgctgaagagattttgaatgagataatccgggaggaaggattcatgaatgagacactgaacagtttatctcatgttcatattatttccgacaatgatggttcgtcaaaagcgagttatggggcatcatcttttcaaagcggatctgacaaagcaataacttacttctattttgatttctctgcctcatggccacgtactcctagttggatttctttactgcgtggtcacacattctattccagttttgctaggatattcaaaaggcttatacagcaatgtggaatgccagtaatctcttctcttcagagtacactagaagagtttttaatttcaaaagagagaccaaggcaatgtgtcgctgctgaagcgatggctgggatgctgcactctgatatcattgggaatctggaatgtgagaacaactggttgatggcccagttgcataagattatgttagcaccatctgtggagtcagctcctgaatgggcagcttgtattcgatatgctgttacaggaaaagaaagagctggaactcgtgctcctgttctcaggcaaaaagtattagaatgcttatgtactcctcttcctcattccatggcaactagcgtacttgcgaagagatattcttttctgtccgttgctctaatagaaatttctccacccaaaatgtccccagcagagaagcaataccatgttaaaattcttgatgaactacttgacagcatgaaccattcatctgctcaggtaagagaagcaattggtattgccatgtgtgttacaacctcaaatatgagactttctgggttatttggcactggatgttcaccgcaaggccttcatggggatgtaagcatgattgaacaaacaggaaataaatattggtctgaacgtttgacagatggagctaatgaattagccgtaagtatacaaaatagtactcaatctaagcaactagaatcaacatcagattcggctgaagatagcatggatgatagagagcaggctgatgctaaaaggatggaaacgatatttcattttatgatcgcatctttgaagtctgggcgatcttctgttctactggacactattattaggcttgtgtacccaattctctcactacaggaaacatcaaataaagatttatcattgcttgctaagtcagctttcgagttgctgaaatggaggattctacatcggccttttcttgaaactgctattacgtctattcttcctttagtcagtgatcctaactggcgtaccagatctgcactgttatcgtatctcaggacctttacctacaggttagggagcatgctgctggtgttcttgcaagcttaatgaagggtatagatgaagatctatcaaaggatttccgtgaacggtcatatgcacaagcccagcatatttttgttgcacggagaagaaatttgaagttttctgttggtaccatccatggtgcagtccttgctttgacagcttcggtcctttctgttccatacgacatgcctagctggcttccttctaatgtctcgctacttgctcgcttcatccgggagcctccccctataagatcaacagtcacgaaagctgttgcagaatttaagcgcacccatgctgacacatggagcatccagaaggacgcattcactgaagacgaactggaggttctccgtgatacatcttcctcctcgtcgtacttcgcttagattaaaatttcaaaggccataggatattctctggtactggtgttgtgtatatgaatttataactgttgaagtgtcggtgtttttcataaagtatatccttgtacgtacctagttttatttcatcaacagatgccttcgtacaactgagatgaagttatgcagtctactgtataccgtctggacatagcggaagcattatggcatgtgggatccttgcgtgggctgagaaattgttaacatccaaatcttttgcccagtcaacgacgtgaataagatgctgcctagtttaaccgcataatgcatctctggcaactctaatagcagagtcaacgggctagatataaacttgcccatgttcattagaagcaagaaagaatcagccattgacattaagaagtacatgagcacccccgatgcaaacgtctatagccctaatcatacttgtttcttgcttcctccattttacaatacttgttcataatcttatcaaaatgtcacataatatctcttcatgaagatattagcacggtagttcatgtagtattttcattcttgacctaatcaaatgctttcgtagatggatggtttaaagtatctcctagaatttgtgcctagctttgtttcttccataatcagttgccacatcgtttaaacctaacaactccatctatcccaaaataaaccaacttgtagggttctactagggtcgttctatattaaattattttagatttcatcaaatttataaaaagataacgtaaataattatgacacca

SEQ ID NO: 62279 - DNA, 7286 bp, Zea Mays
ctctcgttcgatacaaattaatgaattataatggtatgtttataatatcaacatcaggaatagtaatgttatgatttgaattaaccttttggccaactttaccccgctactgtccccttccacacgaggccgtgcgtcaacgataacagcaccggatggtcgtgtggagcaccggccgccctagccccaggtctctctcccttgggtcgtcgtcgtcgtcgtcgtctccacggctacacccacatcttgtcttggaggcgaagaaagaaatcggccaagtatcccgcgccgcccaagtctccccaactaaccccccaaacctaccaccacccatccattttcgccttggcttgacccgcggagctctgactcagagggcatccacggcggcggcagtgcgagggtccgagggaagattggaggatgcacctctacaacgcgtggctaccgccaccggtgtcgaccgcggcgcgtggggaggcagctgcctttgcgggcgctgtgcggaccgccgcggacgcgtggctgcccggggactccgactccgcctacgccacactcaagtggatctccgtgttcgacctttttattaaagcgaagagtgacattgcttctgaggatcttcaggctcttgtaaagcttggactggaggtatttcatgcgtcacataacaagtttgttgtccagattaagtggggaggtctgctcataaggcttttaagaaagcatgggaagaggctttcacttgttgtgcaatggagaccactttatgagacgttgataaggactcatttcaagagaaacatgggccctgagggctggaaagtaaggaagcaacactttgagactgtgacctctttagtgtgtgcatctaggaatttctttactgaaggtgtggctgctgaaatttggtcagagttcaggcccttgctggaaaatccatggcataactcagcatttgaaggtgttggatttctcaggctgtttcttccagcgaactcgaggaatcaggatcactttacaactgattggattagaaattgtctggacatatgggattctgtcacaaattgtaacttctgggacatccaatgggcttccatcatagcacgttgtataaaaaattcaagatctgtgaactgggatgcttttcttcccttgttattcacaagatacttgaacatgtttgaggttcctatatcaagtggcaatggttcatacccctttccagtggaggttcctgggaacacaagatttttattttccagtaagaccagaacactttccaaggcaattgcaaagtctgttgtataccttttgaagcctaaaagtttagcatttgagtattttgagaagctcattaattttttggaacagttctatcatccgtcaaatgggggtcgttggacctactcattggaacgcttcctgcgctatcttgttgtttactttgagaaacgccttcagcatgaacaatttgttatggcagttgaggaccatgatcaatcttatctgggaaaggaagaaaggtctgtttttgtcaaagctatcttgaaattattggatcgtggtcagtacagcaaggataattctcttgctgaaacagtttccgttgcaacttcgatcctgtcttatattgaaccaaccctcgtgcttcagtttgttgcaaaaaacttccaacgagccttagagacaactacagctacccatcagttaaagaacgctgtcacatctgttgcattttctggacgtgctcttcttctatgttctttatgttcatctcagaatgatgatagcagtgttgttgattcattcagtgatcttgttgtcgcttccctttcaaatgcgttacttggcatggatgccaatgatccacctaaaactattgctacaatgcagttaattgggtctatcttttcaaatctagctgcagttagtgatgatgtgcctatattgctccaatctactactctatcgaactggctagatgaattcttttcccgactgttttctgtgcttcataatctggaatcaagtagtcccattaatgagggttaccaaagctcattcatgtcagggacttttcttgttgacagtccatattacttttgtatgcttgaaattcttctagggaagttatcaaaacccttatttaatcagtccctgaagagaattgccaagttcgttaatgcaaatatcctccctggtgctacttcagaagttgggcttctttgttgtgcctgtgttcattcttatcctgaggaggcttcagtctaccttgtaaagccaatcttagagaccatcatgtcatcctttgaggggactccaaccactggttatgtaggaagagtagttgcagataaagcatctaccaaggctgcactttctcctgctctggaaacagcaatagattactatctgagggttttggccatatccatcagttatgccggtcctaccttactcaattataaggaggaactaaatcacataataacatctgcgttccagtccccttcttggaaggttatatttttcatttatcttttcatacattcgaacagctattatttccatgtcccaatcatatattataggatgacgaatttccttttctcttggaatgtctaggttaatggagctggggatcatctccttcgctctctgctaggaaatctggtttcttattacccaattgatcagtacaagtatgtttacatcatgtgcacttgtttgttttctcaaacacatacactcaatgttttctttatttgatctataacatgtttacccaccaaccaatatattattctgtttgtataggccattcacttgtcagcctattggaaatattattgaaccatgggggtgttcgaaagctcatcaggatagggaggatgaaatgcttaatttccctccaaagtggcatgatccaagtcatgatgaactctcttttgcaaatgaattactacaacttcatttccagtcagctttagaagatcttttgactatttgtcagacaaaagttcattctgacacagcaggagatgagaaggagcacctaaaaataaccctgttacgcattcattctgcattgcatggtgtaatgtcttgtttaccagaaattcgcccgtcatataaagatgggaggtccctggaagtggagtcggctttcttcatagcaggatctgctggtagcactgttggaagctcagaaatgcgtgaaaaggctgcagaatttgtgcacatagcttgcaggtacttattaaaggaaagaactgatgacagtattcttctatcccttgttgtgcgtgtcattgatgctttggtaaactatggaagcttggaataccaagaatggtcaagccatgttcaagcttggaaactagaatctgcttccataattgagcctccatgcaacttcattgttccatttcatgctcaaggaaaaaagagacctagatgggcacttgttgacaaagcaaacttgcatagtacatggaggtgttcacaatcatcatatcacagatacagaatgaatgcagatgtttcgccatctgtccccatgattaatttgatgaatgatctcttagatctctcactacacaactatgaaactgttcgatcgtatgctggaagatcgcttacaaaattgttgaaacgttggccttctctaatttctaattgtgttctcacactcacgggaaatttgcgtgacccaaaagctcctgaacatgttgttcttggttcttgcagcattctgatctcacagactgttttaagacacttgaccactgattctgtttccctctcttcctttatcatgggaattctggaaagctctcatcatgaatcgttgaagtgtcagaaagctattactgagctctttgtaacatataatatacgtttctctggaatatcaaggagcttctttaaaactcctgaaaatcaagctgacaagccaggatttctcagtctaatttctcaaattaatgctttgggctttgagactaatggactacattggaggagaactgcgcatcattaaattaagaagaaagaaggtcccagagaccaaaacatcaagagttacaaggacccattaatgaggctgaaaacacagaaaaaattgtctaatatagatcgagctatctatcaacggagatcattgcctatttgagatcggtctatccatcctagccatataggcacgctatacagtgattctaacaatcacaacagagcaacacaccaccagaacagaggaagttgatctggtggcccttctccaagtctagatgcgcacatacctctactgaatcagttgcaggcgcatgaagatggacacccgcagcaaatgcgtccagctgtcttcctatattatagaagaacagtgtgatcctgatctgatatagtcgtagcctgatatacaagcacattctattctaattcttgcagctgtgtaatttcaggtacaatttgatggccaacagagtattactattactaattttggcatccagaagcgaatctggcatatattcacaaatgcttgcaaaaattgctggtcatttcttaagaaatttaaagagtcaactgccccactcaagaatgcttgctatatctgctttgaacacattattgcaaggatcacctcataagacatctgcacaaaattctaagcaaccaatagatcaccctgaagattgcaatatttcatcaacagaagagattttgaatgagataatccgggaggaaggattcatgaatgagacactgaacagtttatctcatgttcatattatttccgacaatgatggttcgtcaaaagcgagttatggggcatcatcttttcaaagcggatctgacaaagcaataacttacttctattttgatttctctgcctcatggccacgtactcctagttggatttctttactgcgtggtcacacattctattccagttttgctaggatattcaaaaggcttatacagcaatgtggaatgccagtaatctcttctcttcagagtacactagaagagtttttaatttcaaaagagagaccaaggcaatgtgtcgctgctgaagcgatggctgggatgctgcactctgatatcattgggaatctggaatgtgagaacaactggttgatggcccagttgcataagattatgttagcaccatctgtggagtcagctcctgaatgggcagcttgtattcgatatgctgttacaggaaaagaaagagctggaactcgtgctcctgttctcaggcaaaaagtattagaatgcttatgtactcctcttcctcattccatggcaactagcgtacttgcgaagagatattcttttctgtccgttgctctaatagaaatttctccacccaaaatgtccccagcagagaagcaataccatgttaaaattcttgatgaactacttgacagcatgaaccattcatctgctcaggtaagagaagcaattggtattgccatgtgtgttacaacctcaaatatgagactttctgggttatttggcactggatgttcaccgcaaggccttcatggggatgtaagcatgattgaacaaacaggaaataaatattggtctgaacgtttgacagatggagctaatgaattagccgtaagtatacaaaatagtactcaatctaagcaactagaatcaacatcagattcggctgaagatagcatggatgatagagagcaggctgatgctaaaaggatggaaacgatatttcattttatgatcgcatctttgaagtctgggcgatcttctgttctactggacactattattaggcttgtgtacccaattctctcactacaggaaacatcaaataaagatttatcattgcttgctaagtcagctttcgagttgctgaaatggaggattctacatcggccttttcttgaaactgctattacgtctattcttcctttagtcagtgatcctaactggcgtaccagatctgcactgttatcgtatctcaggacctttacctacaggcacacattcatactttctggctcagagaaatcacaaatctggcaaacaatagaaaaattacttgtggacaaccaagttgaggttagggagcatgctgctggtgttcttgcaagcttaatgaagggtatagatgaagatctatcaaaggatttccgtgaacggtcatatgcacaagcccagcatatttttgttgcacggagaagaaatttgaagttttctgttggtaccatccatggtgcagtccttgctttgacagcttcggtcctttctgttccatacgacatgcctagctggcttccttctaatgtctcgctacttgctcgcttcatccgggagcctccccctataagatcaacagtcacgaaagctgttgcagaatttaagcgcacccatgctgacacatggagcatccagaaggacgcattcactgaagacgaactggaggttctccgtgatacatcttcctcctcgtcgtacttcgcttagattaaaatttcaaaggccataggatattctctggtactggtgttgtgtatatgaatttataactgttgaagtgtcggtgtttttcataaagtatatccttgtacgtacctagttttatttcatcaacagatgccttcgtacaactgagatgaagttatgcagtctactgtataccgtctggacatagcggaagcattatggcatgtgggatccttgcgtgggctgagaaattgttaacatccaaatcttttgcccagtcaacgacgtgaataagatgctgcctagtttaaccgcataatgcatctctggcaactctaatagcagagtcaacgggctagatataaacttgcccatgttcattagaagcaagaaagaatcagccattgacattaagaagtacatgagcacccccgatgcaaacgtctatagccctaatcatacttgtttcttgcttcctccattttacaatacttgttcataatcttatcaaaatgtcacataatatctcttcatgaagatattagcacggtagttcatgtagtattttcattcttgacctaatcaaatgctttcgtagatggatggtttaaagtatctcctagaatttgtgcctagctttgtttcttccataatcagttgccacatcgtttaaacctaacaactccatctatcccaaaataaaccaacttgtagggttctactagggtcgttctatattaaattattttagatttcatcaaatttataaaaagataacgtaaataattatgacacca

SEQ ID NO: 62280 - DNA, 6543 bp, Zea Mays
ctctcgttcgatacaaattaatgaattataatggtatgtttataatatcaacatcaggaatagtaatgttatgatttgaattaaccttttggccaactttaccccgctactgtccccttccacacgaggccgtgcgtcaacgataacagcaccggatggtcgtgtggagcaccggccgccctagccccaggtctctctcccttgggtcgtcgtcgtcgtcgtcgtctccacggctacacccacatcttgtcttggaggcgaagaaagaaatcggccaagtatcccgcgccgcccaagtctccccaactaaccccccaaacctaccaccacccatccattttcgccttggcttgacccgcggagctctgactcagagggcatccacggcggcggcagtgcgagggtccgagggaagattggaggatgcacctctacaacgcgtggctaccgccaccggtgtcgaccgcggcgcgtggggaggcagctgcctttgcgggcgctgtgcggaccgccgcggacgcgtggctgcccggggactccgactccgcctacgccacactcaagtggatctccgtgttcgacctttttattaaagcgaagagtgacattgcttctgaggatcttcaggctcttgtaaagcttggactggaggtatttcatgcgtcacataacaagtttgttgtccagattaagtggggaggtctgctcataaggcttttaagaaagcatgggaagaggctttcacttgttgtgcaatggagaccactttatgagacgttgataaggactcatttcaagagaaacatgggccctgagggctggaaagtaaggaagcaacactttgagactgtgacctctttagtgtgtgcatctaggaatttctttactgaaggtgtggctgctgaaatttggtcagagttcaggcccttgctggaaaatccatggcataactcagcatttgaaggtgttggatttctcaggctgtttcttccagcgaactcgaggaatcaggatcactttacaactgattggattagaaattgtctggacatatgggattctgtcacaaattgtaacttctgggacatccaatgggcttccatcatagcacgttgtataaaaaattcaagatctgtgaactgggatgcttttcttcccttgttattcacaagatacttgaacatgtttgaggttcctatatcaagtggcaatggttcatacccctttccagtggaggttcctgggaacacaagatttttattttccagtaagaccagaacactttccaaggcaattgcaaagtctgttgtataccttttgaagcctaaaagtttagcatttgagtattttgagaagctcattaattttttggaacagttctatcatccgtcaaatgggggtcgttggacctactcattggaacgcttcctgcgctatcttgttgtttactttgagaaacgccttcagcatgaacaatttgttatggcagttgaggaccatgatcaatcttatctgggaaaggaagaaagtttccgttgcaacttcgatcctgtcttatattgaaccaaccctcgtgcttcagtttgttgcaaaaaacttccaacgagccttagagacaactacagctacccatcagttaaagaacgctgtcacatctgttgcattttctggacgtgctcttcttctatgttctttatgttcatctcagaatgatgatagcagtgttgttgattcattcagtgatcttgttgtcgcttccctttcaaatgcgttacttggcatggatgccaatgatccacctaaaactattgctacaatgcagttaattgggtctatcttttcaaatctagctgcagttagtgatgatgtgcctatattgctccaatctactactctatcgaactggctagatgaattcttttcccgactgttttctgtgcttcataatctggaatcaagtagtcccattaatgagggttaccaaagctcattcatgtcagggacttttcttgttgacagtccatattacttttgtatgcttgaaattcttctagggaagttatcaaaacccttatttaatcagtccctgaagagaattgccaagttcgttaatgcaaatatcctccctggtgctacttcagaagttgggcttctttgttgtgcctgtgttcattcttatcctgaggaggcttcagtctaccttgtaaagccaatcttagagaccatcatgtcatcctttgaggggactccaaccactggttatgtaggaagagtagttgcagataaagcatctaccaaggctgcactttctcctgctctggaaacagcaatagattactatctgagggttttggccatatccatcagttatgccggtcctaccttactcaattataaggaggaactaaatcacataataacatctgcgttccagtccccttcttggaaggttaatggagctggggatcatctccttcgctctctgctaggaaatctggtttcttattacccaattgatcagtacaagccattcacttgtcagcctattggaaatattattgaaccatgggggtgttcgaaagctcatcaggatagggaggatgaaatgcttaatttccctccaaagtggcatgatccaagtcatgatgaactctcttttgcaaatgaattactacaacttcatttccagtcagctttagaagatcttttgactatttgtcagacaaaagttcattctgacacaggagatgagaaggagcacctaaaaataaccctgttacgcattcattctgcattgcatggtgtaatgtcttgtttaccagaaattcgcccgtcatataaagatgggaggtccctggaagtggagtcggctttcttcatagcaggatctgctggtagcactgttggaagctcagaaatgcgtgaaaaggctgcagaatttgtgcacatagcttgcaggtacttattaaaggaaagaactgatgacagtattcttctatcccttgttgtgcgtgtcattgatgctttggtaaactatggaagcttggaataccaagaatggtcaagccatgttcaagcttggaaactagaatctgcttccataattgagcctccatgcaacttcattgttccatttcatgctcaaggaaaaaagagacctagatgggcacttgttgacaaagcaaacttgcatagtacatggaggtgttcacaatcatcatatcacagatacagaatgaatgcagatgtttcgccatctgtccccatgattaatttgatgaatgatctcttagatctctcactacacaactatgaaactgttcgatcgtatgctggaagatcgcttacaaaattgttgaaacgttggccttctctaatttctaattgtgttctcacactcacgggaaatttgcgtgacccaaaagctcctgaacatgttgttcttggttcttgcagcattctgatctcacagactgttttaagacacttgaccactgattctgtttccctctcttcctttatcatgggaattctggaaagctctcatcatgaatcgttgaagtgtcagaaagctattactgagctctttgtaacatataatatacgtttctctggaatatcaaggagcttctttaaaactcctgaaaatcaagctgacaagccaggatttctcagtctaatttctcaaattaatgctttgggctttgagactaatggactacattggaggtacaatttgatggccaacagagtattactattactaattttggcatccagaagcgaatctggcatatattcacaaatgcttgcaaaaattgctggtcatttcttaagaaatttaaagagtcaactgccccactcaagaatgcttgctatatctgctttgaacacattattgcaaggatcacctcataagacatctgcacaaaattctaagcaaccaatagatcaccctgaagattgcaatatttcatcaacagaagagattttgaatgagataatccgggaggaaggattcatgaatgagacactgaacagtttatctcatgttcatattatttccgacaatgatggttcgtcaaaagcgagttatggggcatcatcttttcaaagcggatctgacaaagcaataacttacttctattttgatttctctgcctcatggccacgtactcctagttggatttctttactgcgtggtcacacattctattccagttttgctaggatattcaaaaggcttatacagcaatgtggaatgccagtaatctcttctcttcagagtacactagaagagtttttaatttcaaaagagagaccaaggcaatgtgtcgctgctgaagcgatggctgggatgctgcactctgatatcattgggaatctggaatgtgagaacaactggttgatggcccagttgcataagattatgttagcaccatctgtggagtcagctcctgaatgggcagcttgtattcgatatgctgttacaggaaaagaaagagctggaactcgtgctcctgttctcaggcaaaaagtattagaatgcttatgtactcctcttcctcattccatggcaactagcgtacttgcgaagagatattcttttctgtccgttgctctaatagaaatttctccacccaaaatgtccccagcagagaagcaataccatgttaaaattcttgatgaactacttgacagcatgaaccattcatctgctcaggtaagagaagcaattggtattgccatgtgtgttacaacctcaaatatgagactttctgggttatttggcactggatgttcaccgcaaggccttcatggggatgtaagcatgattgaacaaacaggaaataaatattggtctgaacgtttgacagatggagctaatgaattagccgtaagtatacaaaatagtactcaatctaagcaactagaatcaacatcagattcggctgaagatagcatggatgatagagagcaggctgatgctaaaaggatggaaacgatatttcattttatgatcgcatctttgaagtctgggcgatcttctgttctactggacactattattaggcttgtgtacccaattctctcactacaggaaacatcaaataaagatttatcattgcttgctaagtcagctttcgagttgctgaaatggaggattctacatcggccttttcttgaaactgctattacgtctattcttcctttagtcagtgatcctaactggcgtaccagatctgcactgttatcgtatctcaggacctttacctacaggcacacattcatactttctggctcagagaaatcacaaatctggcaaacaatagaaaaattacttgtggacaaccaagttgaggttagggagcatgctgctggtgttcttgcaagcttaatgaagggtatagatgaagatctatcaaaggatttccgtgaacggtcatatgcacaagcccagcatatttttgttgcacggagaagaaatttgaagttttctgttggtaccatccatggtgcagtccttgctttgacagcttcggtcctttctgttccatacgacatgcctagctggcttccttctaatgtctcgctacttgctcgcttcatccgggagcctccccctataagatcaacagtcacgaaagctgttgcagaatttaagcgcacccatgctgacacatggagcatccagaaggacgcattcactgaagacgaactggaggttctccgtgatacatcttcctcctcgtcgtacttcgcttagattaaaatttcaaaggccataggatattctctggtactggtgttgtgtatatgaatttataactgttgaagtgtcggtgtttttcataaagtatatccttgtacgtacctagttttatttcatcaacagatgccttcgtacaactgagatgaagttatgcagtctactgtataccgtctggacatagcggaagcattatggcatgtgggatccttgcgtgggctgagaaattgttaacatccaaatcttttgcccagtcaacgacgtgaataagatgctgcctagtttaaccgcataatgcatctctggcaactctaatagcagagtcaacgggctagatataaacttgcccatgttcattagaagcaagaaagaatcagccattgacattaagaagtacatgagcacccccgatgcaaacgtctatagccctaatcatacttgtttcttgcttcctccattttacaatacttgttcataatcttatcaaaatgtcacataatatctcttcatgaagatattagcacggtagttcatgtagtattttcattcttgacctaatcaaatgctttcgtagatggatggtttaaagtatctcctagaatttgtgcctagctttgtttcttccataatcagttgccacatcgtttaaacctaacaactccatctatcccaaaataaaccaacttgtagggttctactagggtcgttctatattaaattattttagatttcatcaaatttataaaaagataacgtaaataattatgacacca

SEQ ID NO: 62281 - DNA, 6498 bp, Zea Mays
ctctcgttcgatacaaattaatgaattataatggtatgtttataatatcaacatcaggaatagtaatgttatgatttgaattaaccttttggccaactttaccccgctactgtccccttccacacgaggccgtgcgtcaacgataacagcaccggatggtcgtgtggagcaccggccgccctagccccaggtctctctcccttgggtcgtcgtcgtcgtcgtcgtctccacggctacacccacatcttgtcttggaggcgaagaaagaaatcggccaagtatcccgcgccgcccaagtctccccaactaaccccccaaacctaccaccacccatccattttcgccttggcttgacccgcggagctctgactcagagggcatccacggcggcggcagtgcgagggtccgagggaagattggaggatgcacctctacaacgcgtggctaccgccaccggtgtcgaccgcggcgcgtggggaggcagctgcctttgcgggcgctgtgcggaccgccgcggacgcgtggctgcccggggactccgactccgcctacgccacactcaagtggatctccgtgttcgacctttttattaaagcgaagagtgacattgcttctgaggatcttcaggctcttgtaaagcttggactggaggtatttcatgcgtcacataacaagtttgttgtccagattaagtggggaggtctgctcataaggcttttaagaaagcatgggaagaggctttcacttgttgtgcaatggagaccactttatgagacgttgataaggactcatttcaagagaaacatgggccctgagggctggaaagtaaggaagcaacactttgagactgtgacctctttagtgtgtgcatctaggaatttctttactgaaggtgtggctgctgaaatttggtcagagttcaggcccttgctggaaaatccatggcataactcagcatttgaaggtgttggatttctcaggctgtttcttccagcgaactcgaggaatcaggatcactttacaactgattggattagaaattgtctggacatatgggattctgtcacaaattgtaacttctgggacatccaatgggcttccatcatagcacgttgtataaaaaattcaagatctgtgaactgggatgcttttcttcccttgttattcacaagatacttgaacatgtttgaggttcctgggaacacaagatttttattttccagtaagaccagaacactttccaaggcaattgcaaagtctgttgtataccttttgaagcctaaaagtttagcatttgagtattttgagaagctcattaattttttggaacagttctatcatccgtcaaatgggggtcgttggacctactcattggaacgcttcctgcgctatcttgttgtttactttgagaaacgccttcagcatgaacaatttgttatggcagttgaggaccatgatcaatcttatctgggaaaggaagaaagtttccgttgcaacttcgatcctgtcttatattgaaccaaccctcgtgcttcagtttgttgcaaaaaacttccaacgagccttagagacaactacagctacccatcagttaaagaacgctgtcacatctgttgcattttctggacgtgctcttcttctatgttctttatgttcatctcagaatgatgatagcagtgttgttgattcattcagtgatcttgttgtcgcttccctttcaaatgcgttacttggcatggatgccaatgatccacctaaaactattgctacaatgcagttaattgggtctatcttttcaaatctagctgcagttagtgatgatgtgcctatattgctccaatctactactctatcgaactggctagatgaattcttttcccgactgttttctgtgcttcataatctggaatcaagtagtcccattaatgagggttaccaaagctcattcatgtcagggacttttcttgttgacagtccatattacttttgtatgcttgaaattcttctagggaagttatcaaaacccttatttaatcagtccctgaagagaattgccaagttcgttaatgcaaatatcctccctggtgctacttcagaagttgggcttctttgttgtgcctgtgttcattcttatcctgaggaggcttcagtctaccttgtaaagccaatcttagagaccatcatgtcatcctttgaggggactccaaccactggttatgtaggaagagtagttgcagataaagcatctaccaaggctgcactttctcctgctctggaaacagcaatagattactatctgagggttttggccatatccatcagttatgccggtcctaccttactcaattataaggaggaactaaatcacataataacatctgcgttccagtccccttcttggaaggttaatggagctggggatcatctccttcgctctctgctaggaaatctggtttcttattacccaattgatcagtacaagccattcacttgtcagcctattggaaatattattgaaccatgggggtgttcgaaagctcatcaggatagggaggatgaaatgcttaatttccctccaaagtggcatgatccaagtcatgatgaactctcttttgcaaatgaattactacaacttcatttccagtcagctttagaagatcttttgactatttgtcagacaaaagttcattctgacacaggagatgagaaggagcacctaaaaataaccctgttacgcattcattctgcattgcatggtgtaatgtcttgtttaccagaaattcgcccgtcatataaagatgggaggtccctggaagtggagtcggctttcttcatagcaggatctgctggtagcactgttggaagctcagaaatgcgtgaaaaggctgcagaatttgtgcacatagcttgcaggtacttattaaaggaaagaactgatgacagtattcttctatcccttgttgtgcgtgtcattgatgctttggtaaactatggaagcttggaataccaagaatggtcaagccatgttcaagcttggaaactagaatctgcttccataattgagcctccatgcaacttcattgttccatttcatgctcaaggaaaaaagagacctagatgggcacttgttgacaaagcaaacttgcatagtacatggaggtgttcacaatcatcatatcacagatacagaatgaatgcagatgtttcgccatctgtccccatgattaatttgatgaatgatctcttagatctctcactacacaactatgaaactgttcgatcgtatgctggaagatcgcttacaaaattgttgaaacgttggccttctctaatttctaattgtgttctcacactcacgggaaatttgcgtgacccaaaagctcctgaacatgttgttcttggttcttgcagcattctgatctcacagactgttttaagacacttgaccactgattctgtttccctctcttcctttatcatgggaattctggaaagctctcatcatgaatcgttgaagtgtcagaaagctattactgagctctttgtaacatataatatacgtttctctggaatatcaaggagcttctttaaaactcctgaaaatcaagctgacaagccaggatttctcagtctaatttctcaaattaatgctttgggctttgagactaatggactacattggaggtacaatttgatggccaacagagtattactattactaattttggcatccagaagcgaatctggcatatattcacaaatgcttgcaaaaattgctggtcatttcttaagaaatttaaagagtcaactgccccactcaagaatgcttgctatatctgctttgaacacattattgcaaggatcacctcataagacatctgcacaaaattctaagcaaccaatagatcaccctgaagattgcaatatttcatcaacagaagagattttgaatgagataatccgggaggaaggattcatgaatgagacactgaacagtttatctcatgttcatattatttccgacaatgatggttcgtcaaaagcgagttatggggcatcatcttttcaaagcggatctgacaaagcaataacttacttctattttgatttctctgcctcatggccacgtactcctagttggatttctttactgcgtggtcacacattctattccagttttgctaggatattcaaaaggcttatacagcaatgtggaatgccagtaatctcttctcttcagagtacactagaagagtttttaatttcaaaagagagaccaaggcaatgtgtcgctgctgaagcgatggctgggatgctgcactctgatatcattgggaatctggaatgtgagaacaactggttgatggcccagttgcataagattatgttagcaccatctgtggagtcagctcctgaatgggcagcttgtattcgatatgctgttacaggaaaagaaagagctggaactcgtgctcctgttctcaggcaaaaagtattagaatgcttatgtactcctcttcctcattccatggcaactagcgtacttgcgaagagatattcttttctgtccgttgctctaatagaaatttctccacccaaaatgtccccagcagagaagcaataccatgttaaaattcttgatgaactacttgacagcatgaaccattcatctgctcaggtaagagaagcaattggtattgccatgtgtgttacaacctcaaatatgagactttctgggttatttggcactggatgttcaccgcaaggccttcatggggatgtaagcatgattgaacaaacaggaaataaatattggtctgaacgtttgacagatggagctaatgaattagccgtaagtatacaaaatagtactcaatctaagcaactagaatcaacatcagattcggctgaagatagcatggatgatagagagcaggctgatgctaaaaggatggaaacgatatttcattttatgatcgcatctttgaagtctgggcgatcttctgttctactggacactattattaggcttgtgtacccaattctctcactacaggaaacatcaaataaagatttatcattgcttgctaagtcagctttcgagttgctgaaatggaggattctacatcggccttttcttgaaactgctattacgtctattcttcctttagtcagtgatcctaactggcgtaccagatctgcactgttatcgtatctcaggacctttacctacaggcacacattcatactttctggctcagagaaatcacaaatctggcaaacaatagaaaaattacttgtggacaaccaagttgaggttagggagcatgctgctggtgttcttgcaagcttaatgaagggtatagatgaagatctatcaaaggatttccgtgaacggtcatatgcacaagcccagcatatttttgttgcacggagaagaaatttgaagttttctgttggtaccatccatggtgcagtccttgctttgacagcttcggtcctttctgttccatacgacatgcctagctggcttccttctaatgtctcgctacttgctcgcttcatccgggagcctccccctataagatcaacagtcacgaaagctgttgcagaatttaagcgcacccatgctgacacatggagcatccagaaggacgcattcactgaagacgaactggaggttctccgtgatacatcttcctcctcgtcgtacttcgcttagattaaaatttcaaaggccataggatattctctggtactggtgttgtgtatatgaatttataactgttgaagtgtcggtgtttttcataaagtatatccttgtacgtacctagttttatttcatcaacagatgccttcgtacaactgagatgaagttatgcagtctactgtataccgtctggacatagcggaagcattatggcatgtgggatccttgcgtgggctgagaaattgttaacatccaaatcttttgcccagtcaacgacgtgaataagatgctgcctagtttaaccgcataatgcatctctggcaactctaatagcagagtcaacgggctagatataaacttgcccatgttcattagaagcaagaaagaatcagccattgacattaagaagtacatgagcacccccgatgcaaacgtctatagccctaatcatacttgtttcttgcttcctccattttacaatacttgttcataatcttatcaaaatgtcacataatatctcttcatgaagatattagcacggtagttcatgtagtattttcattcttgacctaatcaaatgctttcgtagatggatggtttaaagtatctcctagaatttgtgcctagctttgtttcttccataatcagttgccacatcgtttaaacctaacaactccatctatcccaaaataaaccaacttgtagggttctactagggtcgttctatattaaattattttagatttcatcaaatttataaaaagataacgtaaataattatgacacca

SEQ ID NO: 62282 - DNA, 5204 bp, Zea Mays
atgcaggtcggcgacgacagactaggccgaggtgggtcgcgccagggcgtcggtgtcagcggttggtgcttagtgcctggtggctgccggccaggccgatgcggggcgagacagggaagagatgggggaggaaagaggcacctaggtaaagaaaggaggcgccagggggccgcggcggcgggcgaccgaccatggctgacggcggccaggaattttattaaagcgaagagtgacattgcttctgaggatcttcaggctcttgtaaagcttggactggaggtatttcatgcgtcacataacaagtttgttgtccagattaagtggggaggtctgctcataaggcttttaagaaagcatgggaagaggctttcacttgttgtgcaatggagaccactttatgagacgttgataaggactcatttcaagagaaacatgggccctgagggctggaaagtaaggaagcaacactttgagactgtgacctctttagtgtgtgcatctaggaatttctttactgaaggtgtggctgctgaaatttggtcagagttcaggcccttgctggaaaatccatggcataactcagcatttgaaggtgttggatttctcaggctgtttcttccagcgaactcgaggaatcaggatcactttacaactgattggattagaaattgtctggacatatgggattctgtcacaaattgtaacttctgggacatccaatgggcttccatcatagcacgttgtataaaaaattcaagatctgtgaactgggatgcttttcttcccttgttattcacaagatacttgaacatgtttgaggttcctatatcaagtggcaatggttcatacccctttccagtggaggttcctgggaacacaagatttttattttccagtaagaccagaacactttccaaggcaattgcaaagtctgttgtataccttttgaagcctaaaagtttagcatttgagtattttgagaagctcattaattttttggaacagtatgccttctagcattggtcttcttttgaggtctgcaggggcctttttattttgtttgaacctgagtaattttggtttttaggttctatcatccgtcaaatgggggtcgttggacctactcattggaacgcttcctgcgctatcttgttgtttactttgagaaacgccttcagcatgaacaatttgttatggcagttgaggaccatgatcaatcttatctgggaaaggaagaaaggtctgtttttgtcaaagctatcttgaaattattggatcgtggtcagtacagcaaggataattctcttgctgaaacagtttccgttgcaacttcgatcctgtcttatattgaaccaaccctcgtgcttcagtttgttgcaaaaaacttccaacgagccttagagacaactacagctacccatcagttaaagaacgctgtcacatctgttgcattttctggacgtgctcttcttctatgttctttatgttcatctcagaatgatgatagcagtgttgttgattcattcagtgatcttgttgtcgcttccctttcaaatgcgttacttggcatggatgccaatgatccacctaaaactattgctacaatgcagttaattgggtctatcttttcaaatgtaagttttttcttttaccttatcatctgcaattgtggtttctggtaaagattactttgctaactctcctatggtgtatatagctagctgcagttagtgatgatgtgcctatattgctccaatctactactctatcgaactggctagatgaattcttttcccgactgttttctgtgcttcataatctggaatcaagtagtcccattaatgagggttaccaaagctcattcatgtcagggacttttcttgttgacagtccatattacttttgtatgcttgaaattcttctagggaagttatcaaaacccttatttaatcagtccctgaagagaattgccaagttcgttaatgcaaatatcctccctggtgctacttcagaagttgggcttctttgttgtgcctgtgttcattcttatcctgaggaggcttcagtctaccttgtaaagccaatcttagagaccatcatgtcatcctttgaggggactccaaccactggttatgtaggaagagtagttgcagataaagcatctaccaaggctgcactttctcctgctctggaaacagcaatagattactatctgagggttttggccatatccatcagttatgccggtcctaccttactcaattataaggaggaactaaatcacataataacatctgcgttccagtccccttcttggaaggttaatggagctggggatcatctccttcgctctctgctaggaaatctggtttcttattacccaattgatcagtacaagccattcacttgtcagcctattggaaatattattgaaccatgggggtgttcgaaagctcatcaggatagggaggatgaaatgcttaatttccctccaaagtggcatgatccaagtcatgatgaactctcttttgcaaatgaattactacaacttcatttccagtcagctttagaagatcttttgactatttgtcagacaaaagttcattctgacacaggagatgagaaggagcacctaaaaataaccctgttacgcattcattctgcattgcatggtgtaatgtcttgtttaccagaaattcgcccgtcatataaagatgggaggtccctggaagtggagtcggctttcttcatagcaggatctgctggtagcactgttggaagctcagaaatgcgtgaaaaggctgcagaatttgtgcacatagcttgcaggtacttattaaaggaaagaactgatgacagtattcttctatcccttgttgtgcgtgtcattgatgctttggtaaactatggaagcttggaataccaagaatggtcaagccatgttcaagcttggaaactagaatctgcttccataattgagcctccatgcaacttcattgttccatttcatgctcaaggaaaaaagagacctagatgggcacttgttgacaaagcaaacttgcatagtacatggaggtgttcacaatcatcatatcacagatacagaatgaatgcagatgtttcgccatctgtccccatgattaatttgatgaatgatctcttagatctctcactacacaactatgaaactgttcgatcgtatgctggaagatcgcttacaaaattgttgaaacgttggccttctctaatttctaattgtgttctcacactcacgggaaatttgcgtgacccaaaagctcctgaacatgttgttcttggttcttgcagcattctgatctcacagactgttttaagacacttgaccactgattctgtttccctctcttcctttatcatgggaattctggaaagctctcatcatgaatcgttgaagtgtcagaaagctattactgagctctttgtaacatataatatacgtttctctggaatatcaaggagcttctttaaaactcctgaaaatcaagctgacaagccaggatttctcagtctaatttctcaaattaatgctttgggctttgagactaatggactacattggaggtacaatttgatggccaacagagtattactattactaattttggcatccagaagcgaatctggcatatattcacaaatgcttgcaaaaattgctggtcatttcttaagaaatttaaagagtcaactgccccactcaagaatgcttgctatatctgctttgaacacattattgcaaggatcacctcataagacatctgcacaaaattctaagcaaccaatagatcaccctgaagattgcaatatttcatcaacagaagagattttgaatgagataatccgggaggaaggattcatgaatgagacactgaacagtttatctcatgttcatattatttccgacaatgatggttcgtcaaaagcgagttatggggcatcatcttttcaaagcggatctgacaaagcaataacttacttctattttgatttctctgcctcatggccacgtactcctagttggatttctttactgcgtggtcacacattctattccagttttgctaggatattcaaaaggcttatacagcaatgtggaatgccagtaatctcttctcttcagagtacactagaagagtttttaatttcaaaagagagaccaaggcaatgtgtcgctgctgaagcgatggctgggatgctgcactctgatatcattgggaatctggaatgtgagaacaactggttgatggcccagttgcataagattatgttagcaccatctgtggagtcagctcctgaatgggcagcttgtattcgatatgctgttacaggaaaagaaagagctggaactcgtgctcctgttctcaggcaaaaagtattagaatgcttatgtactcctcttcctcattccatggcaactagcgtacttgcgaagagatattcttttctgtccgttgctctaatagaaatttctccacccaaaatgtccccagcagagaagcaataccatgttaaaattcttgatgaactacttgacagcatgaaccattcatctgctcaggtaagagaagcaattggtattgccatgtgtgttacaacctcaaatatgagactttctgggttatttggcactggatgttcaccgcaaggccttcatggggatgtaagcatgattgaacaaacaggaaataaatattggtctgaacgtttgacagatggagctaatgaattagccgtaagtatacaaaatagtactcaatctaagcaactagaatcaacatcagattcggctgaagatagcatggatgatagagagcaggctgatgctaaaaggatggaaacgatatttcattttatgatcgcatctttgaagtctgggcgatcttctgttctactggacactattattaggcttgtgtacccaattctctcactacaggaaacatcaaataaagatttatcattgcttgctaagtcagctttcgagttgctgaaatggaggattctacatcggccttttcttgaaactgctattacgtctattcttcctttagtcagtgatcctaactggcgtaccagatctgcactgttatcgtatctcaggacctttacctacagtgctggagtttacaaaccataagacagtagcaatagagctacatgaagaaagc

SEQ ID NO: 62283 - DNA, 858 bp, Zea Mays
atcagttcagtggcagcttcttgaagcttaacggaatataccagtttagcattttcttcattatggcgtgaccgtgtaaaacgcagaagggctgaagcaaaaaaggagtcaaaagatgacattgttgttgcatctttaagtagttccaaacagcataaaggatctcctgatctagcagagctttccaagggtcttcctactggttggcaggcatacttggatgagtctactaagcaggtctattatgggaacagtctcacgtctgagacgtcctgggagcggccaacaaatgaatgaagatctataaccttggtgtgcggtcaaccgaacgatacaagttgatttgttaatgtagttgatgctgttgaatgggcagcccaattttgtttggcagccaaccccatcctttagagaagaacaaaccacacctcaccaggagatggctgattgtttcattgtcttggtcacaaggcacaaaatttttgatgggataggttttgcttggctaacctatctgcagtacaacatctcttattaatcactaactagatgaaggcacatttcggtcataggcctcaagaatgacgatccatgcaacaaaacctcacgccgatttggctgaatacttgccaatgggtgaaaacatctaggtatgcttatccagctacccctgctgcagggagacaatggaaaggagctcccagacttcaaaaaatccctgtaatatttcctatgatactgacccatcattccatcaatatcatgcacctaggactagtcaaacaaggcatcattcaccagtcgcttgttaaccaagcgtcttgggatcaatactgaatatcaaagggtcaaatcttt

SEQ ID NO: 62284 - DNA, 1696 bp, Zea Mays
  misc_feature (1)..(1): n is a, c, g, or t
ngaattcagtataaaatacgaagggtttaacattgttatggatggctgggggcactacagcaatcgtggcgctacagtactgccggtactgtttttgtgatgctgcaccctgcgctacagtacccccgggtgctgttcatggttagggctgcaagcgaggggagggagaagggggtggtggctgcgttgtcgccggcggaggcgaggaggatgtgcatggcgcagggcgtcgtggctgatctagagagagaacttgcggctaggactaggaggcgctgggaaggccgaccgcagggctttgccgacagctggcaagagagaagggatttccttctaatctcttgcttaccttcaattgatacaatctcttcttatatagagagggttacttgaccccttaacactagatctaatcttatctctaattctaatcttatcccaaactagtctatctttatctaaacaacctgagggcgtgctacagtgccacttggcccctgacaaacatcatggtatgttttgcaagatcccctatgtatcatgtcaagaagaaatagtggcctccgtcttttaaccttctgtttcctggttatttggtaaccatttgctagttagttttatcagtctgctttcgttataaggtttaaactaaggttagtagtgatgtgtaaataattgttgccctagcaacgtcactttgtggaatcagtctgttttgctttccttttaacagtggaaagctgcaaaagaggagcttcgtgatgaagaggaagatgagcctgaaactgctctagaggcattagaaaggaagcgacaaaaggaaatagaggagtggcggaaacaacagatagcttttggacatgctcaggaaaatgccaattttgttcctgttcgtggtgattggcgtgaccgtgtaaaacgcagaagggctgaagcaaaaaaggagtcaaaagatgacattgttgttgcatctttaagtagttccaaacagcataaaggatctcctgatctagcagagctttccaagggtcttcctactggttggcaggcatacttggatgagtctactaagcaggtctattatgggaacagtctcacgtctgagacgtcctgggagcggccaacaaatgaatgaagatctataaccttggtgtgcggtcaaccgaacgatacaagttgatttgttaatgtagttgatgctgttgaatgggcagcccaattttgtttggcagccaaccccatcctttagagaagaacaaaccacacctcaccaggagatggctgattgtttcattgtcttggtcacaaggcacaaaatttttgatgggataggttttgcttggctaacctatctgcagtacaacatctcttattaatcactaactagatgaaggcacatttcggtcataggcctcaagaatgacgatccatgcaacaaaacctcacgccgatttggctgaatacttgccaatgggtgaaaacatctaggtatgcttatccagctacccctgctgcagggagacaatggaaaggagctcccagacttcaaaaaatccctgtaatatttcctatgatactgacccatcattccatcaatatcatgcacctaggactagtcaaacaaggcatcattcaccagtcgcttgttaaccaagcgtcttgggatcaatactgaatatcaaagggtcaaatcttt

SEQ ID NO: 62285 - DNA, 1791 bp, Zea Mays
  misc_feature (1)..(1): n is a, c, g, or t
ngaattcagtataaaatacgaagggtttaacattgttatggatggctgggggcactacagcaatcgtggcgctacagtactgccggtactgtttttgtgatgctgcaccctgcgctacagtacccccgggtgctgttcatggttagggctgcaagcgaggggagggagaagggggtggtggctgcgttgtcgccggcggaggcgaggaggatgtgcatggcgcagggcgtcgtggctgatctagagagagaacttgcggctaggactaggaggcgctgggaaggccgaccgcagggctttgccgacagctggcaagagagaagggatttccttctaatctcttgcttaccttcaattgatacaatctcttcttatatagagagggttacttgaccccttaacactagatctaatcttatctctaattctaatcttatcccaaactagtctatctttatctaaacaacctgagggcgtgctacagtgccacttggcccctgacaaacatcatggtatgttttgcaagatcccctatgtatcatgtcaagaagaaatagtggcctccgtcttttaaccttctgtttcctggttatttggtaaccatttgctagttagttttatcagtctgctttcgttataaggtttaaactaaggttagtagtgatgtgtaaataattgttgccctagcaacgtcactttgtggaatcagtctgttttgctttccttttaacagtggaaagctgcaaaagaggagcttcgtgatgaagaggaagatgagcctgaaactgctctagaggcattagaaaggaagcgacaaaaggaaatagaggagtggcggaaacaacagatagcttttggacatgctcaggaaaatgccaattttgttcctgttcgtggtgattggcgtgaccgtgtaaaacgcagaagggctgaagcaaaaaaggagtcaaaagatgacattgttgttgcatctttaagtagttccaaacagcataaaggatctcctgatctagcagagctttccaagggtcttcctactggttggcagcttccaagaatttgatatctattgcaagtttgtaactgatacaaagaagtgaacaatcgtgaaacactggtcatgagtgcaccctctgttcctgtgcatacttggatgagtctactaagcaggtctattatgggaacagtctcacgtctgagacgtcctgggagcggccaacaaatgaatgaagatctataaccttggtgtgcggtcaaccgaacgatacaagttgatttgttaatgtagttgatgctgttgaatgggcagcccaattttgtttggcagccaaccccatcctttagagaagaacaaaccacacctcaccaggagatggctgattgtttcattgtcttggtcacaaggcacaaaatttttgatgggataggttttgcttggctaacctatctgcagtacaacatctcttattaatcactaactagatgaaggcacatttcggtcataggcctcaagaatgacgatccatgcaacaaaacctcacgccgatttggctgaatacttgccaatgggtgaaaacatctaggtatgcttatccagctacccctgctgcagggagacaatggaaaggagctcccagacttcaaaaaatccctgtaatatttcctatgatactgacccatcattccatcaatatcatgcacctaggactagtcaaacaaggcatcattcaccagtcgcttgttaaccaagcgtcttgggatcaatactgaatatcaaagggtcaaatcttt

SEQ ID NO: 62286 - DNA, 1836 bp, Zea Mays
  misc_feature (1)..(1): n is a, c, g, or t
ngaattcagtataaaatacgaagggtttaacattgttatggatggctgggggcactacagcaatcgtggcgctacagtactgccggtactgtttttgtgatgctgcaccctgcgctacagtacccccgggtgctgttcatggttagggctgcaagcgaggggagggagaagggggtggtggctgcgttgtcgccggcggaggcgaggaggatgtgcatggcgcagggcgtcgtggctgatctagagagagaacttgcggctaggactaggaggcgctgggaaggccgaccgcagggctttgccgacagctggcaagagagaagggatttccttctaatctcttgcttaccttcaattgatacaatctcttcttatatagagagggttacttgaccccttaacactagatctaatcttatctctaattctaatcttatcccaaactagtctatctttatctaaacaacctgagggcgtgctacagtgccacttggcccctgacaaacatcatggtatgttttgcaagatcccctatgtatcatgtcaagaagaaatagtggcctccgtcttttaaccttctgtttcctggttatttggtaaccatttgctagttagttttatcagtctgctttcgttataaggtttaaactaaggttagtagtgatgtgtaaataattgttgccctagcaacgtcactttgtggaatcagtctgttttgctttccttttaacagtggaaagctgcaaaagaggagcttcgtgatgaagaggaagatgagcctgaaactgctctagaggcattagaaaggaagcgacaaaaggaaatagaggagtggcggaaacaacagatagcttttggacatgctcaggaaaatgccaattttgttcctgttcgtggtgattggcgtgaccgtgtaaaacgcagaagggctgaagcaaaaaaggagtcaaaagatgacattgttgttgcatctttaagtagttccaaacagcataaaggatctcctgatctagcagagctttccaagggtcttcctactggttggcaggtaagtattctcgattgtatcatatcagatgctaacatagtgtgctgtgtttaaggtagcttccgctgcagcttccaagaatttgatatctattgcaagtttgtaactgatacaaagaagtgaacaatcgtgaaacactggcatacttggatgagtctactaagcaggtctattatgggaacagtctcacgtctgagacgtcctgggagcggccaacaaatgaatgaagatctataaccttggtgtgcggtcaaccgaacgatacaagttgatttgttaatgtagttgatgctgttgaatgggcagcccaattttgtttggcagccaaccccatcctttagagaagaacaaaccacacctcaccaggagatggctgattgtttcattgtcttggtcacaaggcacaaaatttttgatgggataggttttgcttggctaacctatctgcagtacaacatctcttattaatcactaactagatgaaggcacatttcggtcataggcctcaagaatgacgatccatgcaacaaaacctcacgccgatttggctgaatacttgccaatgggtgaaaacatctaggtatgcttatccagctacccctgctgcagggagacaatggaaaggagctcccagacttcaaaaaatccctgtaatatttcctatgatactgacccatcattccatcaatatcatgcacctaggactagtcaaacaaggcatcattcaccagtcgcttgttaaccaagcgtcttgggatcaatactgaatatcaaagggtcaaatcttt

SEQ ID NO: 62287 - DNA, 1689 bp, Zea Mays
  misc_feature (1)..(1): n is a, c, g, or t
ngaattcagtataaaatacgaagggtttaacattgttatggatggctgggggcactacagcaatcgtggcgctacagtactgccggtactgtttttgtgatgctgcaccctgcgctacagtacccccgggtgctgttcatggttagggctgcaagcgaggggagggagaagggggtggtggctgcgttgtcgccggcggaggcgaggaggatgtgcatggcgcagggcgtcgtggctgatctagagagagaacttgcggctaggactaggaggcgctgggaaggccgaccgcagggctttgccgacagctggcaagagagaagggatttccttctaatctcttgcttaccttcaattgatacaatctcttcttatatagagagggttacttgaccccttaacactagatctaatcttatctctaattctaatcttatcccaaactagtctatctttatctaaacaacctgagggcgtgctacagtgccacttggcccctgacaaacatcatggtatgttttgcaagatcccctatgtatcatgtcaagaagaaatagtggcctccgtcttttaaccttctgtttcctggttatttggtaaccatttgctagttagttttatcagtctgctttcgttataaggtttaaactaaggttagtagtgatgtgtaaataattgttgccctagcaacgtcactttgtggaatcagtctgttttgctttccttttaacagtggaaagctgcaaaagaggagcttcgtgatgaagaggaagatgagcctgaaactgctctagaggcattagaaaggaagcgacaaaaggaaatagaggagtggcggaaacaacagatagcttttggacatgctcaggaaaatgccaattttgttcctgttcgtggcgtgaccgtgtaaaacgcagaagggctgaagcaaaaaaggagtcaaaagatgacattgttgttgcatctttaagtagttccaaacagcataaaggatctcctgatctagcagagctttccaagggtcttcctactggttggcaggcatacttggatgagtctactaagcaggtctattatgggaacagtctcacgtctgagacgtcctgggagcggccaacaaatgaatgaagatctataaccttggtgtgcggtcaaccgaacgatacaagttgatttgttaatgtagttgatgctgttgaatgggcagcccaattttgtttggcagccaaccccatcctttagagaagaacaaaccacacctcaccaggagatggctgattgtttcattgtcttggtcacaaggcacaaaatttttgatgggataggttttgcttggctaacctatctgcagtacaacatctcttattaatcactaactagatgaaggcacatttcggtcataggcctcaagaatgacgatccatgcaacaaaacctcacgccgatttggctgaatacttgccaatgggtgaaaacatctaggtatgcttatccagctacccctgctgcagggagacaatggaaaggagctcccagacttcaaaaaatccctgtaatatttcctatgatactgacccatcattccatcaatatcatgcacctaggactagtcaaacaaggcatcattcaccagtcgcttgttaaccaagcgtcttgggatcaatactgaatatcaaagggtcaaatcttt

SEQ ID NO: 62288 - DNA, 2240 bp, Zea Mays
gtttagtgttagtaggatcattatctgtgtgtttagtatcagtagggtcatttgccgtgtttgattgtatttgttctgctgatttggggatgagttagttaggcataggttgctctggtcagtgatggccggtgacattacatgcggatccttgctgcaaaaattgcagtttatatgggatgaagttggagagagtgaggaggaccgtgacaaggtcctttatcagctggatcaggaatgccttgatgtctacaagaggaaagttgaccaagcaactaactctagggatctcctgatccaggcgctggatgactcaaagatagaacttgctaggcttctttctgctctcggagaaaaagctattgcaagaactcctgagaagacaacagggacaatcaagcagcagctagctgctatagcgccaacacttgagcagttgactaaacagaaaaatgaaagaaaaagagagtttgttaatgtacaatcacaaattgatcaaatatgtggtgaaatcgctggcaccatagaggtgggtgagcaaatgacaacaccccaagtcaatgaggatgacttaacacttgagaggcttgaagattttcggtctcagctcaaggatcttgaaaaagagaagagtaataggttggagaaggttcttgattatgtaggcatagtacatgatctttgtaccgtcttggggatggattttctcagcacagtgattgaagttcatcccagtttagatgactccatcggtgacaactgtaagagcattagtaatgatacattgtcaaaacttgacaatacggtagctacacttaatgaagataagaagttgcggctaagcaagcttcaagaactcgctggtcagctctatgatctttgggatctcatggatgcccccaaggaagaaaggcgcatgtttgatcatgtcacctgcaacagatcagcatctgtggatgaagtcacagcacctggatctcttgctctagatttgattgaacaagctgaggttgaggttcaaaggttagaccagctgaaatacagcaagatgaaagaaattgctttcaagaagcaaaccgagctggaagatatctacgctggtgctcatatagtaatagacacagctgctgctcatgagaaaatattggcgctgattgaggcaggtaacattgaaccgtcagaactaattgcggatatggatacccagatagcaaaagcaaaggaagaagcattgagtagaaaagacatccttgataaagtagaaagatggatgtctgcgtgtgaagaagagagctggcttgaagattataaccgggatgacaacaggtataactctagccgaggtgcccacctgaatctgaagcgtgcagaaaaagctcgtattcttgttaacaagattccagcacttgttgaaaccctggtgtcgaagaccacagcatgggaggagaaccgtggtctgtcctttatgtatgatggtgtacctcttctagctatgttggatgagtatgctatgctcagacaagaaagggaagaagaaaagaaaagaatgcgggaacaaaagcgctacattgagcagcaactgaacaccgatcatgaagggccatttggatcgcgggtgagtccaaaccggcctgccagttcgaagaaggctgttggcgtaaaggtgaacggcagcgtctcaaacggcactcctccaaacagaaggctctcaatcagtggccaacagaacggtggtggccatggcgtcaggtctggagggaaggatagcaagaaagacacggcgaagacagcatctccagggaacaatgcagttgcagctgctcctgtggacgcggtctcccaaatttctgtcaccgatccggttccgagcacaccatgatctttaacctagcatcgtatattagatataagcgactctttttctgatgttctgttgttttgtggtaatatcttataatgccttcgtagagtaattatgatgcctgcccatccttcagctgctttggcttcatggtgtaattcttgttttagttccgctcggccgtgctgtttcgacctgtcagacggtgtagtgtagtcttactgagatgtattgcattaatcagtgtgctggacatatagctgttgaaacgttttttgtgtgcacccgtgtgagagtagcgtacttttaacattatctggaaactggactccgcatatcattctgtaggtacgcttaattgattgcttccacaatgctg

SEQ ID NO: 62289 - DNA, 2397 bp, Zea Mays
atggctcccgcggacaagcgggtcttcctgctcacgcaacaacgacgacgacaaagcttgggaggccgtcgtccggtccggtggatcggacgcaacagcagtagtgcagcactgctactgcctccactccagtcccaggctcccatctcagagctctcagcggtggcggccggcgaccggcgagctcctccggcatcggatcccctggagtggagcgttgaaccacgctgcgggcctgcattcaccacctccgtgctttccttcgtcttctccgcctcatctggttgctctggtcagtgatggccggtgacattacatgcggatccttgctgcaaaaattgcagtttatatgggatgaagttggagagagtgaggaggaccgtgacaaggtcctttatcagctggatcaggaatgccttgatgtctacaagaggaaagttgaccaagcaactaactctagggatctcctgatccaggcgctggatgactcaaagatagaacttgctaggcttctttctgctctcggagaaaaagctattgcaagaactcctgagaagacaacagggacaatcaagcagcagctagctgctatagcgccaacacttgagcagttgactaaacagaaaaatgaaagaaaaagagagtttgttaatgtacaatcacaaattgatcaaatatgtggtgaaatcgctggcaccatagaggtgggtgagcaaatgacaacaccccaagtcaatgaggatgacttaacacttgagaggcttgaagattttcggtctcagctcaaggatcttgaaaaagagaaggttcttgattatgtaggcatagtacatgatctttgtaccgtcttggggatggattttctcagcacagtgattgaagttcatcccagtttagatgactccatcggtgacaactgtaagagcattagtaatgatacattgtcaaaacttgacaatacggtagctacacttaatgaagataagaagttgcggctaagcaagcttcaagaactcgctggtcagctctatgatctttgggatctcatggatgcccccaaggaagaaaggcgcatgtttgatcatgtcacctgcaacagatcagcatctgtggatgaagtcacagcacctggatctcttgctctagatttgattgaacaagctgaggttgaggttcaaaggttagaccagctgaaatacagcaagatgaaagaaattgctttcaagaagcaaaccgagctggaagatatctacgctggtgctcatatagtaatagacacagctgctgctcatgagaaaatattggcgctgattgaggcaggtaacattgaaccgtcagaactaattgcggatatggatacccagatagcaaaagcaaaggaagaagcattgagtagaaaagacatccttgataaagtagaaagatggatgtctgcgtgtgaagaagagagctggcttgaagattataaccgggatgacaacaggtataactctagccgaggtgcccacctgaatctgaagcgtgcagaaaaagctcgtattcttgttaacaagattccagcacttgttgaaaccctggtgtcgaagaccacagcatgggaggagaaccgtggtctgtcctttatgtatgatggtgtacctcttctagctatgttggatgagtatgctatgctcagacaagaaagggaagaagaaaagaaaagaatgcgggaacaaaagcgctacattgagcagcaactgaacaccgatcatgaagggccatttggatcgcgggtgagtccaaaccggcctgccagttcgaagaaggctgttggcgtaaaggtgaacggcagcgtctcaaacggcactcctccaaacagaaggctctcaatcagtggccaacagaacggtggtggccatggcgtcaggtctggagggaaggatagcaagaaagacacggcgaagacagcatctccagggaacaatgcagttgcagctgctcctgtggacgcggtctcccaaatttctgtcaccgatccggttccgagcacaccatgatctttaacctagcatcgtatattagatataagcgactctttttctgatgttctgttgttttgtggtaatatcttataatgccttcgtagagtaattatgatgcctgcccatccttcagctgctttggcttcatggtgtaattcttgttttagttccgctcggccgtgctgtttcgacctgtcagacggtgtagtgtagtcttactgagatgtattgcattaatcagtgtgctggacatatagctgttgaaacgttttttgtgtgcacccgtgtgagagtagcgtacttttaacattatctggaaactggactccgcatatcattctgtaggtacgcttaattgattgcttccacaatgctg

SEQ ID NO: 62290 - DNA, 2666 bp, Zea Mays
  misc_feature (1)..(1): n is a, c, g, or t
  misc_feature (2666)..(2666): n is a, c, g, or t
ntccaaaccctaactctaggtccatcccatcgcagagaaaaccttcggtgcccggctgatggggaggaggaaggagcgacgcctagcggccatggccgcggcgggccgcagggtcaagctcgacctcttcctcgattcctcccccggggaggcatcacataataatggaataggaggtgaaaaccgtgaccaacagactgtggttcccacttctccatcttcttcaggtgggtttcatcaattttcttccaagggatatgtaaagaagacatgcctatggattatggaacataaatatggtggaaatttggatttgtgtacaagcatgtataccttcgcatatctggttccgagatacatgtaggattaccggcctgcaaggaacattgagtaaattcttcagactgagctaccactgtcaaaatttagtgaatgcctatgggtaacctcactcagttggcagcatctaagcgtggggatttcaggatgtgattgttccctcctcggttcataaaaaggagaatcctctagcattgcttgggcaatatagtgatgatgaagtggaagatgaggaagcagcagatcaacccactggtgaagctaaggggagtccaggagatgctagtgctcagttaactagtcagcgtgcggatatagctggtgataacagtgaggcaaaaattgaaccatcggcttctgtcggtgatcaacaagaagcagcacctcaagctggtgacgttaagaactacacccaaagtgttactgaagaaaacactatagctcctgagccaactgtacaagaagagagtgtgaaagcaactgaatctcttcccgattcatctggcatgcagattgttggtgatgtcggtggaaattggaaagcagtaatgcatgaacagagtaatcagtgttattactggaacacagttactggagaaacttcttgggatataccaaatggattagcttcaggagttgcaactgcatttgttccttctgatgtggactattcaaatgaagctcaaacccatgtccttccccacagcacactggaagcatatccaagtgatatgtctgttgggaacggcacaacttatcctaatttgggaatggcatgtggaagtgcacatgttactcaagatgcttatgcttatgctgctcctatcgccagtaatgagcctttggacattgatcccttgtatcttgcaaaatatggtgatggtttgctgcaaagattggacctgctggaaaggctctgtggctcgaacaaaggtcttgaattgataagaagagaaattgagatacggatgtcggacttaaatgcactttcatcttatggatcttctttgctcccattgtggttgcatgctgaggtgcacctgaagcaactagactcttctatttccaagctggaaatgaactatcatgcagattcagaacctaggaattcaaagacagaggttgctgaacacagggcacctgatgatgctgacttgataacaccctccaatggcgaggctttgaagtatgaagtttgtgctgggattactatcgatgcaaatatgaagattggtaagccagcttcaacgtctcagaattcacaaggtagggataatgcagctgttcctccaaaaattgaatctgacaatgatgaagatatggatgtggaaatggaagttgatgaagataatgtcgaagagcaggcacagtgcagttctgtacctgaaaaggagcatcctccttcagaacagttgagttcatctaatttgccatcatttgaagatcctacacctcctgaggataattctgttcctccacctccgccagaagaggaatggattccacctccaccacctgaacacgaacacgaaccagctcctccagcttccccagaagagccggctgcatcatatgttcaggtggatacaattcctcagccatatatagctcaagaaaatgttggctatacaatttcaggaatggagtattatagtactgaaggtacaaatgccaattactatatgcaagtgagtgagcctcatgtccttcaagcacaacattcttattatgcaccagtatctgggagtggcatatctgtttctgttgatggcacatctattgccccagaatcttattatacctatccttcagtcactgtggctgcaagcgctgtagcagctgaacattctggatactacgcttcatcagtctctgccatttatagcagtgcagcagatatcaaaacaagctcagcttctcttgtttctgcaattagcaattcggatctaaaaaatcatgataatgttatatccaatgatgcaagtattgtgcctttcacccaagctgtagtagcaacatcagctgcaggaacgacatctgttcctgaaagttctacacagccttctagcagtactacaaaccagatcaaagttattcgcaacaagaagcgggttgttggtattacatcgtctctgaggtctaataagaaggtttcaagtttggtagataaggttgctctctacaacgaatctctgtattctgttattattgcatattaggtgcctgaaatttacatttttagcatgttcctgtatattcatggaattaacaaatcctagtttcttactctcgatttgagacgttctctcaactctcaaccatctaan

SEQ ID NO: 62291 - DNA, 2663 bp, Zea Mays
  misc_feature (1)..(2): n is a, c, g, or t
  misc_feature (2663)..(2663): n is a, c, g, or t
nntccaaaccctaactctaggtccatcccatcgcagagaaaaccttcggtgcccggctgatggggaggaggaaggagcgacgcctagcggccatggccgcggcgggccgcagggtcaagctcgacctcttcctcgattcctcccccggggaggcatcacataataatggaataggaggtgaaaaccgtgaccaacagactgtggttcccacttctccatcttcttcaggtgggtttcatcaattttcttccaagggatatgtaaagaagacatgcctatggattatggaacataaatatggtggaaatttggatttgtgtacaagcatgtataccttcgcatatctggttccgagatacatgtaggattaccggcctgcaaggaacattgagtaaattcttcagactgagctaccactgtcaaaatttagtgaatgcctatgggtaacctcactcagttggcagcatctaagcgtggggatttcaggatgtgattgttccctcctcgataaaaaggagaatcctctagcattgcttgggcaatatagtgatgatgaagtggaagatgaggaagcagcagatcaacccactggtgaagctaaggggagtccaggagatgctagtgctcagttaactagtcagcgtgcggatatagctggtgataacagtgaggcaaaaattgaaccatcggcttctgtcggtgatcaacaagaagcagcacctcaagctggtgacgttaagaactacacccaaagtgttactgaagaaaacactatagctcctgagccaactgtacaagaagagagtgtgaaagcaactgaatctcttcccgattcatctggcatgcagattgttggtgatgtcggtggaaattggaaagcagtaatgcatgaacagagtaatcagtgttattactggaacacagttactggagaaacttcttgggatataccaaatggattagcttcaggagttgcaactgcatttgttccttctgatgtggactattcaaatgaagctcaaacccatgtccttccccacagcacactggaagcatatccaagtgatatgtctgttgggaacggcacaacttatcctaatttgggaatggcatgtggaagtgcacatgttactcaagatgcttatgcttatgctgctcctatcgccagtaatgagcctttggacattgatcccttgtatcttgcaaaatatggtgatggtttgctgcaaagattggacctgctggaaaggctctgtggctcgaacaaaggtcttgaattgataagaagagaaattgagatacggatgtcggacttaaatgcactttcatcttatggatcttctttgctcccattgtggttgcatgctgaggtgcacctgaagcaactagactcttctatttccaagctggaaatgaactatcatgcagattcagaacctaggaattcaaagacagaggttgctgaacacagggcacctgatgatgctgacttgataacaccctccaatggcgaggctttgaagtatgaagtttgtgctgggattactatcgatgcaaatatgaagattggtaagccagcttcaacgtctcagaattcacaaggtagggataatgcagctgttcctccaaaaattgaatctgacaatgatgaagatatggatgtggaaatggaagttgatgaagataatgtcgaagagcaggcacagtgcagttctgtacctgaaaaggagcatcctccttcagaacagttgagttcatctaatttgccatcatttgaagatcctacacctcctgaggataattctgttcctccacctccgccagaagaggaatggattccacctccaccacctgaacacgaacacgaaccagctcctccagcttccccagaagagccggctgcatcatatgttcaggtggatacaattcctcagccatatatagctcaagaaaatgttggctatacaatttcaggaatggagtattatagtactgaaggtacaaatgccaattactatatgcaagtgagtgagcctcatgtccttcaagcacaacattcttattatgcaccagtatctgggagtggcatatctgtttctgttgatggcacatctattgccccagaatcttattatacctatccttcagtcactgtggctgcaagcgctgtagcagctgaacattctggatactacgcttcatcagtctctgccatttatagcagtgcagcagatatcaaaacaagctcagcttctcttgtttctgcaattagcaattcggatctaaaaaatcatgataatgttatatccaatgatgcaagtattgtgcctttcacccaagctgtagtagcaacatcagctgcaggaacgacatctgttcctgaaagttctacacagccttctagcagtactacaaaccagatcaaagttattcgcaacaagaagcgggttgttggtattacatcgtctctgaggtctaataagaaggtttcaagtttggtagataaggttgctctctacaacgaatctctgtattctgttattattgcatattaggtgcctgaaatttacatttttagcatgttcctgtatattcatggaattaacaaatcctagtttcttactctcgatttgagacgttctctcaactctcaaccatctaan

SEQ ID NO: 62292 - DNA, 2586 bp, Zea Mays
  misc_feature (1)..(2): n is a, c, g, or t
  misc_feature (2586)..(2586): n is a, c, g, or t
nntccaaaccctaactctaggtccatcccatcgcagagaaaaccttcggtgcccggctgatggggaggaggaaggagcgacgcctagcggccatggccgcggcgggccgcagggtcaagctcgacctcttcctcgattcctcccccggggaggcatcacataataatggaataggaggtgaaaaccgtgaccaacagactgtggttcccacttctccatcttcttcagcatgtataccttcgcatatctggttccgagatacatgtaggattaccggcctgcaaggaacattgagtaaattcttcagactgagctaccactgtcaaaatttagtgaatgcctatgggtaacctcactcagttggcagcatctaagcgtggggatttcaggatgtgattgttccctcctcggttcgtatgtctctttctttataaaaaggagaatcctctagcattgcttgggcaatatagtgatgatgaagtggaagatgaggaagcagcagatcaacccactggtgaagctaaggggagtccaggagatgctagtgctcagttaactagtcagcgtgcggatatagctggtgataacagtgaggcaaaaattgaaccatcggcttctgtcggtgatcaacaagaagcagcacctcaagctggtgacgttaagaactacacccaaagtgttactgaagaaaacactatagctcctgagccaactgtacaagaagagagtgtgaaagcaactgaatctcttcccgattcatctggcatgcagattgttggtgatgtcggtggaaattggaaagcagtaatgcatgaacagagtaatcagtgttattactggaacacagttactggagaaacttcttgggatataccaaatggattagcttcaggagttgcaactgcatttgttccttctgatgtggactattcaaatgaagctcaaacccatgtccttccccacagcacactggaagcatatccaagtgatatgtctgttgggaacggcacaacttatcctaatttgggaatggcatgtggaagtgcacatgttactcaagatgcttatgcttatgctgctcctatcgccagtaatgagcctttggacattgatcccttgtatcttgcaaaatatggtgatggtttgctgcaaagattggacctgctggaaaggctctgtggctcgaacaaaggtcttgaattgataagaagagaaattgagatacggatgtcggacttaaatgcactttcatcttatggatcttctttgctcccattgtggttgcatgctgaggtgcacctgaagcaactagactcttctatttccaagctggaaatgaactatcatgcagattcagaacctaggaattcaaagacagaggttgctgaacacagggcacctgatgatgctgacttgataacaccctccaatggcgaggctttgaagtatgaagtttgtgctgggattactatcgatgcaaatatgaagattggtaagccagcttcaacgtctcagaattcacaaggtagggataatgcagctgttcctccaaaaattgaatctgacaatgatgaagatatggatgtggaaatggaagttgatgaagataatgtcgaagagcaggcacagtgcagttctgtacctgaaaaggagcatcctccttcagaacagttgagttcatctaatttgccatcatttgaagatcctacacctcctgaggataattctgttcctccacctccgccagaagaggaatggattccacctccaccacctgaacacgaacacgaaccagctcctccagcttccccagaagagccggctgcatcatatgttcaggtggatacaattcctcagccatatatagctcaagaaaatgttggctatacaatttcaggaatggagtattatagtactgaaggtacaaatgccaattactatatgcaagtgagtgagcctcatgtccttcaagcacaacattcttattatgcaccagtatctgggagtggcatatctgtttctgttgatggcacatctattgccccagaatcttattatacctatccttcagtcactgtggctgcaagcgctgtagcagctgaacattctggatactacgcttcatcagtctctgccatttatagcagtgcagcagatatcaaaacaagctcagcttctcttgtttctgcaattagcaattcggatctaaaaaatcatgataatgttatatccaatgatgcaagtattgtgcctttcacccaagctgtagtagcaacatcagctgcaggaacgacatctgttcctgaaagttctacacagccttctagcagtactacaaaccagatcaaagttattcgcaacaagaagcgggttgttggtattacatcgtctctgaggtctaataagaaggtttcaagtttggtagataaggttgctctctacaacgaatctctgtattctgttattattgcatattaggtgcctgaaatttacatttttagcatgttcctgtatattcatggaattaacaaatcctagtttcttactctcgatttgagacgttctctcaactctcaaccatctaan

SEQ ID NO: 62293 - DNA, 1955 bp, Zea Mays
cttctccgctctcctgtgttcttttccgacgaagcagcagctgcaacgactccttaccaatcaaaccaatcccccgtcatcttcaagctccggggatctcagccgccaaatccgggccgtgctcgcgcttgggcatctgcggcctacgatggggagcgagtcggagcccgccaagggcctgttgccctacctgcagcgcgccgatgagctgcagaagcacgaacccctcgtggcgtactactgtgggagacgcttctctctcctcgtcgggccggctctacgcgatggagaaggggctgaggataccccagaaggagcgcaccaagaccacgaactccatcctcatctccctcatgaaccagctcgagaaggacaagaaatcgttgactttggggcccgacgacaatcttcatttggagggatttgcattaaacgtctttgttaaagcagataaacaggaccgtgctggacgagctgacataaacactgctaaaactttctatgctgcaagtatattcttcgagattcttaaccagtttggcgagcttcaacctgatattgagcaaaaacagaaatatgccatctggaaagctgctgaaataagaaaagctctcaaagaaggccggaagcctgaagctggaccgcctggtggggataaagatgaagcacctgatatggggcaaagtccttccttcagcagtgtacaccagggcagtgaagcatcacctcgacctgtcaacatggattttagtaggcgggatagcttttctgctgtgcagccaggaaataacgtccctcaccaaagtacagagttcaatgatcatccctctacccagttaccctattcaccgccaccaccctcacagtcccagcatccttctccatcacaatcttattcctctccctcgtatcaggcaacaacagattacccttcttctgattttcacaaaccatcccccaattattcaactcccggctacacaagcacagatttccctaccaatgaggtccacaaaccaccttccaattattccccacctccttacacaaggacagatcgcccttccaatgacggctacaatcctcacagcaatggtaaaccagatgtttcggcttaccctcaggcatatcaaccctcaccctacacatttgaccctcagcacaactctcaaaactactactccacggaagccccagctgttccatacaactaccctaatttccagtcatatcctagtttccaggacaacacgtcagcttctgttctgacgcatcagtcttcattctatcctgaaagtgatgatcccgcagctacatcacacactcctgcctcaaattcttctgtcccaacgcactaccacccaaccgctgactgttcacctcaagtcactcctccagctgcgccaccagctagccagtatagatatgatagcagttaccagcctgaagttgagaagattgctgaggcccacaaggcagccagatttgcggttggtgctcttgcgttcgatgacgtatctgttgctgtggatcacctgaaacgtgcactggatcttctgacgaacccatctgctgaaccccattagctctttgcaccaccgagctcttgtcagaagcatcatctgtacaaatacaagattggtataccaccatggatatattgccaggtcgcgtacatatgagaggggttaccacacaaatctaggagataataagcgagccgtgtgggcttttgaagtcacacttaaggaaaccttattgtgcaaaattcaattatcttattcagagttctgttctacgtaatccattgtattcatttgaatattcttgaggtctggtatggtattttgggtatggacggatgatgcagtgcctgctttgtttgtctcttccatgatttgtcatgctgctgtcaccctcgtgaagatgatttgcacgtgattataacatgtgaa

SEQ ID NO: 62294 - DNA, 1916 bp, Zea Mays
cttctccgctctcctgtgttcttttccgacgaagcagcagctgcaacgactccttaccaatcaaaccaatcccccgtcatcttcaagctccggggatctcagccgccaaatccgggccgtgctcgcgcttgggcatctgcggcctacgatggggagcgagtcggagcccgccaagggcctgttgccctacctgcagcgcgccgatgagctgcagaagcacgaacccctcgtggcgtactactgccggctctacgcgatggagaaggggctgaggataccccagaaggagcgcaccaagaccacgaactccatcctcatctccctcatgaaccagctcgagaaggacaagaaatcgttgactttggggcccgacgacaatcttcatttggagggatttgcattaaacgtctttgttaaagcagataaacaggaccgtgctggacgagctgacataaacactgctaaaactttctatgctgcaagtatattcttcgagattcttaaccagtttggcgagcttcaacctgatattgagcaaaaacagaaatatgccatctggaaagctgctgaaataagaaaagctctcaaagaaggccggaagcctgaagctggaccgcctggtggggataaagatgaagcacctgatatggggcaaagtccttccttcagcagtgtacaccagggcagtgaagcatcacctcgacctgtcaacatggcgggatagcttttctgctgtgcagccaggaaataacgtccctcaccaaagtacagagttcaatgatcatccctctacccagttaccctattcaccgccaccaccctcacagtcccagcatccttctccatcacaatcttattcctctccctcgtatcaggcaacaacagattacccttcttctgattttcacaaaccatcccccaattattcaactcccggctacacaagcacagatttccctaccaatgaggtccacaaaccaccttccaattattccccacctccttacacaaggacagatcgcccttccaatgacggctacaatcctcacagcaatggtaaaccagatgtttcggcttaccctcaggcatatcaaccctcaccctacacatttgaccctcagcacaactctcaaaactactactccacggaagccccagctgttccatacaactaccctaatttccagtcatatcctagtttccaggacaacacgtcagcttctgttctgacgcatcagtcttcattctatcctgaaagtgatgatcccgcagctacatcacacactcctgcctcaaattcttctgtcccaacgcactaccacccaaccgctgactgttcacctcaagtcactcctccagctgcgccaccagctagccagtatagatatgatagcagttaccagcctgaagttgagaagattgctgaggcccacaaggcagccagatttgcggttggtgctcttgcgttcgatgacgtatctgttgctgtggatcacctgaaacgtgcactggatcttctgacgaacccatctgctgaaccccattagctctttgcaccaccgagctcttgtcagaagcatcatctgtacaaatacaagattggtataccaccatggatatattgccaggtcgcgtacatatgagaggggttaccacacaaatctaggagataataagcgagccgtgtgggcttttgaagtcacacttaaggaaaccttattgtgcaaaattcaattatcttattcagagttctgttctacgtaatccattgtattcatttgaatattcttgaggtctggtatggtattttgggtatggacggatgatgcagtgcctgctttgtttgtctcttccatgatttgtcatgctgctgtcaccctcgtgaagatgatttgcacgtgattataacatgtgaa

SEQ ID NO: 62295 - DNA, 1943 bp, Zea Mays
aaacttctccgctctcctgtgttcttttccgacgaagcagcagctgcaacgactccttaccaatcaaaccaatcccccgtcatcttcaagctccggggatctcagccgccaaatccgggccgtgctcgcgcttgggcatctgcggcctacgatggggagcgagtcggagcccgccaagggcctgttgccctacctgcagcgcgccgatgagctgcagaagcacgaacccctcgtggcgtactactgccggctctacgcgatggagaaggggctgaggataccccagaaggagcgcaccaagaccacgaactccatcctcatctccctcatgaaccagctcgagaaggacaagaaatcgttgactttggggcccgacgacaatcttcatttggagggatttgcattaaacgtctttgttaaagcagataaacaggaccgtgctggacgagctgacataaacactgctaaaactttctatgctgcaagtatattcttcgagattcttaaccagtttggcgagcttcaacctgatattgagcaaaaacagaaatatgccatctggaaagctgctgaaataagaaaagctctcaaagaaggccggaagcctgaagctggaccgcctggtggggataaagatgaagcacctgtcagtaccaccaccatttctcaagatatggggcaaagtccttccttcagcagtgtacaccagggcagtgaagcatcacctcgacctgtcaacatggcgggatagcttttctgctgtgcagccaggaaataacgtccctcaccaaagtacagagttcaatgatcatccctctacccagttaccctattcaccgccaccaccctcacagtcccagcatccttctccatcacaatcttattcctctccctcgtatcaggcaacaacagattacccttcttctgattttcacaaaccatcccccaattattcaactcccggctacacaagcacagatttccctaccaatgaggtccacaaaccaccttccaattattccccacctccttacacaaggacagatcgcccttccaatgacggctacaatcctcacagcaatggtaaaccagatgtttcggcttaccctcaggcatatcaaccctcaccctacacatttgaccctcagcacaactctcaaaactactactccacggaagccccagctgttccatacaactaccctaatttccagtcatatcctagtttccaggacaacacgtcagcttctgttctgacgcatcagtcttcattctatcctgaaagtgatgatcccgcagctacatcacacactcctgcctcaaattcttctgtcccaacgcactaccacccaaccgctgactgttcacctcaagtcactcctccagctgcgccaccagctagccagtatagatatgatagcagttaccagcctgaagttgagaagattgctgaggcccacaaggcagccagatttgcggttggtgctcttgcgttcgatgacgtatctgttgctgtggatcacctgaaacgtgcactggatcttctgacgaacccatctgctgaaccccattagctctttgcaccaccgagctcttgtcagaagcatcatctgtacaaatacaagattggtataccaccatggatatattgccaggtcgcgtacatatgagaggggttaccacacaaatctaggagataataagcgagccgtgtgggcttttgaagtcacacttaaggaaaccttattgtgcaaaattcaattatcttattcagagttctgttctacgtaatccattgtattcatttgaatattcttgaggtctggtatggtattttgggtatggacggatgatgcagtgcctgctttgtttgtctcttccatgatttgtcatgctgctgtcaccctcgtgaagatgatttgcacgtgattataacatgtgaa

SEQ ID NO: 62296 - DNA, 1230 bp, Zea Mays
atagaagcttatttctcttatatgaaagccggttcagaacggcgttactgacgctatccatgtcggtagaaattctcctagctactcgattgtaaatcaatggctcaccttcgcctctcgagactttagtactgactctcctcactccctcgttaccttcgcctctcaagacttctggacgctttgactgcgaccgcctctcctcactcttgccatctcgtccctcctcctcctcgctccctccgcatcttccatcttcaagttgcttcgtcttccatcgtttcgtccttacgacatcatccgctttgagaaattcgtcgctttcttcatcggctccgcttcttcctcgagttgtcaaattagaaaaaggttcgctttcctttttccccaagttgtgtgcttgcggcggatctgccttcttccgcttcggctgtctccccaatttcccatcttattattcccttggcacccccacggccccacattccctttgggcagcacaccagctccacacatctgacctgttgggtttgtgttctattcggtgtttgccaagtcccattacccattttcacttatcccaaatcggccagaggataggttctgtgctttccttttattttctccaatttctccattcccccccttctatagtctccttagatcaggttctgcagataaaagcaccagaaaatgaacatccaagcaactcattgacaaacgaaactgaactttcttcgtttttaaccatgttgagaagtacccttgctccttaaggactacaccagcgaggtccctcatccacttgaaggacgtcgtcattggttcactaatgaaaacattgtgtatgcctaaaacctcaagatatgttggcaaccatcggagtacaggtttcaagaaaatgtgaattccatgaaaatacagacaccgggcccatattacacaatgacatggtttaagctgacaaagaggttgctaaatctattgcatttttagatgatgtcaataccatgaacaatttaattgatgcccgcacttggatatgacatgtgatgattttattgactgtacgtcaaactgaaattgcgaacaacttattgtaatacacaactactatattttgtatgatgtttacttttgtcttctgtgcaatgtctgctatgctcttacaataacatcagccaaccactttctgcatgtatatatatgtcaaaattttatgaacataat

SEQ ID NO: 62297 - DNA, 1195 bp, Zea Mays
cccacctccgcctccatgccacgtccctcttcgcagctcctcccactccctcacgcgcgtgccccgcgatgctgtggtcaactcacaggccgtagacctgtctgctcccgcgaacgatgaagtcgcgaggcgtgaccgcacaggcctgatgcctccaccacccgagtcctccacccatccaccgacggtggaatagggttttccaccgaccgacgaatcctggcgatgatgcgctcgccgacagtgtcttcgtatgagccattgggatgtgtgaataggtgcatgggggacttcaactgacgcgtatgggaagcaaggtcatgagatcagatcaactgttgcagacagagtacgtcaaaggcaacgtggaagcaacctattgatgtacacaaagatccttggttatggagctttagcgaggttagtgaagacgggttattccatatctagagatgaagctgcaaaagcattgtatgctatatcatctttgatcagaaataatgtaaatggtcaagaggcattcaattcagaaaatgggagtgcaatgttgcagctaaattttagaatcgctcaacttcctttgtttagtgatggcctttttctgaagtcaatagttgatatgttatcaagcttcgtttttaaccatgttgagaagtacccttgctccttaaggactacaccagcgaggtccctcatccacttgaaggacgtcgtcattggttcactaatgaaaacattgtgtatgcctaaaacctcaagatatgttggcaaccatcggagtacaggtttcaagaaaatgtgaattccatgaaaatacagacaccgggcccatattacacaatgacatggtttaagctgacaaagagggcaaagacttttttaccatccaatactcctgaaagttccgccaacacattagaaagccctgcaaaaaaggttgctaaatctattgcatttttagatgatgtcaataccatgaacaatttaattgatgcccgcacttggatatgacatgtgatgattttattgactgtacgtcaaactgaaattgcgaacaacttattgtaatacacaactactatattttgtatgatgtttacttttgtcttctgtgcaatgtctgctatgctcttacaataacatcagccaaccactttctgcatgtatatatatgtcaaaattttatgaacataat

SEQ ID NO: 62298 - DNA, 1502 bp, Zea Mays
gcctaaaatcgtatggcccaaccccaacaggcagtgcgcaatataagatcaggcagagtatcaagctacattcctctaccagaaaacatggatgaaaacgcttcacgtgcattaaaacgaagcagggttgaagccttgggcgtttctcaatcatgcattcattcatgatagagtgcatttagtttgttctcggttctgtactggaaaaactttcttcagagtacaaaaagtcaatgaaatgttaatccatcattccagttgtgaattttctgtaacaaataaggatcagaccgcattattgcctccttccccgacctttcttcgcttgctgttgctctgcctgttccttccctgaaacttcactgatatcaactgcacgcccacgtgtcatgagagcaaaaaagatgttgttgagcttctccatcttctttgcgtcttgagcttgatctgtcttgaacttcaagcactgcagacaataacttcagtcagaaaagaaggggtgccatttggatcaaacttcatagcatgagcattacactagaatattatactagctagcaatcgatgtgcccaaacaagtagttttgatgttctatatacttttttatcaacatagacttacaggggtgtttgtttgggattataatatgtctaaattatataatccaacaaattttaaactaacacttacttcaaaatttattggattatataatctggacagactataatctcaaacaaaccccctctacataagatgcttgcccctgtaacaaataaacaaagaaacaacaaacatagattttgatattccagcttttctagtaaaacaataagagatgcatatttactagtgctgcaaatataaaacagcataagacagaagctaaatgaaacaaacatgacagcattgaaggctgcacaggttatctcaattgacaacggcattgtaggccatgttttagctgcaatatttacttagagcatgtgaatggaagatataacaggaattacagggatagcatttccaaaaaaaaaggagctccagaaatttatttacaaaaagaaatattctaagtacaaaatgaacccacgtcttaatgaatgacaatggtatagccagtttagcgatgcaatgctatcaaatacatcatacgggaatttcctgcatttcctgctaaatgatatgaccacacgccaaagaacagatagcatcatgcttaatgatctttctgatcttattttcaagaacagacatccaaattcatttgtttataaagagacaaatgttagacatgtcatctgaataatgagtaatactctacacagctaaaggcagatagcaagcaaccactccaccttgcagcactactgcaacatgctgcattaaaagtggtttactaaacaagctatgtgactaaaacagtagaagggaagttccaaacacaataaactacacttgcatcataatgaaaggggcaacatcacgctagacatctgta

SEQ ID NO: 62299 - DNA, 1812 bp, Zea Mays
aacttctggcctttagacattttctcctccgtagattgcagaagtttttttttcgcttatcagtatttcggtcgagaaattcgcgaagggattaggggaattcgaggcagggatttgcaagaatcagggcagtttgatgttgcttcctgtgcgcgtcgctaatttctctgttttattcgcgtgatttttagggttttattttgagtttttcgttttctccaccgtatttcgttggcttcgttccgtgctactgtaaattcagaatcttgtcagagaaaagagaaggaaaaggaaaaacaaacaaaatagtaaggggaatttggtacctgggtgtttgctgttccttgagttggtgaatctttggagtgcctggctccgacgagatcgaaaggagggacctttccttggttcctctgctggagctgtgattgcagaggtgaaccatgtcagcgatggcggcggcgggtgaagcggagtatggtgaatgcgtgcagaaggggtccctgcagcagcaccaggcgcctcaacccagccccggcgctctattctacacccatgatggcgtcgccgtctacaggaatccggtcatgccggcgttctaccaacagcccgcgggcagcaatgtcgtcgtgccggcggctccagggccagctcattcccctgccagctctgagcccttcaagcgcaagcgcgggcgcccccgcaagtacgcccccgcagacggcgccgtgccgctggctatcgtgcccccatcgcagccacccactgctcgtgccccagctacctctgaggcctcacccacggttcctcctggcttctctccaagtccgcagagtggtggcgtggtgagtcggcaggcctcgccggcgccggcgccggcgtcaggtgctcccgatgtcaagaagcggggccggccgtcgggcccctccagcaagaagcagcagccgcaggcggcagcgcctggctggactggattgaagcctcatattttcacagttcaagctggagaggatgtagcatcaagagccatgtcattttctgggaatggatgggctgtttgtatcctgacagccaatggcactgtatctaatgtgaccctgcgtcaaggagagtcttctggtggaacagtaacttatgagggccgttttgagattctctctttggctgggtcatatcttctgtctgaaagtactggcatgagcagtcgaacgggtggacttagtgtttctcttgctagtcctgatgggcatgttttaggtggtgctgtcgcaggacctctaaccgcagcttcgccagttcaggtggtcattgggagctttctggctgatacaaaaatggagcttgaccctggatcagcacctgagaaacatgttttcagcaggtttcaaactaccagcagtccatctaggggtaccgaatcctcgggtgggcatgcaagcccaccaaacaccacaggctccttcagcaccagcacacagccaggcttcccaagctttcccacatggaaatgagtttacctgctatggtggagtgggaccgtggcctctggggatgaggagggaggaatttggaactgacagtcctcgagcgtcgtcgctgtagtttcatgagatgttatgagagtcaatcctatttaggtacttctaactggttacaatgaagttccggtttgctgcttgtcttgacattttgcatcattgaggcacttcaaactccaaagtggtggtaacatacagtatattagatgattccccctatcaaatgccttttgtcattctcctgctcttatattggttattactgctgtgtggg

SEQ ID NO: 62300 - DNA, 1642 bp, Zea Mays
aaattttgcgtatatccgggggcctcgcgaaaaaggatcgctctccttactctgtattaacttctggcctttagacattttctcctccgtagattgcagaagtttttttttcgcttatcagtatttcggtcgagaaattcgcgaagggattaggggaattcgaggcagggatttgcaagaatcagggcagtttgatgttgcttcctaatcttgtcagagaaaagagaaggaaaaggaaaaacaaacaaaatagtaaggggaatttggtacctgggtgtttgctgttccttgagttggtgaatctttggagtgcctggctccgacgagatcgaaaggagggacctttccttggttcctctgctggagctgtgattgcagaggtgaaccatgtcagcgatggcggcggcgggtgaagcggagtatggtgaatgcgtgcagaaggggtccctgcagcagcaccaggcgcctcaacccagccccggcgctctattctacacccatgatggcgtcgccgtctacaggaatccggtcatgccggcgttctaccaacagcccgcgggcagcaatgtcgtcgtgccggcggctccagggccagctcattcccctgccagctctgagcccttcaagcgcaagcgcgggcgcccccgcaatccgcagagtggtggcgtggtgagtcggcaggcctcgccggcgccggcgccggcgtcaggtgctcccgatgtcaagaagcggggccggccgtcgggcccctccagcaagaagcagcagccgcaggcggcagcgcctggaccaggctggactggattgaagcctcatattttcacagttcaagctggagaggatgtagcatcaagagccatgtcattttctgggaatggatgggctgtttgtatcctgacagccaatggcactgtatctaatgtgaccctgcgtcaaggagagtcttctggtggaacagtaacttatgagggccgttttgagattctctctttggctgggtcatatcttctgtctgaaagtactggcatgagcagtcgaacgggtggacttagtgtttctcttgctagtcctgatgggcatgttttaggtggtgctgtcgcaggacctctaaccgcagcttcgccagttcaggtggtcattgggagctttctggctgatacaaaaatggagcttgaccctggatcagcacctgagaaacatgttttcagcaggtttcaaactaccagcagtccatctaggggtaccgaatcctcgggtgggcatgcaagcccaccaaacaccacaggctccttcagcaccagcacacagccaggcttcccaagctttcccacatggaaatgagtttacctgctatggtggagtgggaccgtggcctctggggatgaggagggaggaatttggaactgacagtcctcgagcgtcgtcgctgtagtttcatgagatgttatgagagtcaatcctatttaggtacttctaactggttacaatgaagttccggtttgctgcttgtcttgacattttgcatcattgaggcacttcaaactccaaagtggtggtaacatacagtatattagatgattccccctatcaaatgccttttgtcattctcctgctcttatattggttattactgctgtgtggg

SEQ ID NO: 62301 - DNA, 1978 bp, Zea Mays
cttttattgcttactccttcagatcggcttgaaaaatatgattacaagaggtatacaacaactcattgttgcaccattacactatgttcaagataaattgtcaacaatggagtcaacagagataatcaaggaggatgcaagtgagagggaatctgatgaaatcgaagtttctagtgcaacacatgataagaaggctgaagcaataactgacgattcaaggcaaaattacaggacagcaatcgccagccattttctattcagagttcatacagatcctgtacatgaggaggctttctctatattgaagaagcttcagataattgagaaagatgttagctccagtgatttttgtacacggagggaatttgcaagatggtttgttaagttaagctcaaagtttgagagtccaatgtgcctttgatgatgtaaatattgacgacccagatttcctgtatatccaatttccagatttgctatttgagaagctcacactgtaaaagtctaattgtctaatttggcgatggaaagctttaggagaatctggtatcgtatccagcaagttatcaaactccttggaaatgttgacaagtggctctccttgttccaagggaaataccttgttcctacctgatagttacctatctcgattcgatcttgtcaactggaaagtgcttgttgagcatccacgcgcattgagaatagacgaaaagtccagataccgagtcaaaatgtttgcattttggatctgcgagcttgcccagatgtgtctccatccatgctcatagagctaatggctggtgaaaacaacatcatcagcagagtttttggaaatactagacgccttcaaccgggcaaacctgtaactaaagcgcaagcagctgctgcactgactagtggccgaatgaaggaagcagttcatgaagaattgaataaacttgaagcagaaaaccaagcccatctttctcttatagctgaaataatggaagagttaattagtaggggagatatacaacaacaatgggagcaaaagatgaaaaaggagcaagaacgggctcttgaagttgacaataatcttcaacatgtattgcatgagcatgcaaatgagaggacagacagagaagaggaactagcagacttgttgaaagaaagagcagctctagaatgccagaatcaggaactcataaatttaaggtcagaaattgacggcatgtatgatagattggcaactgagaacgaagaggtcatggctgatcagcagactttggaaaacctgatgtctgacatgaccagcaagcatcaagctgtcaatgaagctaaatcatatcttgaagctgagaaggaagctcttactatgttaaggacttgggtggaagatgaagcaggacgtgtccatgaacgagctgagacacttgagaaggctttgagaagatggcgaatcccagaagattgatccctccaaactaactgtgctttgcataggaaaagtcttgttcaaagtttttggagctacttggttccagagcatctgccatcagatctgaaaaattctcaatggaatggaatggtcgtgccataatgttctttgagatggttcattatcctttggtgcttcttggcatcttgttgccatcttaggggccgtctgtatcccttcattttggagaaattataatctatttaataaagtaggctatttaactttaaatttaacattccataactttccaaagttcaaatataagcctatcacaaaactatgttactttagagaaattgattttatgtatttctaaacaatgttactctgtaatttataacacactctttgactcacctcctgtagtagaaatatagcaaataaatatctctccatatggtcaacagtggtacactaatatattttgtacaaagctatattaagctatattagcttaatggatctatatctaaattacgattattagattggaattcaatt

SEQ ID NO: 62302 - DNA, 1967 bp, Zea Mays
cttgtttcatgatataatccttttattgcttactccttcagatcggcttgaaaaatatgattacaagaggtatacaacaactcattgttgcaccattacactatgttcaagataaattgtcaacaatggagtcaacagagataatcaaggaggatgcaagtgagagggaatctgatgaaatcgaagtttctagtgcaacacatgataagaaggctgaagcaataactgacgattcaaggcaaaattacaggacagcaatcgccagccattttctattcagagttcatacagatcctgtacatgaggaggctttctctatattgaagaagcttcagataattgagaaagatgttagctccagtgatttttgtacacggagggaatttgcaagatggtttgttaagttaagctcaaagtttgagaggaaaaggatgtgcaggattgttcctaataaattaacttctgacacagtccaatgtgcctttgatgatgtaaatattgacgacccagatttcctgtatatccaatgagaatctggtatcgtatccagcaagttatcaaactccttggaaatgttgacaagtggctctccttgttccaagggaaataccttgttcctacctgatagttacctatctcgattcgatcttgtcaactggaaagtgcttgttgagcatccacgcgcattgagaatagacgaaaagataccgagtcaaaatgtttgcattttggatctgcgagcttgcccagatgtgtctccatccatgctcatagagctaatggctggtgaaaacaacatcatcagcagagtttttggaaatactagacgccttcaaccgggcaaacctgtaactaaagcgcaagcagctgctgcactgactagtggccgaatgaaggaagcagttcatgaagaattgaataaacttgaagcagaaaaccaagcccatctttctcttatagctgaaataatggaagagttaattagtaggggagatatacaacaacaatgggagcaaaagatgaaaaaggagcaagaacgggctcttgaagttgacaataatcttcaacatgtattgcatgagcatgcaaatgagaggacagacagagaagaggaactagcagacttgttgaaagaaagagcagctctagaatgccagaatcaggaactcataaatttaaggtcagaaattgacggcatgtatgatagattggcaactgagaacgaagaggtcatggctgatcagcagactttggaaaacctgatgtctgacatgaccagcaagcatcaagctgtcaatgaagctaaatcatatcttgaagctgagaaggaagctcttactatgttaaggacttgggtggaagatgaagcaggacgtgtccatgaacgagctgagacacttgagaaggctttgagaagatggcgaatcccagaagattgatccctccaaactaactgtgctttgcataggaaaagtcttgttcaaagtttttggagctacttggttccagagcatctgccatcagatctgaaaaattctcaatggaatggaatggtcgtgccataatgttctttgagatggttcattatcctttggtgcttcttggcatcttgttgccatcttaggggccgtctgtatcccttcattttggagaaattataatctatttaataaagtaggctatttaactttaaatttaacattccataactttccaaagttcaaatataagcctatcacaaaactatgttactttagagaaattgattttatgtatttctaaacaatgttactctgtaatttataacacactctttgactcacctcctgtagtagaaatatagcaaataaatatctctccatatggtcaacagtggtacactaatatattttgtacaaagctatattaagctatattagcttaatggatctatatctaaattacgattattagattggaattcaatt

SEQ ID NO: 62303 - DNA, 1729 bp, Zea Mays
cttaccactgcttgtttcatgatataatccttttattgcttactccttcagatcggcttgaaaaatatgattacaagaggtatacaacaactcattgttgcaccattacactatgttcaagataaattgtcaacaatggagtcaacagagataatcaaggaggatgcaagtgagagggaatctgatgaaatcgaagtttctagtgcaacacatgataagaaggctgaagcaataactgacgattcaaggcaaaattacaggacagcaatcgccagccattttctattcagagttcatacagatcctgtacatgaggaggctttctctatattgaagaagcttcagtccaatgtgcctttgatgatgtaaatattgacgacccagatttcctgtatatccaatgagaatctggtatcgtatccagcaagttatcaaactccttggaaatgttgacaagtggctctccttgttccaagggaaataccttgttcctacctgatagttacctatctcgattcgatcttgtcaactggaaagtgcttgttgagcatccacgcgcattgagaatagacgaaaaggaaatactagacgccttcaaccgggcaaacctgtaactaaagcgcaagcagctgctgcactgactagtggccgaatgaaggaagcagttcatgaagaattgaataaacttgaagcagaaaaccaagcccatctttctcttatagctgaaataatggaagagttaattagtaggggagatatacaacaacaatgggagcaaaagatgaaaaaggagcaagaacgggctcttgaagttgacaataatcttcaacatgtattgcatgagcatgcaaatgagaggacagacagagaagaggaactagcagacttgttgaaagaaagagcagctctagaatgccagaatcaggaactcataaatttaaggtcagaaattgacggcatgtatgatagattggcaactgagaacgaagaggtcatggctgatcagcagactttggaaaacctgatgtctgacatgaccagcaagcatcaagctgtcaatgaagctaaatcatatcttgaagctgagaaggaagctcttactatgttaaggacttgggtggaagatgaagcaggacgtgtccatgaacgagctgagacacttgagaaggctttgagaagatggcgaatcccagaagattgatccctccaaactaactgtgctttgcataggaaaagtcttgttcaaagtttttggagctacttggttccagagcatctgccatcagatctgaaaaattctcaatggaatggaatggtcgtgccataatgttctttgagatggttcattatcctttggtgcttcttggcatcttgttgccatcttaggggccgtctgtatcccttcattttggagaaattataatctatttaataaagtaggctatttaactttaaatttaacattccataactttccaaagttcaaatataagcctatcacaaaactatgttactttagagaaattgattttatgtatttctaaacaatgttactctgtaatttataacacactctttgactcacctcctgtagtagaaatatagcaaataaatatctctccatatggtcaacagtggtacactaatatattttgtacaaagctatattaagctatattagcttaatggatctatatctaaattacgattattagattggaattcaatt

SEQ ID NO: 62304 - DNA, 1985 bp, Zea Mays
ggcttaccactgcttgtttcatgatataatccttttattgcttactccttcagatcggcttgaaaaatatgattacaagaggtatacaacaactcattgttgcaccattacactatgttcaagataaattgtcaacaatggagtcaacagagataatcaaggaggatgcaagtgagagggaatctgatgaaatcgaagtttctagtgcaacacatgataagaaggctgaagcaataactgacgattcaaggcaaaattacaggacagcaatcgccagccattttctattcagagttcatacagatcctgtacatgaggaggctttctctatattgaagaagcttcagataattgagaaagatgttagctccagtgatttttgtacacggagggaatttgcaagatggtttgttaagttaagctcaaagtttgagaggaaaaggatgtgcaggattgttcctaataaattaacttctgacacagtccaatgtgcctttgatgatgtaaatattgacgacccagatttcctgtatatccaatctttaggagaatctggtatcgtatccagcaagttatcaaactccttggaaatgttgacaagtggctctccttgttccaagggaaataccttgttcctacctgatagttacctatctcgattcgatcttgtcaactggaaagtgcttgttgagcatccacgcgcattgagaatagacgaaaagataccgagtcaaaatgtttgcattttggatctgcgagcttgcccagatgtgtctccatccatgctcatagagctaatggctggtgaaaacaacatcatcagcagagtttttggaaatactagacgccttcaaccgggcaaacctgtaactaaagcgcaagcagctgctgcactgactagtggccgaatgaaggaagcagttcatgaagaattgaataaacttgaagcagaaaaccaagcccatctttctcttatagctgaaataatggaagagttaattagtaggggagatatacaacaacaatgggagcaaaagatgaaaaaggagcaagaacgggctcttgaagttgacaataatcttcaacatgtattgcatgagcatgcaaatgagaggacagacagagaagaggaactagcagacttgttgaaagaaagagcagctctagaatgccagaatcaggaactcataaatttaaggtcagaaattgacggcatgtatgatagattggcaactgagaacgaagaggtcatggctgatcagcagactttggaaaacctgatgtctgacatgaccagcaagcatcaagctgtcaatgaagctaaatcatatcttgaagctgagaaggaagctcttactatgttaaggacttgggtggaagatgaagcaggacgtgtccatgaacgagctgagacacttgagaaggctttgagaagatggcgaatcccagaagattgatccctccaaactaactgtgctttgcataggaaaagtcttgttcaaagtttttggagctacttggttccagagcatctgccatcagatctgaaaaattctcaatggaatggaatggtcgtgccataatgttctttgagatggttcattatcctttggtgcttcttggcatcttgttgccatcttaggggccgtctgtatcccttcattttggagaaattataatctatttaataaagtaggctatttaactttaaatttaacattccataactttccaaagttcaaatataagcctatcacaaaactatgttactttagagaaattgattttatgtatttctaaacaatgttactctgtaatttataacacactctttgactcacctcctgtagtagaaatatagcaaataaatatctctccatatggtcaacagtggtacactaatatattttgtacaaagctatattaagctatattagcttaatggatctatatctaaattacgattattagattggaattcaatt

SEQ ID NO: 62305 - DNA, 1890 bp, Zea Mays
gttccatatttgaagttggcttaccactgcttgtttcatgatataatccttttattgcttactccttcagatcggcttgaaaaatatgattacaagaggtatacaacaactcattgttgcaccattacactatgttcaagataaattgtcaacaatggagtcaacagagataatcaaggaggatgcaagtgagagggaatctgatgaaatcgaagtttctagtgcaacacatgataagaaggctgaagcaataactgacgattcaaggcaaaattacaggacagcaatcgccagccattttctattcagagttcatacagatcctgtacatgaggaggctttctctatattgaagaagcttcagataattgagaaagatgttagctccagtgatttttgtacacggagggaatttgcaagatggtttgttaagttaagctcaaagtttgagaggaaaaggatgtgcaggattgttcctaataaattaacttctgacacagtccaatgtgcctttgatgatgtaaatattgacgacccagatttcctgtatatccaatctttaggagaatctggtatcgtatccagcaagttatcaaactccttggaaatgttgacaagtggctctccttgttccaagggaaataccttgttcctacctgatagttacctatctcgattcgatcttgtcaactggaaagtgcttgttgagcatccacgcgcattgagaatagacgaaaaggaaatactagacgccttcaaccgggcaaacctgtaactaaagcgcaagcagctgctgcactgactagtggccgaatgaaggaagcagttcatgaagaattgaataaacttgaagcagaaaaccaagcccatctttctcttatagctgaaataatggaagagttaattagtaggggagatatacaacaacaatgggagcaaaagatgaaaaaggagcaagaacgggctcttgaagttgacaataatcttcaacatgtattgcatgagcatgcaaatgagaggacagacagagaagaggaactagcagacttgttgaaagaaagagcagctctagaatgccagaatcaggaactcataaatttaaggtcagaaattgacggcatgtatgatagattggcaactgagaacgaagaggtcatggctgatcagcagactttggaaaacctgatgtctgacatgaccagcaagcatcaagctgtcaatgaagctaaatcatatcttgaagctgagaaggaagctcttactatgttaaggacttgggtggaagatgaagcaggacgtgtccatgaacgagctgagacacttgagaaggctttgagaagatggcgaatcccagaagattgatccctccaaactaactgtgctttgcataggaaaagtcttgttcaaagtttttggagctacttggttccagagcatctgccatcagatctgaaaaattctcaatggaatggaatggtcgtgccataatgttctttgagatggttcattatcctttggtgcttcttggcatcttgttgccatcttaggggccgtctgtatcccttcattttggagaaattataatctatttaataaagtaggctatttaactttaaatttaacattccataactttccaaagttcaaatataagcctatcacaaaactatgttactttagagaaattgattttatgtatttctaaacaatgttactctgtaatttataacacactctttgactcacctcctgtagtagaaatatagcaaataaatatctctccatatggtcaacagtggtacactaatatattttgtacaaagctatattaagctatattagcttaatggatctatatctaaattacgattattagattggaattcaatt

SEQ ID NO: 62306 - DNA, 2035 bp, Zea Mays
ctatttctaaattttctgaaggatccatgttccatatttgaagttggcttaccactgcttgtttcatgatataatccttttattgcttactccttcagatcggcttgaaaaatatgattacaagaggtatacaacaactcattgttgcaccattacactatgttcaagataaattgtcaacaatggagtcaacagagataatcaaggaggatgcaagtgagagggaatctgatgaaatcgaagtttctagtgcaacacatgataagaaggctgaagcaataactgacgattcaaggcaaaattacaggacagcaatcgccagccattttctattcagagttcatacagatcctgtacatgaggaggctttctctatattgaagaagcttcagataattgagaaagatgttagctccagtgatttttgtacacggagggaatttgcaagatggtttgttaagttaagctcaaagtttgagaggaaaaggatgtgcaggattgttcctaataaattaacttctgacacagtccaatgtgcctttgatgatgtaaatattgacgacccagatttcctgtatatccaatctttaggagaatctggtatcgtatccagcaagttatcaaactccttggaaatgttgacaagtggctctccttgttccaagggaaataccttgttcctacctgatagttacctatctcgattcgatcttgtcaactggaaagtgcttgttgagcatccacgcgcattgagaatagacgaaaagtccagataccgagtcaaaatgtttgcattttggatctgcgagcttgcccagatgtgtctccatccatgctcatagagctaatggctggtgaaaacaacatcatcagcagagtttttggaaatactagacgccttcaaccgggcaaacctgtaactaaagcgcaagcagctgctgcactgactagtggccgaatgaaggaagcagttcatgaagaattgaataaacttgaagcagaaaaccaagcccatctttctcttatagctgaaataatggaagagttaattagtaggggagatatacaacaacaatgggagcaaaagatgaaaaaggagcaagaacgggctcttgaagttgacaataatcttcaacatgtattgcatgagcatgcaaatgagaggacagacagagaagaggaactagcagacttgttgaaagaaagagcagctctagaatgccagaatcaggaactcataaatttaaggtcagaaattgacggcatgtatgatagattggcaactgagaacgaagaggtcatggctgatcagcagactttggaaaacctgatgtctgacatgaccagcaagcatcaagctgtcaatgaagctaaatcatatcttgaagctgagaaggaagctcttactatgttaaggacttgggtggaagatgaagcaggacgtgtccatgaacgagctgagacacttgagaaggctttgagaagatggcgaatcccagaagattgatccctccaaactaactgtgctttgcataggaaaagtcttgttcaaagtttttggagctacttggttccagagcatctgccatcagatctgaaaaattctcaatggaatggaatggtcgtgccataatgttctttgagatggttcattatcctttggtgcttcttggcatcttgttgccatcttaggggccgtctgtatcccttcattttggagaaattataatctatttaataaagtaggctatttaactttaaatttaacattccataactttccaaagttcaaatataagcctatcacaaaactatgttactttagagaaattgattttatgtatttctaaacaatgttactctgtaatttataacacactctttgactcacctcctgtagtagaaatatagcaaataaatatctctccatatggtcaacagtggtacactaatatattttgtacaaagctatattaagctatattagcttaatggatctatatctaaattacgattattagattggaattcaatt

SEQ ID NO: 62307 - DNA, 2087 bp, Zea Mays
gtcgatgaaattccggctcacaaagccctagcgagtagcgacctcaattcctcccgccccccccccccccccgggatgggcgtcggcccctacgctcttcgtctctccccgccgccgcggctcgatgccatgctcttcccacagttgcggcctcacctacgccgccgcgtctccgctcgggtagctgcctctggcaccacctggtctcccgccgccaatgactccgaagacagcttcggcggctggtggtttcccgagtacgagaagcatatgaaacaggggaggaggaggataggtatacaacaactcattgttgcaccattacactatgttcaagataaattgtcaacaatggagtcaacagagataatcaaggaggatgcaagtgagagggaatctgatgaaatcgaagtttctagtgcaacacatgataagaaggctgaagcaataactgacgattcaaggcaaaattacaggacagcaatcgccagccattttctattcagagttcatacagatcctgtacatgaggaggctttctctatattgaagaagcttcagataattgagaaagatgttagctccagtgatttttgtacacggagggaatttgcaagatggtttgttaagttaagctcaaagtttgagaggaaaaggatgtgcaggattgttcctaataaattaacttctgacacagtccaatgtgcctttgatgatgtaaatattgacgacccagatttcctgtatatccaatctttaggagaatctggtatcgtatccagcaagttatcaaactccttggaaatgttgacaagtggctctccttgttccaagggaaataccttgttcctacctgatagttacctatctcgattcgatcttgtcaactggaaagtgcttgttgagcatccacgcgcattgagaatagacgaaaaggaaatactagacgccttcaaccgggcaaacctgtaactaaagcgcaagcagctgctgcactgactagtggccgaatgaaggaagcagttcatgaagaattgaataaacttgaagcagaaaaccaagcccatctttctcttatagctgaaataatggaagagttaattagtaggggagatatacaacaacaatgggagcaaaagatgaaaaaggagcaagaacgggctcttgaagttgacaataatcttcaacatgtattgcatgagcatgcaaatgagaggacagacagagaagaggaactagcagacttgttgaaagaaagagcagctctagaatgccagaatcaggaactcataaatttaaggtcagaaattgacggcatgtatgatagattggcaactgagaacgaagaggtcatggctgatcagcagactttggaaaacctgatgtctgacatgaccagcaagcatcaagctgtcaatgaagctaaatcatatcttgaagctgagaaggaagctcttactatgttaaggacttgggtggaagatgaagcaggacgtgtccatgaacgagctgagacacttgagaaggctttgagaagatggcgaatcccagaagattgatccctccaaactaactgtgctttgcataggaaaagtcttgttcaaagtttttggagctacttggttccagagcatctgccatcagatctgaaaaattctcaatggaatggaatggtcgtgccataatgttctttgagatggttcattatcctttggtgcttcttggcatcttgttgccatcttaggggccgtctgtatcccttcattttggagaaattataatctatttaataaagtaggctatttaactttaaatttaacattccataactttccaaagttcaaatataagcctatcacaaaactatgttactttagagaaattgattttatgtatttctaaacaatgttactctgtaatttataacacactctttgactcacctcctgtagtagaaatatagcaaataaatatctctccatatggtcaacagtggtacactaatatattttgtacaaagctatattaagctatattagcttaatggatctatatctaaattacgattattagattggaattcaatt

SEQ ID NO: 62308 - DNA, 2157 bp, Zea Mays
gtcgatgaaattccggctcacaaagccctagcgagtagcgacctcaattcctcccgccccccccccccccccgggatgggcgtcggcccctacgctcttcgtctctccccgccgccgcggctcgatgccatgctcttcccacagttgcggcctcacctacgccgccgcgtctccgctcgggtagctgcctctggcaccacctggtctcccgccgccaatgactccgaagacagcttcggcggctggtggtttcccgagtacgagaagcatatgaaacaggggaggaggaggataggtatacaacaactcattgttgcaccattacactatgttcaagataaattgtcaacaatggagtcaacagagataatcaaggaggatgcaagtgagagggaatctgatgaaatcgaagtttctagtgcaacacatgataagaaggctgaagcaataactgacgattcaaggcaaaattacaggacagcaatcgccagccattttctattcagagttcatacagatcctgtacatgaggaggctttctctatattgaagaagcttcagataattgagaaagatgttagctccagtgatttttgtacacggagggaatttgcaagatggtttgttaagttaagctcaaagtttgagagtccaatgtgcctttgatgatgtaaatattgacgacccagatttcctgtatatccaatctttaggagaatctggtatcgtatccagcaagttatcaaactccttggaaatgttgacaagtggctctccttgttccaagggaaataccttgttcctacctgatagttacctatctcgattcgatcttgtcaactggaaagtgcttgttgagcatccacgcgcattgagaatagacgaaaagtccagataccgagtcaaaatgtttgcattttggatctgcgagcttgcccagatgtgtctccatccatgctcatagagctaatggctggtgaaaacaacatcatcagcagagtttttggaaatactagacgccttcaaccgggcaaacctgtaactaaagcgcaagcagctgctgcactgactagtggccgaatgaaggaagcagttcatgaagaattgaataaacttgaagcagaaaaccaagcccatctttctcttatagctgaaataatggaagagttaattagtaggggagatatacaacaacaatgggagcaaaagatgaaaaaggagcaagaacgggctcttgaagttgacaataatcttcaacatgtattgcatgagcatgcaaatgagaggacagacagagaagaggaactagcagacttgttgaaagaaagagcagctctagaatgccagaatcaggaactcataaatttaaggtcagaaattgacggcatgtatgatagattggcaactgagaacgaagaggtcatggctgatcagcagactttggaaaacctgatgtctgacatgaccagcaagcatcaagctgtcaatgaagctaaatcatatcttgaagctgagaaggaagctcttactatgttaaggacttgggtggaagatgaagcaggacgtgtccatgaacgagctgagacacttgagaaggctttgagaagatggcgaatcccagaagattgatccctccaaactaactgtgctttgcataggaaaagtcttgttcaaagtttttggagctacttggttccagagcatctgccatcagatctgaaaaattctcaatggaatggaatggtcgtgccataatgttctttgagatggttcattatcctttggtgcttcttggcatcttgttgccatcttaggggccgtctgtatcccttcattttggagaaattataatctatttaataaagtaggctatttaactttaaatttaacattccataactttccaaagttcaaatataagcctatcacaaaactatgttactttagagaaattgattttatgtatttctaaacaatgttactctgtaatttataacacactctttgactcacctcctgtagtagaaatatagcaaataaatatctctccatatggtcaacagtggtacactaatatattttgtacaaagctatattaagctatattagcttaatggatctatatctaaattacgattattagattggaattcaatt

SEQ ID NO: 62309 - DNA, 2399 bp, Zea Mays
gtcgatgaaattccggctcacaaagccctagcgagtagcgacctcaattcctcccgccccccccccccccccgggatgggcgtcggcccctacgctcttcgtctctccccgccgccgcggctcgatgccatgctcttcccacagttgcggcctcacctacgccgccgcgtctccgctcgggtagctgcctctggcaccacctggtctcccgccgccaatgactccgaagacagcttcggcggctggtggtttcccgagtacgagaagcatatgaaacaggggaggaggaggatagggtttcagagcgctgtcgtggttgggttgggagcgtctgcggcgatcgcgttggctgggctggcgtggcgcttcccatcctccaggaagcgatccatgttccatatttgaagttggcttaccactgcttgtttcatgatataatccttttattgcttactccttcagatcggcttgaaaaatatgattacaagaggtatacaacaactcattgttgcaccattacactatgttcaagataaattgtcaacaatggagtcaacagagataatcaaggaggatgcaagtgagagggaatctgatgaaatcgaagtttctagtgcaacacatgataagaaggctgaagcaataactgacgattcaaggcaaaattacaggacagcaatcgccagccattttctattcagagttcatacagatcctgtacatgaggaggctttctctatattgaagaagcttcagataattgagaaagatgttagctccagtgatttttgtacacggagggaatttgcaagatggtttgttaagttaagctcaaagtttgagaggaaaaggatgtgcaggattgttcctaataaattaacttctgacacagtccaatgtgcctttgatgatgtaaatattgacgacccagatttcctgtatatccaatctttaggagaatctggtatcgtatccagcaagttatcaaactccttggaaatgttgacaagtggctctccttgttccaagggaaataccttgttcctacctgatagttacctatctcgattcgatcttgtcaactggaaagtgcttgttgagcatccacgcgcattgagaatagacgaaaagtccagataccgagtcaaaatgtttgcattttggatctgcgagcttgcccagatgtgtctccatccatgctcatagagctaatggctggtgaaaacaacatcatcagcagagtttttggaaatactagacgccttcaaccgggcaaacctgtaactaaagcgcaagcagctgctgcactgactagtggccgaatgaaggaagcagttcatgaagaattgaataaacttgaagcagaaaaccaagcccatctttctcttatagctgaaataatggaagagttaattagtaggggagatatacaacaacaatgggagcaaaagatgaaaaaggagcaagaacgggctcttgaagttgacaataatcttcaacatgtattgcatgagcatgcaaatgagaggacagacagagaagaggaactagcagacttgttgaaagaaagagcagctctagaatgccagaatcaggaactcataaatttaaggtcagaaattgacggcatgtatgatagattggcaactgagaacgaagaggtcatggctgatcagcagactttggaaaacctgatgtctgacatgaccagcaagcatcaagctgtcaatgaagctaaatcatatcttgaagctgagaaggaagctcttactatgttaaggacttgggtggaagatgaagcaggacgtgtccatgaacgagctgagacacttgagaaggctttgagaagatggcgaatcccagaagattgatccctccaaactaactgtgctttgcataggaaaagtcttgttcaaagtttttggagctacttggttccagagcatctgccatcagatctgaaaaattctcaatggaatggaatggtcgtgccataatgttctttgagatggttcattatcctttggtgcttcttggcatcttgttgccatcttaggggccgtctgtatcccttcattttggagaaattataatctatttaataaagtaggctatttaactttaaatttaacattccataactttccaaagttcaaatataagcctatcacaaaactatgttactttagagaaattgattttatgtatttctaaacaatgttactctgtaatttataacacactctttgactcacctcctgtagtagaaatatagcaaataaatatctctccatatggtcaacagtggtacactaatatattttgtacaaagctatattaagctatattagcttaatggatctatatctaaattacgattattagattggaattcaatt

SEQ ID NO: 62310 - DNA, 2354 bp, Zea Mays
gtcgatgaaattccggctcacaaagccctagcgagtagcgacctcaattcctcccgccccccccccccccccgggatgggcgtcggcccctacgctcttcgtctctccccgccgccgcggctcgatgccatgctcttcccacagttgcggcctcacctacgccgccgcgtctccgctcgggtagctgcctctggcaccacctggtctcccgccgccaatgactccgaagacagcttcggcggctggtggtttcccgagtacgagaagcatatgaaacaggggaggaggaggatagggtttcagagcgctgtcgtggttgggttgggagcgtctgcggcgatcgcgttggctgggctggcgtggcgcttcccatcctccaggaagcgtatacaacaactcattgttgcaccattacactatgttcaagataaattgtcaacaatggagtcaacagagataatcaaggaggatgcaagtgagagggaatctgatgaaatcgaagtttctagtgcaacacatgataagaaggctgaagcaataactgacgattcaaggcaaaattacaggacagcaatcgccagccattttctattcagagttcatacagatcctgtacatgaggaggctttctctatattgaagaagcttcagataattgagaaagatgttagctccagtgatttttgtacacggagggaatttgcaagatggtttgttaagttaagctcaaagtttgagaggaaaaggatgtgcaggattgttcctaataaattaacttctgacacagtccaatgtgcctttgatgatgtaaatattgacgacccagatttcctgtatatccaatatttgctatttgagaagctcacactgtaaaagtctaattgtctaatttggcgatggaaagctttaggagaatctggtatcgtatccagcaagttatcaaactccttggaaatgttgacaagtggctctccttgttccaagggaaataccttgttcctacctgatagttacctatctcgattcgatcttgtcaactggaaagtgcttgttgagcatccacgcgcattgagaatagacgaaaagtccagataccgagtcaaaatgtttgcattttggatctgcgagcttgcccagatgtgtctccatccatgctcatagagctaatggctggtgaaaacaacatcatcagcagagtttttggaaatactagacgccttcaaccgggcaaacctgtaactaaagcgcaagcagctgctgcactgactagtggccgaatgaaggaagcagttcatgaagaattgaataaacttgaagcagaaaaccaagcccatctttctcttatagctgaaataatggaagagttaattagtaggggagatatacaacaacaatgggagcaaaagatgaaaaaggagcaagaacgggctcttgaagttgacaataatcttcaacatgtattgcatgagcatgcaaatgagaggacagacagagaagaggaactagcagacttgttgaaagaaagagcagctctagaatgccagaatcaggaactcataaatttaaggtcagaaattgacggcatgtatgatagattggcaactgagaacgaagaggtcatggctgatcagcagactttggaaaacctgatgtctgacatgaccagcaagcatcaagctgtcaatgaagctaaatcatatcttgaagctgagaaggaagctcttactatgttaaggacttgggtggaagatgaagcaggacgtgtccatgaacgagctgagacacttgagaaggctttgagaagatggcgaatcccagaagattgatccctccaaactaactgtgctttgcataggaaaagtcttgttcaaagtttttggagctacttggttccagagcatctgccatcagatctgaaaaattctcaatggaatggaatggtcgtgccataatgttctttgagatggttcattatcctttggtgcttcttggcatcttgttgccatcttaggggccgtctgtatcccttcattttggagaaattataatctatttaataaagtaggctatttaactttaaatttaacattccataactttccaaagttcaaatataagcctatcacaaaactatgttactttagagaaattgattttatgtatttctaaacaatgttactctgtaatttataacacactctttgactcacctcctgtagtagaaatatagcaaataaatatctctccatatggtcaacagtggtacactaatatattttgtacaaagctatattaagctatattagcttaatggatctatatctaaattacgattattagattggaattcaatt

SEQ ID NO: 62311 - DNA, 2265 bp, Zea Mays
gtcgatgaaattccggctcacaaagccctagcgagtagcgacctcaattcctcccgccccccccccccccccgggatgggcgtcggcccctacgctcttcgtctctccccgccgccgcggctcgatgccatgctcttcccacagttgcggcctcacctacgccgccgcgtctccgctcgggtagctgcctctggcaccacctggtctcccgccgccaatgactccgaagacagcttcggcggctggtggtttcccgagtacgagaagcatatgaaacaggggaggaggaggataggtatacaacaactcattgttgcaccattacactatgttcaagataaattgtcaacaatggagtcaacagagataatcaaggaggatgcaagtgagagggaatctgatgaaatcgaagtttctagtgcaacacatgataagaaggctgaagcaataactgacgattcaaggcaaaattacaggacagcaatcgccagccattttctattcagagttcatacagatcctgtacatgaggaggctttctctatattgaagaagcttcagataattgagaaagatgttagctccagtgatttttgtacacggagggaatttgcaagatggtttgttaagttaagctcaaagtttgagaggaaaaggatgtgcaggattgttcctaataaattaacttctgacacagtccaatgtgcctttgatgatgtaaatattgacgacccagatttcctgtatatccaatttccagatttgctatttgagaagctcacactgtaaaagtctaattgtctaatttggcgatggaaagctttaggagaatctggtatcgtatccagcaagttatcaaactccttggaaatgttgacaagtggctctccttgttccaagggaaataccttgttcctacctgatagttacctatctcgattcgatcttgtcaactggaaagtgcttgttgagcatccacgcgcattgagaatagacgaaaagataccgagtcaaaatgtttgcattttggatctgcgagcttgcccagatgtgtctccatccatgctcatagagctaatggctggtgaaaacaacatcatcagcagagtttttggaaatactagacgccttcaaccgggcaaacctgtaactaaagcgcaagcagctgctgcactgactagtggccgaatgaaggaagcagttcatgaagaattgaataaacttgaagcagaaaaccaagcccatctttctcttatagctgaaataatggaagagttaattagtaggggagatatacaacaacaatgggagcaaaagatgaaaaaggagcaagaacgggctcttgaagttgacaataatcttcaacatgtattgcatgagcatgcaaatgagaggacagacagagaagaggaactagcagacttgttgaaagaaagagcagctctagaatgccagaatcaggaactcataaatttaaggtcagaaattgacggcatgtatgatagattggcaactgagaacgaagaggtcatggctgatcagcagactttggaaaacctgatgtctgacatgaccagcaagcatcaagctgtcaatgaagctaaatcatatcttgaagctgagaaggaagctcttactatgttaaggacttgggtggaagatgaagcaggacgtgtccatgaacgagctgagacacttgagaaggctttgagaagatggcgaatcccagaagattgatccctccaaactaactgtgctttgcataggaaaagtcttgttcaaagtttttggagctacttggttccagagcatctgccatcagatctgaaaaattctcaatggaatggaatggtcgtgccataatgttctttgagatggttcattatcctttggtgcttcttggcatcttgttgccatcttaggggccgtctgtatcccttcattttggagaaattataatctatttaataaagtaggctatttaactttaaatttaacattccataactttccaaagttcaaatataagcctatcacaaaactatgttactttagagaaattgattttatgtatttctaaacaatgttactctgtaatttataacacactctttgactcacctcctgtagtagaaatatagcaaataaatatctctccatatggtcaacagtggtacactaatatattttgtacaaagctatattaagctatattagcttaatggatctatatctaaattacgattattagattggaattcaatt

SEQ ID NO: 62312 - DNA, 2243 bp, Zea Mays
gtcgatgaaattccggctcacaaagccctagcgagtagcgacctcaattcctcccgccccccccccccccccgggatgggcgtcggcccctacgctcttcgtctctccccgccgccgcggctcgatgccatgctcttcccacagttgcggcctcacctacgccgccgcgtctccgctcgggtagctgcctctggcaccacctggtctcccgccgccaatgactccgaagacagcttcggcggctggtggtttcccgagtacgagaagcatatgaaacaggggaggaggaggatagggtttcagagcgctgtcgtggttgggttgggagcgtctgcggcgatcgcgttggctgggctggcgtggcgcttcccatcctccaggaagcgtatacaacaactcattgttgcaccattacactatgttcaagataaattgtcaacaatggagtcaacagagataatcaaggaggatgcaagtgagagggaatctgatgaaatcgaagtttctagtgcaacacatgataagaaggctgaagcaataactgacgattcaaggcaaaattacaggacagcaatcgccagccattttctattcagagttcatacagatcctgtacatgaggaggctttctctatattgaagaagcttcagataattgagaaagatgttagctccagtgatttttgtacacggagggaatttgcaagatggtttgttaagttaagctcaaagtttgagaggaaaaggatgtgcaggattgttcctaataaattaacttctgacacagtccaatgtgcctttgatgatgtaaatattgacgacccagatttcctgtatatccaatttccagatttgctatttgagaagctcacactgtaaaagtctaattgtctaatttggcgatggaaagctttaggagaatctggtatcgtatccagcaagttatcaaactccttggaaatgttgacaagtggctctccttgttccaagggaaataccttgttcctacctgatagttacctatctcgattcgatcttgtcaactggaaagtgcttgttgagcatccacgcgcattgagaatagacgaaaaggaaatactagacgccttcaaccgggcaaacctgtaactaaagcgcaagcagctgctgcactgactagtggccgaatgaaggaagcagttcatgaagaattgaataaacttgaagcagaaaaccaagcccatctttctcttatagctgaaataatggaagagttaattagtaggggagatatacaacaacaatgggagcaaaagatgaaaaaggagcaagaacgggctcttgaagttgacaataatcttcaacatgtattgcatgagcatgcaaatgagaggacagacagagaagaggaactagcagacttgttgaaagaaagagcagctctagaatgccagaatcaggaactcataaatttaaggtcagaaattgacggcatgtatgatagattggcaactgagaacgaagaggtcatggctgatcagcagactttggaaaacctgatgtctgacatgaccagcaagcatcaagctgtcaatgaagctaaatcatatcttgaagctgagaaggaagctcttactatgttaaggacttgggtggaagatgaagcaggacgtgtccatgaacgagctgagacacttgagaaggctttgagaagatggcgaatcccagaagattgatccctccaaactaactgtgctttgcataggaaaagtcttgttcaaagtttttggagctacttggttccagagcatctgccatcagatctgaaaaattctcaatggaatggaatggtcgtgccataatgttctttgagatggttcattatcctttggtgcttcttggcatcttgttgccatcttaggggccgtctgtatcccttcattttggagaaattataatctatttaataaagtaggctatttaactttaaatttaacattccataactttccaaagttcaaatataagcctatcacaaaactatgttactttagagaaattgattttatgtatttctaaacaatgttactctgtaatttataacacactctttgactcacctcctgtagtagaaatatagcaaataaatatctctccatatggtcaacagtggtacactaatatattttgtacaaagctatattaagctatattagcttaatggatctatatctaaattacgattattagattggaattcaatt

SEQ ID NO: 62313 - DNA, 2261 bp, Zea Mays
aaaaaataaaaactgttttttcttaaaaactaggcctaagtagtagagatttgctctgtcgatgaaattccggctcacaaagccctagcgagtagcgacctcaattcctcccgccccccccccccccccgggatgggcgtcggcccctacgctcttcgtctctccccgccgccgcggctcgatgccatgctcttcccacagttgcggcctcacctacgccgccgcgtctccgctcgggtagctgcctctggcaccacctggtctcccgccgccaatgactccgaagacagcttcggcggctggtggtttcccgagtacgagaagcatatgaaacaggggaggaggaggataggtatacaacaactcattgttgcaccattacactatgttcaagataaattgtcaacaatggagtcaacagagataatcaaggaggatgcaagtgagagggaatctgatgaaatcgaagtttctagtgcaacacatgataagaaggctgaagcaataactgacgattcaaggcaaaattacaggacagcaatcgccagccattttctattcagagttcatacagatcctgtacatgaggaggctttctctatattgaagaagcttcagataattgagaaagatgttagctccagtgatttttgtacacggagggaatttgcaagatggtttgttaagttaagctcaaagtttgagaggaaaaggatgtgcaggattgttcctaataaattaacttctgacacagtccaatgtgcctttgatgatgtaaatattgacgacccagatttcctgtatatccaatctttaggagaatctggtatcgtatccagcaagttatcaaactccttggaaatgttgacaagtggctctccttgttccaagggaaataccttgttcctacctgatagttacctatctcgattcgatcttgtcaactggaaagtgcttgttgagcatccacgcgcattgagaatagacgaaaagtccagataccgagtcaaaatgtttgcattttggatctgcgagcttgcccagatgtgtctccatccatgctcatagagctaatggctggtgaaaacaacatcatcagcagagtttttggaaatactagacgccttcaaccgggcaaacctgtaactaaagcgcaagcagctgctgcactgactagtggccgaatgaaggaagcagttcatgaagaattgaataaacttgaagcagaaaaccaagcccatctttctcttatagctgaaataatggaagagttaattagtaggggagatatacaacaacaatgggagcaaaagatgaaaaaggagcaagaacgggctcttgaagttgacaataatcttcaacatgtattgcatgagcatgcaaatgagaggacagacagagaagaggaactagcagacttgttgaaagaaagagcagctctagaatgccagaatcaggaactcataaatttaaggtcagaaattgacggcatgtatgatagattggcaactgagaacgaagaggtcatggctgatcagcagactttggaaaacctgatgtctgacatgaccagcaagcatcaagctgtcaatgaagctaaatcatatcttgaagctgagaaggaagctcttactatgttaaggacttgggtggaagatgaagcaggacgtgtccatgaacgagctgagacacttgagaaggctttgagaagatggcgaatcccagaagattgatccctccaaactaactgtgctttgcataggaaaagtcttgttcaaagtttttggagctacttggttccagagcatctgccatcagatctgaaaaattctcaatggaatggaatggtcgtgccataatgttctttgagatggttcattatcctttggtgcttcttggcatcttgttgccatcttaggggccgtctgtatcccttcattttggagaaattataatctatttaataaagtaggctatttaactttaaatttaacattccataactttccaaagttcaaatataagcctatcacaaaactatgttactttagagaaattgattttatgtatttctaaacaatgttactctgtaatttataacacactctttgactcacctcctgtagtagaaatatagcaaataaatatctctccatatggtcaacagtggtacactaatatattttgtacaaagctatattaagctatattagcttaatggatctatatctaaattacgattattagattggaattcaatt

SEQ ID NO: 62314 - DNA, 1043 bp, Zea Mays
ttttttttgcctctgcacccttatccatctgcacgacgcacggccgccagggacttcctctcctctgcgcgcccagccgccggcgctgcttcctctcctctgcgcgcccagccgccggcgctgcttcctctcctctgcgcgcccagccgccggcgctgcctcctccatcctctcctctgctcacccagccgcccagtggaagagaggcacgcacgcccagggatagagggggcgcgctagcaggaagctgaagcagggactccccatcctttgtttgttgccaggatgtcatcggcggcttccaatccatcagctcaaccagcagtggacaagcaaccacttaagcggaatagcgatgacatagggtgggagtatggaactattgtcaatccaaatgattggaatgtcataaaatgtacatatctcaaattgggacaaggacaacaaaagcttcatgtttgcttcaaaaaagtcctacgtccgcacgtttggggaaggtgtggctggcgacgcagaccacgacaacacggcgacgtgcaggcgcagctatacgagacacagtgcgacggccctatgtgtagggtacgacgcgacaacgcaggttgctgcaaactcggcggcgcaaggcgtagcaatgcaaggaggaggcacgacgaatcggcgaggcagagagagacacgagtcacagattcgggatgacgtgaggcacgacgacgcggaggcgagaggcccgaagcctcggcaacgcgagtcttcgttttctctattctatggtaacggtgattctggtccttgtgttttcatcgaaggttggttttatttgtgttcatcgttttttttccgatcggggttgttggttttattttatgtatgtaacccatggatcttctttatagtgtgtcaacagttgagtactgctagtagaccatgtcgctctccatccatttgcttgtaggctggccgcctggcacatagtttggcaagtaggccccatgaattgtatcagacagatgtgtttatttagaaattatttactatctgac

SEQ ID NO: 62315 - DNA, 3018 bp, Zea Mays
gtgaagactacagtttaaaaaaaagcaagtcgacaacaaagaatgtcctcaagggactgaaaacagaacagaggcattttaagacgcatcatcatgctagtaacaaggagaacccaacaggccaaccaaacaagaataacattgatcggaacagggtccagctatgttgtagttttctacattatacttgcacaaagtattcaggccacaaaggaatgctaaaaataccaaaaaccaataaatcaaggaccaagcttattgatagtgctttcttaaggatgttgagtgacaacaatgcaacacaagaatatgtaatggccccaggacgtgagctctctctcctcaccaaagaagaacaggtacgcacacacaggtatgtggatttcggatttctgttattcaatcctcttctctgatacagcacaccagactatatagtatataggcacccaactaggccagcccaccacaacggcccatgcacacacgctcgacagcccacacactaatgccgacacaatcaaatcagcagccacaccagcgtctagcctcctgtccctctgccatggtcatgctcaggtatcggccatgacatctgccccttgccaaaacttgcttgtccccaagcaaggcaatataaaaacgagtctgtgttgcatgaaaatccttccgcgtagagagctccgacatgcccgaccactggatcaacaccccaaccatagctgcattgtaaggctgttgagccatatccatttcctctttgaacatataacggttagcaggcatcggttgaatccaagcagccaccactggatccttattccctttgagcactggggctgccaacatcaaggtttcatacccatctaatgctttaaaggagaaacaacctgctgaagaataatgtgaggtgttagaccatagttcagcaagtgacagccaggttttccactgcagaggataatcctggacagcacactgaagcaccataagagtttcacagccttcagatttgatgaaattctcaagaaagtctaggaataacccagcaaagaactgctgctcttctttctcttgcacagaaactgaacactgctctccaaattgcttaacatcggttttcagacctttccaccaaaacagtctcttaacccagtgataagaagcaacccttacagaataaccccaaacagttgaatcatggaaggttgaaatcaacataatgctgagtgctgagcttgtgcccacccaaagctgatggagtcttctaatcttgccttgctgcactgagaacataaccccatgtgggctgtggatggtcacccttggcaacaagtcctgagcataagaagcagtcacagaagaattgggtacctcctgtatcccaactggttggacagcaatgacacaagacatagccataaatgaacccactcgtgataatgcatcagccactatattctccttgcctttctcatgcaccattctgaactggaagcccattaccttactcctgaattttcttttgatgtcagcttgtaactgaacttccatatcacggtttcctggtgtcagttcagatatcacatatcgaacactgcctttgttttgcttcccatcaaggagaaaaacagtcttctattcacatctcatctcctgcccaatacatgcttcacataagacaaggatgaaactattctcgccgggttggtgacaactttgtggggagacacggtttgccacagacccaacagatggcaagacactaccaaaaccagacccatgttcttccaacaacaagttaccattgacctgtaagaacatcgcagtgcataatttggcactatctaccaaaatgagttctagcatcctttcaaggccctcatcaacagcaaccatagccaaagccagataatcatgtcgagatagagtcaaatggtgctggaatttcagcaaaggagctagctacatccaactggtgacaaaactacactcatctacatctccttgtctctccagcatacaaggcaacaatagtggttcatttgtttctgcatcagaaatgtgatagctcctggaactccatgttggaagcttcataaaaccatctccatgaatacttaggcagtaagtcatcatgacccttaactcttccattccaatccttacgccactcatttcctcgaatatttgcccagtaaagtacccaaatagcggcaagccaggatcagaactgaacattatatccaccatgccaccatgttccccaagaaaatcattaacatttgttggcatattattgccgcccaaatccaccttaggatttttcttctcccagtaaaaatccttcctatgccgaggccggaggtgtgttttttttcaagactttgtatcacctcgatgtatggacttgaaaattcaataaagcttcctttatcgaaaaaaaagtaaaaatccttcctgcccaaagtcgattgctgcactaacttgtttgattctagtgcaagtggcatctcctcgcattcctcaagctcacaaggaattgacaagccatcaggaagtgtggataccttgtcggcgttgaccacataggcatcaaccaaaatcatcatctctagatcaccgtgtgcaagcaacaacaataatccatccaagtcatggccatgttgtgattcctgatcccaaattacatccacaagatatgtttcactgaacacctccataacagcaccttcagatgcgaccggtgcctccactacaacccattgacatgcatctgagtatcaagcccttgagctacctgagcagtttgtcttgaagtatcatcagtgctcttgcggcacgatgctagctgttgtaacaaaccctcatgccagattgagtcgtaagaaatttcctcatcccacactgtcgtgccacatagatcattgtctatggctgccttgccaacccaacaatcaccatgatctaaaaccttcggtaaaccgacatgtgattcaaaaccttgcagcacctcat

SEQ ID NO: 62316 - DNA, 1726 bp, Zea Mays
atctcctggtgcttctctcaagccaccgacgctcaggctctctacatcctttagcaggcgccaactccctggagctcgccttcctgctggccgcccccagcaccgacgccccttctttttccccatctccttccttggcgcgctcgcccaggtcacgcgtgtccctgctcgcccaggccgcgacctcgccaaaccgcgcagtccctgctctccttccccagccgcgctcagcccagcccttcctccttcgcccttgtcgagctccctcagctcgcccccaaccacaactgcacgccaacctcgccctaggccatggagcagcaacaaccatggaaccctttcgtgtcgcgccctcgatgtgctcgacgaaagaaaatcgggcaggctctactacctttacctggcgatgctaaaagccaaccagcactagcaacagcgactcaatttgctgccacaaacatctgcaccagcagaggccgctaccgcagaagccaccacggaatcagatcctgcaacgtccactcctctttcaccttatacaaattacccagattgtggtgcccgacgaggtggggcgtcgtttgagagggccgatgaggcgtcggagaagaagcagtcgaacccgatgcgggagatgaaggtccagaagctcgtgctcaacatcttcgttggcgagagcggtgatcgcctcacccgcgccgccaaggtactggagcagctgagcggccagtcaccggtattctccaaggcaaggtacactgtgagatcgcatgctatgtgacggtgcggggtgagaaggcaatgcagctgctggagagtggcttgaaggtgaaggagaacgagctgctgaggaggaacttcagtgacactggttgctttggatttggtatccaagagcacattgatcttggcatcaatgacacgaccttgacagtcaagatgctctttcaggttattttctcctgaaaccacttcttttgccatctcctaatgttatggtcccagttacatctccattcattgcaggagatggtcccagttactttacatggttctgttggacacaatgaagccatccagagatgctattaaaaatcctgctagtcattatggctttaaactgtaccatgtctgttctattttcagctaggcagagcatgttctatttacagcaggccagcagacaccaggcagtaaggatggaaatgttttttggcagctttctcagtgaatcagtatcaccgcagaacctttttggacacccagatgtcgagagatgcccatttctgaggaatatcaatggagctacaaccttttccctctcttctgctttgccagtagctgctcaaggaggcaagggtccaatttttgaggaagggtcaggctttgagtcagcattcaagcttttccatggccgagatggaatagttcccctttcagaaagatcatatgtatctgatgaaaaccacaatgagagcattgacgtcaagttatatacttagttaggctcaatttagagtacacttatgtagagtacacttatttatattgaaccgtcggagttcctacatatgtatcaagttatatacttagttaggctcaatgttagcatcaacagttgatgagcaactttaaatttagagtacacttatgaatgagttatttgacaatgcttatttatgagatattgaatgttatttatctatattatattaattatagtgtt

SEQ ID NO: 62317 - DNA, 2825 bp, Zea Mays
atctcctggtgcttctctcaagccaccgacgctcaggctctctacatcctttagcaggcgccaactccctggagctcgccttcctgctggccgcccccagcaccgacgccccttctttttccccatctccttccttggcgcgctcgcccaggtcacgcgtgtccctgctcgcccaggccgcgacctcgccaaaccgcgcagtccctgctctccttccccagccgcgctcagcccagcccttcctccttcgcccttgtcgagctccctcagctcgcccccaaccacaactgcacgccaacctcgccctaggccatggagcagcaacaaccatggaaccctttcgtgtcgcgccctcgatgtgctcgacgaaagttggttcgatgaacgggttggctaatcgcgatgtgtggaggagacaaatttctaggatctgagggtaagagaagccaagacctagagcgatgatcactaggtgttcggtgaaaaggatgaaccggtgatcgtggttggtcttgcaaaatccgagttctattttatgttggtgttgtgcggtgtgatctccaattccatgttgctgatgtcttgctccatcatgaccttagggaaggatgttttcctctaaattatcgtaataattatgctgggtttatgtgttgttttagcatacattgtgaaagcatttcttgctcagcaggacaaggaggggctttcatgaaataacttttgaccacttatgttccttttccaaatataaatcagttagaagtgggtcttggcaataattagctcatgactatttgttgttggccctttggctgcaatttctgaatagtttgatgtgaagggaccttgctgagctttgtgtacttgatatttgaatagtttggagaaaggattaaaatctaccctcactaattttttagatgccccttaaaactgattttgaggagttattttctagggagctcttggagatgctcttattcctattggtacggagtaatatgtatattgtgcaattaaaatggcctttatatggtattgaacatttcccacaataatctgtaatctttccatgaattgttttcctatatgtggtattattaattggcagtgctcctagacactgcacatccatttcctgtgaaattactaaaagattgccgggaagtggcaatgggactgttactgatgaaattttatgagaattattgatttcgaagtaacttctttctggacttttttgccagccaacattgttttccatagaaaatggtttttgaatattcatggcaaaattttatggtttacaaaattccttcatttcatctacagaaaatcgggcaggctctactacctttacctggcgatgctaaaagccaaccagcactagcaacagcgactcaatttgctgccacaaacatctgcaccagcagaggccgctaccgcagaagccaccacggaatcagatcctgcaacgtccactcctctttcaccttatacaaattacccagattgtggtgcccgacgaggtggggcgtcgtttgagagggccgatgaggcgtcggagaagaagcagtcgaacccgatgcgggagatgaaggtccagaagctcgtgctcaacatcttcgttggcgagagcggtgatcgcctcacccgcgccgccaaggtactggagcagctgagcggccagtcaccggtattctccaaggcaaggtacactgtgagatcgcatgctatgtgacggtgcggggtgagaaggcaatgcagctgctggagagtggcttgaaggtgaaggagaacgagctgctgaggaggaacttcagtgacactggttgctttggatttggtatccaagagcacattgatcttggcatcaatgacacgaccttgacagtcaagatgctctttcaggagatggtcccagttactttacatggttctgttggacacaatgaagccatccagagatgctattaaaaatcctgctagtcattatggctttaaactgtaccatgtctgttctattttcagctaggcagagcatgttctatttacagcaggccagcagacaccaggcagtaaggtgatgtatgaatcaattatcaggtgacaaaatggttatgtttaatcatgcatgttttcttcctgactctctatgtttctttgaggcattcaactacttgtagtatcagtgcatcactgatgtatatatgtgttgatgttcatcatccaagatcaaatacatcctgctaggtcattacttgctaatgtgcatctgagtttgctgttgccaggatggaaatgttttttggcagctttctcagtgaatcagtatcaccgcagaacctttttggacacccagatgtcgagagatgcccatttctgaggaatatcaatggagctacaaccttttccctctcttctgctttgccagtagctgctcaaggaggcaagggtccaatttttgaggaagggtcaggctttgagtcagcattcaagcttttccatggccgagatggaatagttcccctttcagaaagatcatatgtatctgatgaaaaccacaatgagagcattgacgtcaagttatatacttagttaggctcaatttagagtacacttatgtagagtacacttatttatattgaaccgtcggagttcctacatatgtatcaagttatatacttagttaggctcaatgttagcatcaacagttgatgagcaactttaaatttagagtacacttatgaatgagttatttgacaatgcttatttatgagatattgaatgttatttatctatattatattaattatagtgtt

SEQ ID NO: 62318 - DNA, 2031 bp, Zea Mays
atctcctggtgcttctctcaagccaccgacgctcaggctctctacatcctttagcaggcgccaactccctggagctcgccttcctgctggccgcccccagcaccgacgccccttctttttccccatctccttccttggcgcgctcgcccaggtcacgcgtgtccctgctcgcccaggccgcgacctcgccaaaccgcgcagtccctgctctccttccccagccgcgctcagcccagcccttcctccttcgcccttgtcgagctccctcagctcgcccccaaccacaactgcacgccaacctcgccctaggccatggagcagcaacaaccatggaaccctttcgtgtcgcgccctcgatgtgctcgacgaaagttggttcgatgaacgggttggctaatcgcgatgtgtggaggagacaaatttctaggatctgagggtaagagaagccaagacctagagcgatgatcactaggtgttcggtgaaaaggatgaaccggtgatcgtggttggtcttgcaaaatccgagttctattttatgttgaaaatcgggcaggctctactacctttacctggcgatgctaaaagccaaccagcactagcaacagcgactcaatttgctgccacaaacatctgcaccagcagaggccgctaccgcagaagccaccacggaatcagatcctgcaacgtccactcctctttcaccttatacaaattacccagattgtggtgcccgacgaggtggggcgtcgtttgagagggccgatgaggcgtcggagaagaagcagtcgaacccgatgcgggagatgaaggtccagaagctcgtgctcaacatcttcgttggcgagagcggtgatcgcctcacccgcgccgccaaggtactggagcagctgagcggccagtcaccggtattctccaaggcaaggtacactgtgagatcgcatgctatgtgacggtgcggggtgagaaggcaatgcagctgctggagagtggcttgaaggtgaaggagaacgagctgctgaggaggaacttcagtgacactggttgctttggatttggtatccaagagcacattgatcttggcatcaatgacacgaccttgacagtcaagatgctctttcaggagatggtcccagttactttacatggttctgttggacacaatgaagccatccagagatgctattaaaaatcctgctagtcattatggctttaaactgtaccatgtctgttctattttcagctaggcagagcatgttctatttacagcaggccagcagacaccaggcagtaaggtgatgtatgaatcaattatcaggtgacaaaatggttatgtttaatcatgcatgttttcttcctgactctctatgtttctttgaggcattcaactacttgtagtatcagtgcatcactgatgtatatatgtgttgatgttcatcatccaagatcaaatacatcctgctaggtcattacttgctaatgtgcatctgagtttgctgttgccaggatggaaatgttttttggcagctttctcagtgaatcagtatcaccgcagaacctttttggacacccagatgtcgagagatgcccatttctgaggaatatcaatggagctacaaccttttccctctcttctgctttgccagtagctgctcaaggaggcaagggtccaatttttgaggaagggtcaggctttgagtcagcattcaagcttttccatggccgagatggaatagttcccctttcagaaagatcatatgtatctgatgaaaaccacaatgagagcattgacgtcaagttatatacttagttaggctcaatttagagtacacttatgtagagtacacttatttatattgaaccgtcggagttcctacatatgtatcaagttatatacttagttaggctcaatgttagcatcaacagttgatgagcaactttaaatttagagtacacttatgaatgagttatttgacaatgcttatttatgagatattgaatgttatttatctatattatattaattatagtgtt

SEQ ID NO: 62319 - DNA, 2310 bp, Zea Mays
atctcctggtgcttctctcaagccaccgacgctcaggctctctacatcctttagcaggcgccaactccctggagctcgccttcctgctggccgcccccagcaccgacgccccttctttttccccatctccttccttggcgcgctcgcccaggtcacgcgtgtccctgctcgcccaggccgcgacctcgccaaaccgcgcagtccctgctctccttccccagccgcgctcagcccagcccttcctccttcgcccttgtcgagctccctcagctcgcccccaaccacaactgcacgccaacctcgccctaggccatggagcagcaacaaccatggaaccctttcgtgtcgcgccctcgatgtgctcgacgaaagttggttcgatgaacgggttggctaatcgcgatgtgtggaggagacaaatttctaggatctgagggtaagagaagccaagacctagagcgatgatcactaggtgttcggtgaaaaggatgaaccggtgatcgtggttggtcttgcaaaatccgagttctattttatgttggtgttgtgcggtgtgatctccaattccatgttgctgatgtcttgctccatcatgaccttagggaaggatgttttcctctaaattatcgtaataattatgctgggtttatgtgttgttttagcatacattgtgaaagcatttcttgctcagcaggacaaggaggggctttcatgaaataacttttgaccacttatgttccttttccaaatataaatcagttagaagtgggtcttggcaataattagctcatgactatttgttgttggccctttggctgcaatttctgaatagtttgatgtgaagggaccttgctgagctttgtgtacttgatatttgaatagtttggagaaaggattaaaatctaccctcactaattttttagatgccccttaaaactgattttgaggagttattttctagggagctcttggagatgctcttattcctattgtacccagattgtggtgcccgacgaggtggggcgtcgtttgagagggccgatgaggcgtcggagaagaagcagtcgaacccgatgcgggagatgaaggtccagaagctcgtgctcaacatcttcgttggcgagagcggtgatcgcctcacccgcgccgccaaggtactggagcagctgagcggccagtcaccggtattctccaaggcaaggtacactgtgagatcgcatgctatgtgacggtgcggggtgagaaggcaatgcagctgctggagagtggcttgaaggtgaaggagaacgagctgctgaggaggaacttcagtgacactggttgctttggatttggtatccaagagcacattgatcttggcatcaatgacacgaccttgacagtcaagatgctctttcaggagatggtcccagttactttacatggttctgttggacacaatgaagccatccagagatgctattaaaaatcctgctagtcattatggctttaaactgtaccatgtctgttctattttcagctaggcagagcatgttctatttacagcaggccagcagacaccaggcagtaaggtgatgtatgaatcaattatcaggtgacaaaatggttatgtttaatcatgcatgttttcttcctgactctctatgtttctttgaggcattcaactacttgtagtatcagtgcatcactgatgtatatatgtgttgatgttcatcatccaagatcaaatacatcctgctaggtcattacttgctaatgtgcatctgagtttgctgttgccaggatggaaatgttttttggcagctttctcagtgaatcagtatcaccgcagaacctttttggacacccagatgtcgagagatgcccatttctgaggaatatcaatggagctacaaccttttccctctcttctgctttgccagtagctgctcaaggaggcaagggtccaatttttgaggaagggtcaggctttgagtcagcattcaagcttttccatggccgagatggaatagttcccctttcagaaagatcatatgtatctgatgaaaaccacaatgagagcattgacgtcaagttatatacttagttaggctcaatttagagtacacttatgtagagtacacttatttatattgaaccgtcggagttcctacatatgtatcaagttatatacttagttaggctcaatgttagcatcaacagttgatgagcaactttaaatttagagtacacttatgaatgagttatttgacaatgcttatttatgagatattgaatgttatttatctatattatattaattatagtgtt

SEQ ID NO: 62320 - DNA, 2528 bp, Zea Mays
atctcctggtgcttctctcaagccaccgacgctcaggctctctacatcctttagcaggcgccaactccctggagctcgccttcctgctggccgcccccagcaccgacgccccttctttttccccatctccttccttggcgcgctcgcccaggtcacgcgtgtccctgctcgcccaggccgcgacctcgccaaaccgcgcagtccctgctctccttccccagccgcgctcagcccagcccttcctccttcgcccttgtcgagctccctcagctcgcccccaaccacaactgcacgccaacctcgccctaggccatggagcagcaacaaccatggaaccctttcgtgtcgcgccctcgatgtgctcgacgaaagttggttcgatgaacgggttggctaatcgcgatgtgtggaggagacaaatttctaggatctgagggtaagagaagccaagacctagagcgatgatcactaggtgttcggtgaaaaggatgaaccggtgatcgtggttggtcttgcaaaatccgagttctattttatgttggtgttgtgcggtgtgatctccaattccatgttgctgatgtcttgctccatcatgaccttagggaaggatgttttcctctaaattatcgtaataattatgctgggtttatgtgttgttttagcatacattgtgaaagcatttcttgctcagcaggacaaggaggggctttcatgaaataacttttgaccacttatgttccttttccaaatataaatcagttagaagtgggtcttggcaataattagctcatgactatttgttgttggccctttggctgcaatttctgaatagtttgatgtgaagggaccttgctgagctttgtgtacttgatatttgaatagtttggagaaaggattaaaatctaccctcactaattttttagatgccccttaaaactgattttgaggagttattttctagggagctcttggagatgctcttattcctattggtacggagtaatatgtatattgtgcaattaaaatggcctttatatgaaaatcgggcaggctctactacctttacctggcgatgctaaaagccaaccagcactagcaacagcgactcaatttgctgccacaaacatctgcaccagcagaggccgctaccgcagaagccaccacggaatcagatcctgcaacgtccactcctctttcaccttatacaaattacccagattgtggtgcccgacgaggtggggcgtcgtttgagagggccgatgaggcgtcggagaagaagcagtcgaacccgatgcgggagatgaaggtccagaagctcgtgctcaacatcttcgttggcgagagcggtgatcgcctcacccgcgccgccaaggtactggagcagctgagcggccagtcaccggtattctccaaggcaaggtacactgtgagatcgcatgctatgtgacggtgcggggtgagaaggcaatgcagctgctggagagtggcttgaaggtgaaggagaacgagctgctgaggaggaacttcagtgacactggttgctttggatttggtatccaagagcacattgatcttggcatcaatgacacgaccttgacagtcaagatgctctttcaggagatggtcccagttactttacatggttctgttggacacaatgaagccatccagagatgctattaaaaatcctgctagtcattatggctttaaactgtaccatgtctgttctattttcagctaggcagagcatgttctatttacagcaggccagcagacaccaggcagtaaggtgatgtatgaatcaattatcaggtgacaaaatggttatgtttaatcatgcatgttttcttcctgactctctatgtttctttgaggcattcaactacttgtagtatcagtgcatcactgatgtatatatgtgttgatgttcatcatccaagatcaaatacatcctgctaggtcattacttgctaatgtgcatctgagtttgctgttgccaggatggaaatgttttttggcagctttctcagtgaatcagtatcaccgcagaacctttttggacacccagatgtcgagagatgcccatttctgaggaatatcaatggagctacaaccttttccctctcttctgctttgccagtagctgctcaaggaggcaagggtccaatttttgaggaagggtcaggctttgagtcagcattcaagcttttccatggccgagatggaatagttcccctttcagaaagatcatatgtatctgatgaaaaccacaatgagagcattgacgtcaagttatatacttagttaggctcaatttagagtacacttatgtagagtacacttatttatattgaaccgtcggagttcctacatatgtatcaagttatatacttagttaggctcaatgttagcatcaacagttgatgagcaactttaaatttagagtacacttatgaatgagttatttgacaatgcttatttatgagatattgaatgttatttatctatattatattaattatagtgtt

SEQ ID NO: 62321 - DNA, 2278 bp, Zea Mays
atctcctggtgcttctctcaagccaccgacgctcaggctctctacatcctttagcaggcgccaactccctggagctcgccttcctgctggccgcccccagcaccgacgccccttctttttccccatctccttccttggcgcgctcgcccaggtcacgcgtgtccctgctcgcccaggccgcgacctcgccaaaccgcgcagtccctgctctccttccccagccgcgctcagcccagcccttcctccttcgcccttgtcgagctccctcagctcgcccccaaccacaactgcacgccaacctcgccctaggccatggagcagcaacaaccatggaaccctttcgtgtcgcgccctcgatgtgctcgacgaaagttggttcgatgaacgggttggctaatcgcgatgtgtggaggagacaaatttctaggatctgagggtaagagaagccaagacctagagcgatgatcactaggtgttcggtgaaaaggatgaaccggtgatcgtggttggtcttgcaaaatccgagttctattttatgttggtgttgtgcggtgtgatctccaattccatgttgctgatgtcttgctccatcatgaccttagggaaggatgttttcctctaaattatcaaaatcgggcaggctctactacctttacctggcgatgctaaaagccaaccagcactagcaacagcgactcaatttgctgccacaaacatctgcaccagcagaggccgctaccgcagaagccaccacggaatcagatcctgcaacgtccactcctctttcaccttatacaaattacccagattgtggtgcccgacgaggtggggcgtcgtttgagagggccgatgaggcgtcggagaagaagcagtcgaacccgatgcgggagatgaaggtccagaagctcgtgctcaacatcttcgttggcgagagcggtgatcgcctcacccgcgccgccaaggtactggagcagctgagcggccagtcaccggtattctccaagggtaattttcttatacctgacgttatcaatgtgtagtgtggtcctggatttatgatggtcgtagcaaccatgttgtgacattgcagcaaggtacactgtgagatcgcatgctatgtgacggtgcggggtgagaaggcaatgcagctgctggagagtggcttgaaggtgaaggagaacgagctgctgaggaggaacttcagtgacactggttgctttggatttggtatccaagagcacattgatcttggcatcaatgacacgaccttgacagtcaagatgctctttcaggttattttctcctgaaaccacttcttttgccatctcctaatgttatggtcccagttacatctccattcattgcaggagatggtcccagttactttacatggttctgttggacacaatgaagccatccagagatgctattaaaaatcctgctagtcattatggctttaaactgtaccatgtctgttctattttcagctaggcagagcatgttctatttacagcaggccagcagacaccaggcagtaaggtgatgtatgaatcaattatcaggtgacaaaatggttatgtttaatcatgcatgttttcttcctgactctctatgtttctttgaggcattcaactacttgtagtatcagtgcatcactgatgtatatatgtgttgatgttcatcatccaagatcaaatacatcctgctaggtcattacttgctaatgtgcatctgagtttgctgttgccaggatggaaatgttttttggcagctttctcagtgaatcagtatcaccgcagaacctttttggacacccagatgtcgagagatgcccatttctgaggaatatcaatggagctacaaccttttccctctcttctgctttgccagtagctgctcaaggaggcaagggtccaatttttgaggaagggtcaggctttgagtcagcattcaagcttttccatggccgagatggaatagttcccctttcagaaagatcatatgtatctgatgaaaaccacaatgagagcattgacgtcaagttatatacttagttaggctcaatttagagtacacttatgtagagtacacttatttatattgaaccgtcggagttcctacatatgtatcaagttatatacttagttaggctcaatgttagcatcaacagttgatgagcaactttaaatttagagtacacttatgaatgagttatttgacaatgcttatttatgagatattgaatgttatttatctatattatattaattatagtgtt

SEQ ID NO: 62322 - DNA, 2715 bp, Zea Mays
cgtccatctcctggtgcttctctcaagccaccgacgctcaggctctctacatcctttagcaggcgccaactccctggagctcgccttcctgctggccgcccccagcaccgacgccccttctttttccccatctccttccttggcgcgctcgcccaggtcacgcgtgtccctgctcgcccaggccgcgacctcgccaaaccgcgcagtccctgctctccttccccagccgcgctcagcccagcccttcctccttcgcccttgtcgagctccctcagctcgcccccaaccacaactgcacgccaacctcgccctaggccatggagcagcaacaaccatggaaccctttcgtgtcgcgccctcgatgtgctcgacgaaagttggttcgatgaacgggttggctaatcgcgatgtgtggaggagacaaatttctaggatctgagggtaagagaagccaagacctagagcgatgatcactaggtgttcggtgaaaaggatgaaccggtgatcgtggttggtcttgcaaaatccgagttctattttatgttggtaaggtgttgtgcggtgtgatctccaattccatgttgctgatgtcttgctccatcatgaccttagggaaggatgttttcctctaaattatcgtaataattatgctgggtttatgtgttgttttagcatacattgtgaaagcatttcttgctcagcaggacaaggaggggctttcatgaaataacttttgaccacttatgttccttttccaaatataaatcagttagaagtgggtcttggcaataattagctcatgactatttgttgttggccctttggctgcaatttctgaatagtttgatgtgaagggaccttgctgagctttgtgtacttgatatttgaatagtttggagaaaggattaaaatctaccctcactaattttttagatgccccttaaaactgattttgaggagttattttctagggagctcttggagatgctcttattcctattggtacggagtaatatgtatattgtgcaattaaaatggcctttatatggtattgaacatttcccacaataatctgtaatctttccatgaattgttttcctatatgtggtattattaattggcagtgctcctagacactgcacatccatttcctgtgaaattactaaaagattgccgggaagtggcaatgggactgttactgatgaaattttatgagaattattgatttcgaagtaacttctttctggacttttttgccagccaacattgttttccatagaaaatggtttttgaatattcatggcaaaattttatggtttacaaaattccttcatttcatctacagaaaatcgggcaggctctactacctttacctggcgatgctaaaagccaaccagcactagcaacagcgactcaatttgctgccacaaacatctgcaccagcagaggccgctaccgcagaagccaccacggaatcagatcctgcaacgtccactcctctttcaccttatacaaattacccagattgtggtgcccgacgaggtggggcgtcgtttgagagggccgatgaggcgtcggagaagaagcagtcgaacccgatgcgggagatgaaggtccagaagctcgtgctcaacatcttcgttggcgagagcggtgatcgcctcacccgcgccgccaaggtactggagcagctgagcggccagtcaccggtattctccaaggcaaggtacactgtgagatcgcatgctatgtgacggtgcggggtgagaaggcaatgcagctgctggagagtggcttgaaggtgaaggagaacgagctgctgaggaggaacttcagtgacactggttgctttggatttggtatccaagagcacattgatcttggcatcaatgacacgaccttgacagtcaagatgctctttcagctaggcagagcatgttctatttacagcaggccagcagacaccaggcagtaaggtgatgtatgaatcaattatcaggtgacaaaatggttatgtttaatcatgcatgttttcttcctgactctctatgtttctttgaggcattcaactacttgtagtatcagtgcatcactgatgtatatatgtgttgatgttcatcatccaagatcaaatacatcctgctaggtcattacttgctaatgtgcatctgagtttgctgttgccaggatggaaatgttttttggcagctttctcagtgaatcagtatcaccgcagaacctttttggacacccagatgtcgagagatgcccatttctgaggaatatcaatggagctacaaccttttccctctcttctgctttgccagtagctgctcaaggaggcaagggtccaatttttgaggaagggtcaggctttgagtcagcattcaagcttttccatggccgagatggaatagttcccctttcagaaagatcatatgtatctgatgaaaaccacaatgagagcattgacgtcaagttatatacttagttaggctcaatttagagtacacttatgtagagtacacttatttatattgaaccgtcggagttcctacatatgtatcaagttatatacttagttaggctcaatgttagcatcaacagttgatgagcaactttaaatttagagtacacttatgaatgagttatttgacaatgcttatttatgagatattgaatgttatttatctatattatattaattatagtgtt

SEQ ID NO: 62323 - DNA, 2714 bp, Zea Mays
gaaacgtccatctcctggtgcttctctcaagccaccgacgctcaggctctctacatcctttagcaggcgccaactccctggagctcgccttcctgctggccgcccccagcaccgacgccccttctttttccccatctccttccttggcgcgctcgcccaggtcacgcgtgtccctgctcgcccaggccgcgacctcgccaaaccgcgcagtccctgctctccttccccagccgcgctcagcccagcccttcctccttcgcccttgtcgagctccctcagctcgcccccaaccacaactgcacgccaacctcgccctaggccatggagcagcaacaaccatggaaccctttcgtgtcgcgccctcgatgtgctcgacgaaagttggttcgatgaacgggttggctaatcgcgatgtgtggaggagacaaatttctaggatctgagggtaagagaagccaagacctagagcgatgatcactaggtgttcggtgaaaaggatgaaccggtgatcgtggttggtcttgcaaaatccgagttctattttatgttggtgttgtgcggtgtgatctccaattccatgttgctgatgtcttgctccatcatgaccttagggaaggatgttttcctctaaattatcgtaataattatgctgggtttatgtgttgttttagcatacattgtgaaagcatttcttgctcagcaggacaaggaggggctttcatgaaataacttttgaccacttatgttccttttccaaatataaatcagttagaagtgggtcttggcaataattagctcatgactatttgttgttggccctttggctgcaatttctgaatagtttgatgtgaagggaccttgctgagctttgtgtacttgatatttgaatagtttggagaaaggattaaaatctaccctcactaattttttagatgccccttaaaactgattttgaggagttattttctagggagctcttggagatgctcttattcctattggtacggagtaatatgtatattgtgcaattaaaatggcctttatatggtattgaacatttcccacaataatctgtaatctttccatgaattgttttcctatatgtggtattattaattggcagtgctcctagacactgcacatccatttcctgtgaaattactaaaagattgccgggaagtggcaatgggactgttactgatgaaattttatgagaattattgatttcgaagtaacttctttctggacttttttgccagccaacattgttttccatagaaaatggtttttgaatattcatggcaaaattttatggtttacaaaattccttcatttcatctacagaaaatcgggcaggctctactacctttacctggcgatgctaaaagccaaccagcactagcaacagcgactcaatttgctgccacaaacatctgcaccagcagaggccgctaccgcagaagccaccacggaatcagatcctgcaacgtccactcctctttcaccttatacaaattacccagattgtggtgcccgacgaggtggggcgtcgtttgagagggccgatgaggcgtcggagaagaagcagtcgaacccgatgcgggagatgaaggtccagaagctcgtgctcaacatcttcgttggcgagagcggtgatcgcctcacccgcgccgccaaggtactggagcagctgagcggccagtcaccggtattctccaaggcaaggtacactgtgagatcgcatgctatgtgacggtgcggggtgagaaggcaatgcagctgctggagagtggcttgaaggtgaaggagaacgagctgctgaggaggaacttcagtgacactggttgctttggatttggtatccaagagcacattgatcttggcatcaatgacacgaccttgacagtcaagatgctctttcagctaggcagagcatgttctatttacagcaggccagcagacaccaggcagtaaggtgatgtatgaatcaattatcaggtgacaaaatggttatgtttaatcatgcatgttttcttcctgactctctatgtttctttgaggcattcaactacttgtagtatcagtgcatcactgatgtatatatgtgttgatgttcatcatccaagatcaaatacatcctgctaggtcattacttgctaatgtgcatctgagtttgctgttgccaggatggaaatgttttttggcagctttctcagtgaatcagtatcaccgcagaacctttttggacacccagatgtcgagagatgcccatttctgaggaatatcaatggagctacaaccttttccctctcttctgctttgccagtagctgctcaaggaggcaagggtccaatttttgaggaagggtcaggctttgagtcagcattcaagcttttccatggccgagatggaatagttcccctttcagaaagatcatatgtatctgatgaaaaccacaatgagagcattgacgtcaagttatatacttagttaggctcaatttagagtacacttatgtagagtacacttatttatattgaaccgtcggagttcctacatatgtatcaagttatatacttagttaggctcaatgttagcatcaacagttgatgagcaactttaaatttagagtacacttatgaatgagttatttgacaatgcttatttatgagatattgaatgttatttatctatattatattaattatagtgtt

SEQ ID NO: 62324 - DNA, 1575 bp, Zea Mays
atctcctggtgcttctctcaagccaccgacgctcaggctctctacatcctttagcaggcgccaactccctggagctcgccttcctgctggccgcccccagcaccgacgccccttctttttccccatctccttccttggcgcgctcgcccaggtcacgcgtgtccctgctcgcccaggccgcgacctcgccaaaccgcgcagtccctgctctccttccccagccgcgctcagcccagcccttcctccttcgcccttgtcgagctccctcagctcgcccccaaccacaactgcacgccaacctcgccctaggccatggagcagcaacaaccatggaaccctttcgtgtcgcgccctcgatgtgctcgacgaaagttggttcgatgaacgggttggctaatcgcgatgtgtggaggagacaaatttctaggatctgagggtaagagaagccaagacctagagcgatgatcactaggtgttcggtgaaaaggatgaaccggtgatcgtggttggtcttgcaaaatccgagttctattttatgttggtaaggtgttgtgcggtgtgatctccaattccatgttgctgatgtcttgctccatcatgaccttagggaaggatgttttcctctaaattatcgtaataattatgctgggtttatgtgttgttttagcatacattgtgaaagcatttcttgctcagcaggacaaggaggggctttcatgaaataacttttgaccacttatgttccttttccaaatataaatcagttagaagtgggtcttggcaataattagctcatgactatttgttgttggccctttggctgcaatttctgaatagtttgatgtgaagggaccttgctgagctttgtgtacttgatatttgaatagtttggagaaaggattaaaatctaccctcactaattttttagatgccccttaaaactgattttgaggagttattttctagggagctcttggagatgctcttattcctattgtacccagattgtggtgcccgacgaggtggggcgtcgtttgagagggccgatgaggcgtcggagaagaagcagtcgaacccgatgcgggagatgaaggtccagaagctcgtgctcaacatcttcgttggcgagagcggtgatcgcctcacccgcgccgccaaggtactggagcagctgagcggccagtcaccggtattctccaaggcaaggtacactgtgagatcgcatgctatgtgacggtgcggggtgagaaggcaatgcagctgctggagagtggcttgaaggtgaaggagaacgagctgctgaggaggaacttcagtgacactggttgctttggatttggtatccaagagcacattgatcttggcatcaagtaagatgatctcatgtcttatcgtaaataatttgaatgaggcctgtttgtttctgtgaacgggtgttttatgatgggcattgttgcttgcctgtaagcaggggaaaagatatgtaactttgtattcatgtagcctgtacccactatggtcactacgtactgggatagcttaaggctaagttcttaacacagtttataaccatgc

SEQ ID NO: 62325 - DNA, 1122 bp, Zea Mays
atctcctggtgcttctctcaagccaccgacgctcaggctctctacatcctttagcaggcgccaactccctggagctcgccttcctgctggccgcccccagcaccgacgccccttctttttccccatctccttccttggcgcgctcgcccaggtcacgcgtgtccctgctcgcccaggccgcgacctcgccaaaccgcgcagtccctgctctccttccccagccgcgctcagcccagcccttcctccttcgcccttgtcgagctccctcagctcgcccccaaccacaactgcacgccaacctcgccctaggccatggagcagcaacaaccatggaaccctttcgtgtcgcgccctcgatgtgctcgacgaaagaaaatcgggcaggctctactacctttacctggcgatgctaaaagccaaccagcactagcaacagcgactcaatttgctgccacaaacatctgcaccagcagaggccgctaccgcagaagccaccacggaatcagatcctgcaacgtccactcctctttcaccttatacaaattacccagattgtggtgcccgacgaggtggggcgtcgtttgagagggccgatgaggcgtcggagaagaagcagtcgaacccgatgcgggagatgaaggtccagaagctcgtgctcaacatcttcgttggcgagagcggtgatcgcctcacccgcgccgccaaggtactggagcagctgagcggccagtcaccggtattctccaaggcaaggtacactgtgagatcgcatgctatgtgacggtgcggggtgagaaggcaatgcagctgctggagagtggcttgaaggtgaaggagaacgagctgctgaggaggaacttcagtgacactggttgctttggatttggtatccaagagcacattgatcttggcatcaagtaagatgatctcatgtcttatcgtaaataatttgaatgaggcctgtttgtttctgtgaacgggtgttttatgatgggcattgttgcttgcctgtaagcaggggaaaagatatgtaactttgtattcatgtagcctgtacccactatggtcactacgtactgggatagcttaaggctaagttcttaacacagtttataaccatgc

SEQ ID NO: 62326 - DNA, 738 bp, Zea Mays
caaccaataatttactatgctaaatggctaggagataaaaagagagtgtttggcatgacactgctacccctttcaagcaagtgctgcaagagtttgaggactggcttggaaatcacaacctgtggaaaaaggagcaagtggaaactgggatttgaagacaaaggtccctgagcagtgcaaggtttcaaaaataaatttacctacctattttatggaatggattaacttgaaggatatctacctcaacttctataacagaagggcaactggaatgatgacaatgatgagagaacttcaactgccaattgttggaaaccaccatctcgggatagacgattcaaaaaatatcgcaagagtggttcagcgcatgcttgctgatggtgctgtgattcaaatcactgctaagagacagtcagctactggcgatgtgagatttcttttcaaggaccgaattaggtgattgaaaagtgacacccccaattcatagtggtgctgatattagttgcctgaaaggcatttcaggattttggagcaaagatagagcgactgaacgctcaatcaacatacaaatatgtctagaaattgtgatgctttaaccaaacaagatcaaattactgtccccaagctcatcttagagtttcaactaaatcacaaattaaaggaaccgtgatatgtgaattagttaacgtaaaatctaccaaggtctctaatttttttttaccatattttgaaatctac

SEQ ID NO: 62327 - DNA, 859 bp, Zea Mays
atcgactttctcagctgcagtgaattgcagtcacatgatccaattagcctctactatgtgcatacatctcttttctccactacagcacaaccaataatttactatgctaaatggctaggagataaaaagagagtgtttggcatgacactgctacccctttcaagcaagtgctgcaagagtttgaggactggcttggaaatcacaacctgtggaaaaaggagcaaggtggatcactcaaccgtggagcatttgttacttgtggaaactgggatttgaagacaaaggtccctgagcagtgcaaggtttcaaaaataaatttacctacctattttatggaatggattaacttgaaggatatctacctcaacttctataacagaagggcaactggaatgatgacaatgatgagagaacttcaactgccaattgttggaaaccaccatctcgggatagacgattcaaaaaatatcgcaagagtggttcagcgcatgcttgctgatggtgctgtgattcaaatcactgctaagagacagtcagctactggcgatgtgagatttcttttcaaggaccgaattaggtgattgaaaagtgacacccccaattcatagtggtgctgatattagttgcctgaaaggcatttcaggattttggagcaaagatagagcgactgaacgctcaatcaacatacaaatatgtctagaaattgtgatgctttaaccaaacaagatcaaattactgtccccaagctcatcttagagtttcaactaaatcacaaattaaaggaaccgtgatatgtgaattagttaacgtaaaatctaccaaggtctctaatttttttttaccatattttgaaatctac

SEQ ID NO: 62328 - DNA, 1138 bp, Zea Mays
tcgccagctctcaaactagcccgtggtgataaattcgccgacgcggatggagaggggagaaaacgtcgccagttcggctgtcgaaccggaactgaagcaacatttgttctgtggaaattgggatggctctggctagggtttcaccgtcttccttagcgaaccttataccgcccctgctccaatccttcttccgccctttctcctcggactttcccatccgcaattcccgccgaagaagctcccccgttgctgccgccttctctcttacttcacaatctgcccacgctgcgagggaggggctggtcatggaggcgcccaggccgagctccaggtttgtgcgtccaactgcaatgagtgagcaaagaacaacagaatacatagaagggaaatatggaaaatttggggttgaccgtgtttggcatgacactgctacccctttcaagcaagtgctgcaagagtttgaggactggcttggaaatcacaacctgtggaaaaaggagcaaggtggatcactcaaccgtggagcatttgttacttgtggaaactgggatttgaagacaaaggtccctgagcagtgcaaggtttcaaaaataaatttacctacctattttatggaatggattaacttgaaggatatctacctcaacttctataacagaagggcaactggaatgatgacaatgatgagagaacttcaactgccaattgttggaaaccaccatctcgggatagacgattcaaaaaatatcgcaagagtggttcagcgcatgcttgctgatggtgctgtgattcaaatcactgctaagagacagtcagctactggcgatgtgagatttcttttcaaggaccgaattaggtgattgaaaagtgacacccccaattcatagtggtgctgatattagttgcctgaaaggcatttcaggattttggagcaaagatagagcgactgaacgctcaatcaacatacaaatatgtctagaaattgtgatgctttaaccaaacaagatcaaattactgtccccaagctcatcttagagtttcaactaaatcacaaattaaaggaaccgtgatatgtgaattagttaacgtaaaatctaccaaggtctctaatttttttttaccatattttgaaatctac

SEQ ID NO: 62329 - DNA, 1190 bp, Zea Mays
tcgccagctctcaaactagcccgtggtgataaattcgccgacgcggatggagaggggagaaaacgtcgccagttcggctgtcgaaccggaactgaagcaacatttgttctgtggaaattgggatggctctggctagggtttcaccgtcttccttagcgaaccttataccgcccctgctccaatccttcttccgccctttctcctcggactttcccatccgcaattcccgccgaagaagctcccccgttgctgccgccttctctcttacttcacaatctgcccacgctgcgagggaggggctggtcatggaggcgcccaggccgagctccaggtatccttggaagcccacgtgtttgtactacacccagggcaaatgcacaatggtttgtgcgtccaactgcaatgagtgagcaaagaacaacagaatacatagaagggaaatatggaaaatttggggttgaccgtgtttggcatgacactgctacccctttcaagcaagtgctgcaagagtttgaggactggcttggaaatcacaacctgtggaaaaaggagcaaggtggatcactcaaccgtggagcatttgttacttgtggaaactgggatttgaagacaaaggtccctgagcagtgcaaggtttcaaaaataaatttacctacctattttatggaatggattaacttgaaggatatctacctcaacttctataacagaagggcaactggaatgatgacaatgatgagagaacttcaactgccaattgttggaaaccaccatctcgggatagacgattcaaaaaatatcgcaagagtggttcagcgcatgcttgctgatggtgctgtgattcaaatcactgctaagagacagtcagctactggcgatgtgagatttcttttcaaggaccgaattaggtgattgaaaagtgacacccccaattcatagtggtgctgatattagttgcctgaaaggcatttcaggattttggagcaaagatagagcgactgaacgctcaatcaacatacaaatatgtctagaaattgtgatgctttaaccaaacaagatcaaattactgtccccaagctcatcttagagtttcaactaaatcacaaattaaaggaaccgtgatatgtgaattagttaacgtaaaatctaccaaggtctctaatttttttttaccatattttgaaatctac

SEQ ID NO: 62330 - DNA, 1156 bp, Zea Mays
tcgccagctctcaaactagcccgtggtgataaattcgccgacgcggatggagaggggagaaaacgtcgccagttcggctgtcgaaccggaactgaagcaacatttgttctgtggaaattgggatggctctggctagggtttcaccgtcttccttagcgaaccttataccgcccctgctccaatccttcttccgccctttctcctcggactttcccatccgcaattcccgccgaagaagctcccccgttgctgccgccttctctcttacttcacaatctgcccacgctgcgagggaggggctggtcatggaggcgcccaggccgagctccaggtatccttggaagcccacgtgtttgtactacacccagggcaaatgcacaatggtttgtgcgtccaactgcaatgagtgagcaaagaacaacagaatacatagaagggaaatatggaaaatttggggttgaccgtgtttggcatgacactgctacccctttcaagcaagtgctgcaagagtttgaggactggcttggaaatcacaacctgtggaaaaaggagcaagtggaaactgggatttgaagacaaaggtccctgagcagtgcaaggtttcaaaaataaatttacctacctattttatggaatggattaacttgaaggatatctacctcaacttctataacagaagggcaactggaatgatgacaatgatgagagaacttcaactgccaattgttggaaaccaccatctcgggatagacgattcaaaaaatatcgcaagagtggttcagcgcatgcttgctgatggtgctgtgattcaaatcactgctaagagacagtcagctactggcgatgtgagatttcttttcaaggaccgaattaggtgattgaaaagtgacacccccaattcatagtggtgctgatattagttgcctgaaaggcatttcaggattttggagcaaagatagagcgactgaacgctcaatcaacatacaaatatgtctagaaattgtgatgctttaaccaaacaagatcaaattactgtccccaagctcatcttagagtttcaactaaatcacaaattaaaggaaccgtgatatgtgaattagttaacgtaaaatctaccaaggtctctaatttttttttaccatattttgaaatctac

SEQ ID NO: 62331 - DNA, 834 bp, Zea Mays
ggcggctgtagctgataggacctaaacctaaaccaaatttgataccatgttggaaactgaacccataaccctaaccagggatggggagtagtattaatagacttcgtaactgggccaggcccattacagtgaggggtgagacggtaattatatggggagcaccccaaaccctagaatcctagacgggtagtctaacagtctatgtgcgtgtccttgttgtattcggtctcatatatagagtacttgttagatgtctatgtatgtgtccttgttgtatttggacttatgtatagagtccttgtcgcgatctctggatttgtgtatatatttagacctagtgccctcatattgaatacaatgcaattcagaacatgttcacgattgtatgtagcttaatatatatttattcatcaagagtcagtaaacaataagcctttctgaagagattgactgcccactatgtttcaacatttgaaaattttatgctgaaagactttttcagcaacaggacttcggcgtaaagcattggcagaacttcattgaggcgaaaggaccatagtcctcactaatttttcatatttctttgtaaatttatacttaatcatgcttaaatattgataatgtagccattttagcactggtggcctattctaacgtctatgtgaagcttcacaactggtgtaaggatagatatataaaaaacatctggagtgaagtaaggaatgcaagcgcaggatccagtaaaatatatcaatcagtacatgataattgatagcatatagatgatagcataccggactatgaacaggcatggactgcggagtgacctttaac

SEQ ID NO: 62332 - DNA, 449 bp, Zea Mays
tatccacacacattcaagggcaaggtagaagtaaagtagtcatagttcttaaggcggtaaggcgagacaaggcgttgggcccccgcctggacgcctaggggatgcctaggcgcttactaaggcgacgccttaccaattaaagaaaaagggagaaagaaaaaaaaagaaggaatgggtagaagagatggcccagcccactagcatcgctactcgtccacatcacagcatcgctgctcctgctcccccaagctcggcgctcccccgagtctcagcgtcgccgctcccccgagttctgcaccgccgctccctcgagctcgtcactcccccgagttctgcgccgccgatcccgctccccaaagtctctgctaggcttcttccccctcccctcttgcctctcttgttgactcttggataggcgacggggacgcctagactttttggccgcctgg

SEQ ID NO: 62333 - DNA, 4433 bp, Zea Mays
cgcctgctcactcccattttccattgacctcgcccctctcgtccgtctcctccctccctgtcccggagcttcgatttttcccttcgagaggagccacatgattcaccgtcggaaagaggcaaggcaacggaacccgagccgctccgcttgaggtgaggtggggtccccgtctgggtcgggggggcattaccttgccgcccccgcgcgaagggagattcccgccacctatagtcgtcctctcgtgggccattttctgccttggggagagcatagacgcagcgccgcgggaaagccgggcgccgcatggatcgagacatctggtgttcccgtctcaagagtcttggcgtagcggggcggaggaggaggacggggttccggagcgcagggccgcggcggcacgccgggatttcagaggcgccgcgctgttgagtgttgacgtcttctcgatcctgggaggagctgatttctctgctgagggcctggggtggctctcggttcagtccctctccctgtgcagtttatttgctttttttaggtagttgggggctacttgttggttgggagaggagctgaattattgcgagctgcattcttggagattcttgctgctcgaatctcagctgctcttcttcagagggaattgccaattgcgttctgcagtaagattgatttggacaaggttggagcgaattggctgctacggcggggagttccaaaaaaaacccgtgaggttttggccttgtcgacttcttggggcatctgggagtagctttggtgcagtgattcacttgagtctggaggaatggcgccgacgaagaggctggagaaacttaagctcagcacattgttgactttcatgcgttgtcacgggggctctagtgatgaccacttacggattgggacagtggggttctccagagtcgtgtacgtcaatgagcctgataggcttgaagaggagggattcagttacctgctgaatgaggtgtcgacgacaaagtacaatctggccaccttcctgcccaagtccctcttcgagcagttcaggagggtggccaatttctacttccttgtctctggtatccttgccttgactccacttgcaccatacacggcagtgagcgcgcttgcgccgctgtgtgtcgtgattgtagccaccatggcaaaagaaggggttgaggactggcggaggaaacaacaggatcacgagcttaacaatcggatagtcaaagtgcatagggggaatggtcattttgaagagtcaaaatggaagaatatcaaagttggagatgtaataaaggtggagaaggataatttcttccccgctgatatgattctgctttcatctaactatccggatggaatctgttatgtagagaccatgaacctcgatggtgaaacaaatttgaaaattaaacaagctctcaaggtgacattggatttacatgaggacataaagttcagggaagtcagacaaacaataaaatgcgaagacccaaatgcgaacctctactcctttgtcggttcaatggaatggagaggccagcagtatcccctgtcatccctacagcttcttcttcgagactcaaaactacggaacactgactacatatatggggctgtcatcttcacaggccatgatacaaaagtgatgcaaaatgcaactgatccaccatctaaaagaagtaaggttgagaagaaaatggatcaaattatttatcttctaatgtcttctctactcatgattgcattacttggttctgtcttctttgggatctggaccaaagaggacctaagagatggtgagctcaaacggtggtatcttcggccagatgctactaccatattctatgatccaaagagagcagctctggcatctttctttcatttgttgacgtccttgatgctgtacagctacttcatacccatttctttgtatatatccatcgagatggtcaagatcttgcaagctctattcatcaaccaggatattcgaatgtatcatgaagaatcagataagccaactcatgctcgtacttcaaatctaaatgaagaactgggtatggttgatacaattctatcggataagactggaacattgacgtgcaacatgatggagttcatcaagtgttcaattgctggaactgcctatggtcaaggcgtcactgaagttgagagagctatggctatgaggaaaggtgctaggttagatgatgacattgaaaatggagaccacaaagacaaaaaaaatgacaacagtccccatgttaaagggttcaatttcaaggatcaacgaataatggatgggaaatgggttcatgagcctaacagagttatgataagagattttttccggctcctagccatctgccacacatgcattgctgaaatagatgaaaatgagaaggtttcatatgaagctgagtcccctgatgaagctgcatttgttattgcagcaagagaactagggtttgagttttacaagaggtcgctagcaactataattgttcgtgaacggaatccaagtcagaatgttgttgagaaaagaaagtatgaactcctaaatatgttggagttcagtagctcaaggagtcggatgtctgtgatagtgaaggaaccagagggaagaatattacttctcagcaagggtgcagacaggttgctgatagcattgaacgggacttgattcttcttggtgctaccgcagttgaagataaacttcaacaaggggtgcctgaatgcatagacaagcttgcacaagccggaattaagatgtgggtcctgacaggcgataagctggagacagctatcaatattgggtttgcttgtagccttcttagacaaggcatgacacagataatcgtcacactggaacaacctgatatcatcgcattggagaaaaatggtgacaaaccaaaaattgctaaggcatcaaagcaacgggttatgggtcagatagaggatggaatcaaacaaattccaccttcaactcaaattagcactgcatcattcgcgctaatcattgatggtaaatcactaacttatgctttggaagatgatgttaagtttaagttcttggatcttgctctcaagtgtgcatcagtgatatgttgccgatcttcaccaaaacagaaggcactggttacaagacttgttaaagaagtaacacataaagtgactttagcaataggtgatggggcaaatgatgttggcatgcttcaagaagctgacataggggttggcatcagtggtgctgaaggaatgcaggctgtcatggctagtgatgttgctgttgcccaattccgcttcttggaacggctacttctggtgcatggacattggtgttaccggcgtatttcactgatgtatccacagctataccaagaaggagtgcaaaatatattattcagttggcgtcggatacttggctggatgtttaatggtgttatgaatgctgtcttaatctttttcttctgcatcactgccttcgaggaccaggcattccgtcgcgacggtcaagttgcgggcttggatgctcttggtgtcgtcatgtacacttgtattgtatgggttgttaactgtcaaatggcgctctctgtgaactacttcaccataatccagcacatattcatatggggcagcattgcagtatggtacctcttcctcttggtttatggtgccataaacccgaggttctcaactacagcctacatggtcttcatcgaacagctggccccagccctctcattttggctggtgacactttttgttgtggtggcaacacttgtcccctactttagctatgccgccatccagatccgctttttcccgatgttccacaacaagattcagtggaaacggtacttggggaaggctgaagatccagaggtggcaaggcagttgtcatcaaaacaccgcacatcattgcagcacaggatggttggtatctctgctcgtcgtgacggcaaggctgtgcaaataacaaaggagacagagctacaagttcaggagtagcattgtcagtagattttgcgttttgtacagcttataggatcttgtctccagcaagatgacagctgaactgattgggacttgagatgttcctggattgctgcttctgtgatgcctgtcatgggagttgttccagttcagatgatagagcaagaccacagattgcttagataggtcgcaaggaggccaagagaatacctgctgcaaagttcaatttttagcagttcaaggattttgtgggttttttccctgcttctcttacacatgtaaatgcttgtaaccagattggtagaatttctcctttttaccccccttgcctgccctcgactgtttcaaacaataatggtaagacttctgatttgtgtgacttcatgcttttattatttggaaagaatcataaatgggtgtcttacaatctaaagttg

SEQ ID NO: 62334 - DNA, 4826 bp, Zea Mays
cgcctgctcactcccattttccattgacctcgcccctctcgtccgtctcctccctccctgtcccggagcttcgatttttcccttcgagaggagccacatgattcaccgtcggaaagaggcaaggcaacggaacccgagccgctccgcttgaggtgaggtggggtccccgtctgggtcgggggggcattaccttgccgcccccgcgcgaagggagattcccgccacctatagtcgtcctctcgtgggccattttctgccttggggagagcatagacgcagcgccgcgggaaagccgggcgccgcatggatcgagacatctggtgttcccgtctcaagagtcttggcgtagcggggcggaggaggaggacggggttccggagcgcagggccgcggcggcacgccgggatttcagaggcgccgcgctgttgagtgttgacgtcttctcgatcctgggaggagctgatttctctgctgagggcctggggtggctctcggttcagtccctctccctgtgcagtttatttgctttttttaggtagttgggggctacttgttggttgggagaggagctgaattattgcgagctgcattcttggagattcttgctgctcgaatctcagctgctcttcttcagagggaattgccaattgcgttctgcagtaagattgatttggacaaggttggagcgaattggctgctacggcggggagttccaaaaaaaacccgtgaggttttggccttgtcgacttcttggggcatctgggagtagctttggtgcagtgattcacttgagtctggaggaatggcgccgacgaagaggctggagaaacttaagctcagcacattgttgactttcatgcgttgtcacgggggctctagtgatgaccacttacggattgggacagtggggttctccagagtcgtgtacgtcaatgagcctgataggcttgaagaggagggattcagttacctgctgaatgaggtgtcgacgacaaagtacaatctggccaccttcctgcccaagtccctcttcgagcagttcaggagggtggccaatttctacttccttgtctctggtatccttgccttgactccacttgcaccatacacggcagtgagcgcgcttgcgccgctgtgtgtcgtgattgtagccaccatggcaaaagaaggggttgaggactggcggaggaaacaacaggatcacgagcttaacaatcggatagtcaaagtgcatagggggaatggtcattttgaagagtcaaaatggaagaatatcaaagttggagatgtaataaaggtggagaaggataatttcttccccgctgatatgattctgctttcatctaactatccggatggaatctgttatgtagagaccatgaacctcgatggtgaaacaaatttgaaaattaaacaagctctcaaggtgacattggatttacatgaggacataaagttcagggaagtcagacaaacaataaaatgcgaagacccaaatgcgaacctctactcctttgtcggttcaatggaatggagaggccagcagtatcccctgtcatccctacagcttcttcttcgagactcaaaactacggaacactgactacatatatggggctgtcatcttcacaggccatgatacaaaagtgatgcaaaatgcaactgatccaccatctaaaagaagtaaggttgagaagaaaatggatcaaattatttatcttctaatgtcttctctactcatgattgcattacttggttctgtcttctttgggatctggaccaaagaggacctaagagatggtgagctcaaacggtggtatcttcggccagatgctactaccatattctatgatccaaagagagcagctctggcatctttctttcatttgttgacgtccttgatgctgtacagctacttcatacccatttctttgtatatatccatcgagatggtcaagatcttgcaagctctattcatcaaccaggatattcgaatgtatcatgaagaatcagataagccaactcatgctcgtacttcaaatctaaatgaagaactgggtatggttgatacaattctatcggataagactggaacattgacgtgcaacatgatggagttcatcaagtgttcaattgctggaactgcctatggtcaaggcgtcactgaagttgagagagctatggctatgaggaaaggtgctaggttagatgatgacattgaaaatggagaccacaaagacaaaaaaaatgacaacagtccccatgttaaagggttcaatttcaaggatcaacgaataatggatgggaaatgggttcatgagcctaacagagttatgataagagattttttccggctcctagccatctgccacacatgcattgctgaaatagatgaaaatgagaaggtttcatatgaagctgagtcccctgatgaagctgcatttgttattgcagcaagagaactagggtttgagttttacaagaggtcgctagcaactataattgttcgtgaacggaatccaagtcagaatgttgttgagaaaagtatgaactcctaaatatgttggagttcagtagctcaaggagtcggatgtctgtgatagtgaaggaaccagagggaagaatattacttctcagcaagggtgcagacagtgtgatgttcaaaaggcttgcaccaattggaagaaaatttgaagaagaaacaagaagtcacataaatcagtattctgactctggtctaagaacctttgttctggcataccgtgtcttagatgagaaagagtacaaggaattcaatgaaaaattgaacgctgccaaagcatctgtaagtgctgataaagatgaaaaaattgagcaggttgctgatagcattgaacgggacttgattcttcttggtgctaccgcagttgaagataaacttcaacaaggggtgcctgaatgcatagacaagcttgcacaagccggaattaagatgtgggtcctgacaggcgataagctggagacagctatcaatattgggtttgcttgtagccttcttagacaaggcatgacacagataatcgtcacactggaacaacctgatatcatcgcattggagaaaaatggtgacaaaccaaaaattgctaaggcatcaaagcaacgggttatgggtcagatagaggatggaatcaaacaaattccaccttcaactcaaattagcactgcatcattcgcgctaatcattgatggtaaatcactaacttatgctttggaagatgatgttaagtttaagttcttggatcttgctctcaagtgtgcatcagtgatatgttgccgatcttcaccaaaacagaaggcactggttacaagacttgttaaagaagtaacacataaagtgactttagcaataggtgatggggcaaatgatgttggcatgcttcaagaagctgacataggggttggcatcagtggtgctgaaggaatgcaggctgtcatggctagtgatgttgctgttgcccaattccgcttcttggaacggctacttctggtgcatggacattggtgttaccggcgtatttcactgatgatatgctatttcttctacaagaatgttacttttggtgtaactatctttctgtacgaagcatttgcatctttctccgggaagccagcttataatgattggttcttgtcactatataatgttttcttcacctcccttcctgtcattgctctgggggtatttgaccaggatgtgtctgctaggctgtgcatacagtatccacagctataccaagaaggagtgcaaaatatattattcagttggcgtcggatacttggctggatgtttaatggtgttatgaatgctgtcttaatctttttcttctgcatcactgccttcgaggaccaggcattccgtcgcgacggtcaagttgcgggcttggatgctcttggtgtcgtcatgtacacttgtattgtatgggttgttaactgtcaaatggcgctctctgtgaactacttcaccataatccagcacatattcatatggggcagcattgcagtatggtacctcttcctcttggtttatggtgccataaacccgaggttctcaactacagcctacatggtcttcatcgaacagctggccccagccctctcattttggctggtgacactttttgttgtggtggcaacacttgtcccctactttagctatgccgccatccagatccgctttttcccgatgttccacaacaagattcagtggaaacggtacttggggaaggctgaagatccagaggtggcaaggcagttgtcatcaaaacaccgcacatcattgcagcacaggatggttggtatctctgctcgtcgtgacggcaaggctgtgcaaataacaaaggagacagagctacaagttcaggagtagcattgtcagtagattttgcgttttgtacagcttataggatcttgtctccagcaagatgacagctgaactgattgggacttgagatgttcctggattgctgcttctgtgatgcctgtcatgggagttgttccagttcagatgatagagcaagaccacagattgcttagataggtcgcaaggaggccaagagaatacctgctgcaaagttcaatttttagcagttcaaggattttgtgggttttttccctgcttctcttacacatgtaaatgcttgtaaccagattggtagaatttctcctttttaccccccttgcctgccctcgactgtttcaaacaataatggtaagacttctgatttgtgtgacttcatgcttttattatttggaaagaatcataaatgggtgtcttacaatctaaagttg

SEQ ID NO: 62335 - DNA, 4648 bp, Zea Mays
ttgcgttgctccgccccgcgcggcgcctgctcactcccattttccattgacctcgcccctctcgtccgtctcctccctccctgtcccggagcttcgatttttcccttcgagaggagccacatgattcaccgtcggaaagaggcaaggcaacggaacccgagccgctccgcttgaggtgaggtggggtccccgtctgggtcgggggggcattaccttgccgcccccgcgcgaagggagattcccgccacctatagtcgtcctctcgtgggccattttctgccttggggagagcatagacgcagcgccgcgggaaagccgggcgccgcatggatcgagacatctggtgttcccgtctcaagagtcttggcgtagcggggcggaggaggaggacggggttccggagcgcagggccgcggcggcacgccgggatttcagaggcgccgcgctgttgagtgttgacgtcttctcgatcctgggaggagctgatttctctgctgagggcctggggtggctctcggttcagtccctctccctgtgcagtttatttgctttttttaggtagttgggggctacttgttggttgggagaggagctgaattattgcgagctgcattcttggagattcttgctgctcgaatctcagctgctcttcttcagagggaattgccaattgcgttctgcagtaagattgatttggacaaggttggagcgaattggctgctacggcggggagttccaaaaaaaacccgtgaggttttggccttgtcgacttcttggggcatctgggagtagctttggtgcagtgattcacttgagtctggaggaatggcgccgacgaagaggctggagaaacttaagctcagcacattgttgactttcatgcgttgtcacgggggctctagtgatgaccacttacggattgggacagtggggttctccagagtcgtgtacgtcaatgagcctgataggcttgaagaggagggattcagttacctgctgaatgaggtgtcgacgacaaagtacaatctggccaccttcctgcccaagtccctcttcgagcagttcaggagggtggccaatttctacttccttgtctctggtatccttgccttgactccacttgcaccatacacggcagtgagcgcgcttgcgccgctgtgtgtcgtgattgtagccaccatggcaaaagaaggggttgaggactggcggaggaaacaacaggatcacgagcttaacaatcggatagtcaaagtgcatagggggaatggtcattttgaagagtcaaaatggaagaatatcaaagttggagatgtaataaaggtggagaaggataatttcttccccgctgatatgattctgctttcatctaactatccggatggaatctgttatgtagagaccatgaacctcgatggtgaaacaaatttgaaaattaaacaagctctcaaggtgacattggatttacatgaggacataaagttcagggaagtcagacaaacaataaaatgcgaagacccaaatgcgaacctctactcctttgtcggttcaatggaatggagaggccagcagtatcccctgtcatccctacagcttcttcttcgagactcaaaactacggaacactgactacatatatggggctgtcatcttcacaggccatgatacaaaagtgatgcaaaatgcaactgatccaccatctaaaagaagtaaggttgagaagaaaatggatcaaattatttatcttctaatgtcttctctactcatgattgcattacttggttctgtcttctttgggatctggaccaaagaggacctaagagatggtgagctcaaacggtggtatcttcggccagatgctactaccatattctatgatccaaagagagcagctctggcatctttctttcatttgttgacgtccttgatgctgtacagctacttcatacccatttctttgtatatatccatcgagatggtcaagatcttgcaagctctattcatcaaccaggatattcgaatgtatcatgaagaatcagataagccaactcatgctcgtacttcaaatctaaatgaagaactgggtatggttgatacaattctatcggataagactggaacattgacgtgcaacatgatggagttcatcaagtgttcaattgctggaactgcctatggtcaaggcgtcactgaagttgagagagctatggctatgaggaaaggtgctaggttagatgatgacattgaaaatggagaccacaaagacaaaaaaaatgacaacagtccccatgttaaagggttcaatttcaaggatcaacgaataatggatgggaaatgggttcatgagcctaacagagttatgataagagattttttccggctcctagccatctgccacacatgcattgctgaaatagatgaaaatgagaaggtttcatatgaagctgagtcccctgatgaagctgcatttgttattgcagcaagagaactagggtttgagttttacaagaggtcgctagcaactataattgttcgtgaacggaatccaagtcagaatgttgttgagaaaagaaagtatgaactcctaaatatgttggagttcagtagctcaaggagtcggatgtctgtgatagtgaaggaaccagagggaagaatattacttctcagcaagggtgcagacaggttgctgatagcattgaacgggacttgattcttcttggtgctaccgcagttgaagataaacttcaacaaggggtgcctgaatgcatagacaagcttgcacaagccggaattaagatgtgggtcctgacaggcgataagctggagacagctatcaatattgggtttgcttgtagccttcttagacaaggcatgacacagataatcgtcacactggaacaacctgatatcatcgcattggagaaaaatggtgacaaaccaaaaattgctaaggcatcaaagcaacgggttatgggtcagatagaggatggaatcaaacaaattccaccttcaactcaaattagcactgcatcattcgcgctaatcattgatggtaaatcactaacttatgctttggaagatgatgttaagtttaagttcttggatcttgctctcaagtgtgcatcagtgatatgttgccgatcttcaccaaaacagaaggcactggttacaagacttgttaaagaagtaacacataaagtgactttagcaataggtgatggggcaaatgatgttggcatgcttcaagaagctgacataggggttggcatcagtggtgctgaaggaatgcaggctgtcatggctagtgatgttgctgttgcccaattccgcttcttggaacggctacttctggtgcatggacattggtgttaccggcgtatttcactgatgatatgctatttcttctacaagaatgttacttttggtgtaactatctttctgtacgaagcatttgcatctttctccgggaagccagcttataatgattggttcttgtcactatataatgttttcttcacctcccttcctgtcattgctctgggggtatttgaccaggatgtgtctgctaggctgtgcatacagtatccacagctataccaagaaggagtgcaaaatatattattcagttggcgtcggatacttggctggatgtttaatggtgttatgaatgctgtcttaatctttttcttctgcatcactgccttcgaggaccaggcattccgtcgcgacggtcaagttgcgggcttggatgctcttggtgtcgtcatgtacacttgtattgtatgggttgttaactgtcaaatggcgctctctgtgaactacttcaccataatccagcacatattcatatggggcagcattgcagtatggtacctcttcctcttggtttatggtgccataaacccgaggttctcaactacagcctacatggtcttcatcgaacagctggccccagccctctcattttggctggtgacactttttgttgtggtggcaacacttgtcccctactttagctatgccgccatccagatccgctttttcccgatgttccacaacaagattcagtggaaacggtacttggggaaggctgaagatccagaggtggcaaggcagttgtcatcaaaacaccgcacatcattgcagcacaggatggttggtatctctgctcgtcgtgacggcaaggctgtgcaaataacaaaggagacagagctacaagttcaggagtagcattgtcagtagattttgcgttttgtacagcttataggatcttgtctccagcaagatgacagctgaactgattgggacttgagatgttcctggattgctgcttctgtgatgcctgtcatgggagttgttccagttcagatgatagagcaagaccacagattgcttagataggtcgcaaggaggccaagagaatacctgctgcaaagttcaatttttagcagttcaaggattttgtgggttttttccctgcttctcttacacatgtaaatgcttgtaaccagattggtagaatttctcctttttaccccccttgcctgccctcgactgtttcaaacaataatggtaagacttctgatttgtgtgacttcatgcttttattatttggaaagaatcataaatgggtgtcttacaatctaaagttg

SEQ ID NO: 62336 - DNA, 3786 bp, Zea Mays
cgcctgctcactcccattttccattgacctcgcccctctcgtccgtctcctccctccctgtcccggagcttcgatttttcccttcgagaggagccacatgattcaccgtcggaaagaggcaaggcaacggaacccgagccgctccgcttgaggtgaggtggggtccccgtctgggtcgggggggcattaccttgccgcccccgcgcgaagggagattcccgccacctatagtcgtcctctcgtgggccattttctgccttggggagagcatagacgcagcgccgcgggaaagccgggcgccgcatggatcgagacatctggtgttcccgtctcaagagtcttggcgtagcggggcggaggaggaggacggggttccggagcgcagggccgcggcggcacgccgggatttcagaggcgccgcgctgttgagtgttgacgtcttctcgatcctgggaggagctgatttctctgctgagggcctggggtggctctcggttcagtccctctccctgtgcagtttatttgctttttttaggtagttgggggctacttgttggttgggagaggagctgaattattgcgagctgcattcttggagattcttgctgctcgaatctcagctgctcttcttcagagggaattgccaattgcgttctgcagtaagattgatttggacaaggttggagcgaattggctgctacggcggggagttccaaaaaaaacccgtgaggttttggccttgtcgacttcttggggcatctgggagtagctttggtgcagtgattcacttgagtctggaggaatggcgccgacgaagaggctggagaaacttaagctcagcacattgttgactttcatgcgttgtcacgggggctctagtgatgaccacttacggattgggacagtggggttctccagagtcgtgtacgtcaatgagcctgataggcttgaagaggagggattcagttacctgctgaatgaggtgtcgacgacaaagtacaatctggccaccttcctgcccaagtccctcttcgagcagttcaggagggtggccaatttctacttccttgtctctggtatccttgccttgactccacttgcaccatacacggcagtgagcgcgcttgcgccgctgtgtgtcgtgattgtagccaccatggcaaaagaaggggttgaggactggcggaggaaacaacaggatcacgagcttaacaatcggatagtcaaagtgcatagggggaatggtcattttgaagagtcaaaatggaagaatatcaaagttggagatgtaataaaggtggagaaggataatttcttccccgctgatatgattctgctttcatctaactatccggatggaatctgttatgtagagaccatgaacctcgatggtgaaacaaatttgaaaattaaacaagctctcaaggtgacattggatttacatgaggacataaagttcagggaagtcagacaaacaataaaatgcgaagacccaaatgcgaacctctactcctttgtcggttcaatggaatggagaggccagcagtatcccctgtcatccctacagcttcttcttcgagactcaaaactacggaacactgactacatatatggggctgtcatcttcacaggccatgatacaaaagtgatgcaaaatgcaactgatccaccatctaaaagaagtaaggttgagaagaaaatggatcaaattatttatcttctaatgtcttctctactcatgattgcattacttggttctgtcttctttgggatctggaccaaagaggacctaagagatggtgagctcaaacggtggtatcttcggccagatgctactaccatattctatgatccaaagagagcagctctggcatctttctttcatttgttgacgtccttgatgctgtacagctacttcatacccatttctttgtatatatccatcgagatggtcaagatcttgcaagctctattcatcaaccaggatattcgaatgtatcatgaagaatcagataagccaactcatgctcgtacttcaaatctaaatgaagaactgggtatggttgatacaattctatcggataagactggaacattgacgtgcaacatgatggagttcatcaagtgttcaattgctggaactgcctatggtcaaggcgtcactgaagttgagagagctatggctatgaggaaaggtgctaggttagatgatgacattgaaaatggagaccacaaagacaaaaaaaatgacaacagtccccatgttaaagggttcaatttcaaggatcaacgaataatggatgggaaatgggttcatgagcctaacagagttatgataagagattttttccggctcctagccatctgccacacatgcattgctgaaatagatgaaaatgagaaggtttcatatgaagctgagtcccctgatgaagctgcatttgttattgcagcaagagaactagggtttgagttttacaagaggtcgctagcaactataattgttcgtgaacggaatccaagtcagaatgttgttgagaaaagaaagtatgaactcctaaatatgttggagttcagtagctcaaggagtcggatgtctgtgatagtgaaggaaccagagggaagaatattacttctcagcaagggtgcagacagtgtgatgttcaaaaggcttgcaccaattggaagaaaatttgaagaagaaacaagaagtcacataaatcagtattctgactctggtctaagaacctttgttctggcataccgtgtcttagatgagaaagagtacaaggaattcaatgaaaaattgaacgctgccaaagcatctgtaagtgctgataaagatgaaaaaattgagcaggttgctgatagcattgaacgggacttgattcttcttggtgctaccgcagttgaagataaacttcaacaaggggtgcctgaatgcatagacaagcttgcacaagccggaattaagatgtgggtcctgacaggcgataagctggagacagctatcaatattgggtttgcttgtagccttcttagacaaggcatgacacagataatcgtcacactggaacaacctgatatcatcgcattggagaaaaatggtgacaaaccaaaaattgctaaggcatcaaagcaacgggttatgggtcagatagaggatggaatcaaacaaattccaccttcaactcaaattagcactgcatcattcgcgctaatcattgatggtaaatcactaacttatgctttggaagatgatgttaagtttaagttcttggatcttgctctcaagtgtgcatcagtgatatgttgccgatcttcaccaaaacagaaggcactggttacaagacttgttaaagaagtaacacataaagtgactttagcaataggtgatggggcaaatgatgttggcatgcttcaagaagctgacataggggttggcatcagtggtgctgaaggaatgcaggctgtcatggctagtgatgttgctgttgcccaattccgcttcttggaacggctacttctggtgcatggacattggtgttaccggcgtatttcactgatgatatgctatttcttctacaagaatgttacttttggtgtaactatctttctgtacgaagcatttgcatctttctccgggaagccagcttataatgattggttcttgtcactatataatgttttcttcacctcccttcctgtcattgctctgggggtatttgaccaggatgtgtctgctaggctgtgcatacagaagctacataattgtgtcttttctct

SEQ ID NO: 62337 - DNA, 2590 bp, Zea Mays
tcacaacctttgatgatcgtaacaaggtcaagagctcttccaatgggcgaccccctcgccgccctccttcgcagcggcggcaatcctcactccgtacacggcgtggccatcaagcttggctgcattgtctccacctttctttgcaacaatcttctatatgcctacctgaggcgccaggtccccgcggacgcccgcaggctgttcgatgaaatgccccgccgcaacctggtgtcctggtccgtcgtcatatccggctccgcccaccatggcgtcctcgcggaagcgttcgcgttgttctcccacatgcttcacggcgcggggcacggaagctgggaccgcccggactcgttcacgctaggggccttggtcgccgggtgctcccgtgccagagatgtcgacgctggcatgcaggtgcacgcttgcgtggccaagttcggcgtcgacgaggatgatagcgtcgcggcggcgttggtggacatgtatgccaaatgcggttgggtggactcatcgtggcgggccttcacgctcgcaccacagcggagcgtcctaagctggacgagcatgattgcctgtctggtcaaccaaggtgtttgatacgcccgatttgctatccgttggaatgcaacttcatggctgcttgctgaagatgggaacggaggttgacactgctttggggactgccttgatgacgatgtatggcaggtgtggtggagttgatgagatacctaggttggcttgtcgtataaggcatgatgcgctttcgaggactgccctgcttggcgcttatgcacgtactggatacaatgcagaggcaattggtgttttcaaggagatgatcatgaaaaatatggcaattgaccagtcagctatgactggtatgctgcaggtttgttcatcctttggacaactgagaatggttcggcaggtacattgttatgctttaaaaaccttcttcaagttggataccttactattgaatgccaccatcactgtttatggcagatgtggtgatatcaatagtgctgaaactgtattttatctaatggaggaaaatgacatcatatcatggacggcattgttaacttgctacactcagaatggtcttgatgaagaggtactcttattctttaggaaaatgctccggaaagggttgggatctccagtattttgcatcactagtgtgctacgagccagttctagcatctcaaatcttgctgttgggttgcaaatccattcgaggactctgaagctaggtattgatgatgataattctgtacagaatgcactcgtaaccttgtatgctaattgtggaagtgttcaggttgcattgaagatatttaactcaatgagtaatagagacatcgtcacatggaatgcattactcacaagtttttcacagcatggcagtgaggtggcagccattcagctttttgatctgatgcaagaagaggggatctgcccagatgcttacacttttgttggcctgctatcatcttgcagcagaatgggccttgtaaaagaaggctgtgagtacttcaatgaaatgaaggaaaaatacaacttggaacccaagatggttcattatacctgcatggttgatctacttgctcgtgctggaagattttgtgatgcaatggacttcattgatgcaatgccttatgaaccagatcaaatattgtgggaagctttgctagcttcatgtaaggttcacggaaatttggggttaggaagaatagcagctaagaagattctggaaattacaccacatgattattctgcatacattatattatcaagcattcatgcttcagttgacatgtgggatgagaaatactggaatcgcactgtattcgacacccagcgtgcaagaaaggatactggaaggagttggattgatgcacaagaattatcagagaatatattcgatgcattacaaattggagtgacgtaatgttagttgataatgcttctatttcaaaacactaggggtgtgttactctccatggttgcagtgaagtgtagtggtctcaatcataaaacatcgacaagcggaacaaaagatgtccatggatgcaagcaaaccatggtctcagtgtcaagcatcgaatagaactgacccatgtcagatcatcaccgaagaacatatatgatatggtgcatagggcagatttttatcttttctatggtgtgggacacagttgcaacctttcagtgattatctttctttaaatttgtgatgctttacgatgctgccaatgttgtaagctgtacagagggtgctgcagttagaaagtatattggtattttctctattgtcagccaaagtttacagtgatgatggaaatacagagatatctcggtttaagttttttatgttcacctgctgtgggagcttagtatgacagtccaactctttatcagtatgctttgtgattcctaaattaactataattttctatgtttgggaccagatattcgtgcatactgttttgcacgtcaaatgacatggtagagacatggcataaatgagtgagagtgctgaaattgaggtcattctgtaatgccaatatgaccctttaccaggattctg

SEQ ID NO: 62338 - DNA, 104 bp, Zea Mays
gggcagtggcagagctctataaaattaacgccccgggccactctataaaatttgaaggttactttaaacagcccctaatatattgtgcggctaaatataccgct

SEQ ID NO: 62339 - DNA, 1315 bp, Zea Mays
ctcccgtctcgtcccaactcccccacacaataggctggcagtggcaggcaaccagctcgggcgtgtccttcctcctccgtctccatcttggcccaaccgagcccaaacctctccccttttctccgtcctctcctagtccacacggcagacgccgccgccgggggagaggaggggaggggatcggctccaagggaacaggcgagatggcaatcctgtacgcgctggtggcgcgcggcacggtggtgctggcggagcacagcgcggcagccaccaacgcgggcgccatcgcgcgccaggtcctcgagcgcctccccgacggcggcgccgacagccacgtctcctacacgcaggaccgctacgtcttccacgccaagcgcaccgacggcatcaccgcgctctgcatggccgacgacgccgccggaagacggattcccttcgcatttttggaggatattcatggaaggtttgtcaagacatatggccgggctgcgctaaccgctcttgcatatgcaatgaatgatgaattctcaagggtcttgagccagcaaatggattactattcaaatgaccctagtgcagatagaataaaccgcatgagaggtgaaatcaatcaggtccgtagtgttatgattgataacattgataaggttcttgaaagaggtgatcgtttggaactgctggttgacaagactgcaaatatgcaaggaaatacagttcgattcaagagacaagctcggcggttcagaaacactgtttggtggagaaatgtcaaactcacggccgcattgatacttctcctcctggtaataatatatgtcgttctagtcttcgtgtgccatggtttcaccctaccaacttgcataagttcacatgatgcaaaaaggattggattgaggctttgaggatgcaacgcctcaaataagacctaaaagatgcctagaagatcaataaatgtcaaacacacgtctaagactcaagaccaaaagaagcccaaggaaatagtgaagaaatccaagaagtggggagtcagccagcgctctagtggcgcaccagactgtccggtgtgaggccaccggactgtctagtgtgcacggatagcctacgcagagagccctgcaagtggactctcgggagctatatgtcacacccgggtttcggggcaccaagacccgggcgcgaacataatcaccaggtgtgctgggaccaagtctcacacatatgatgaatcatggcacaggatcgaatgtcacatcttaactatataattggagttctgtacaaaataaataattactttataaggagacaaaggtcc

SEQ ID NO: 62340 - DNA, 1665 bp, Zea Mays
ctttgtggtaccactaccacataacaaaaatgattcactgttatttgcaacaattaaattcgaatgctgtgtcagaaatgcaacccatgttttttcccaaggaaattatgtgatctactgctgtacttcatttccttgagaactaaggatcttgatactgttgctttgcttgatcatctaccatcattgcagcaactccttttccgtcttcttgcttgccagccacaaggagcgtcgtcttacaatgttataatccagcatgcactctcaatggttgctttagagagtattaagatctacactgcgattagtgatggaacaatcaatctagttgacaagttcttcgagatgcaaagaaatgatgctgttagggcacttgatgtatacaaaagagcaactaaccaggctgaacgactttcagagttttatgaagtgtgcaaaactatacacattgggcgtggtgagaaattcctgaaaatcgagcagcctccagcatcattcctgaataccatggaggagtatgttagagatgctccaacaggtcaaaaagagaaggctatactagcgatagaatacaaaaaagagccagaggaggaagaaaaaccgtcctcacctcctgcggctccagaaccagaaccggaacaagtgcctgagccagaacccgagccagtgaaagaggaagcaccagaagctgaaccagatttgctgggtctgaacgaacccaaccctgctgcaactgcgatagaagagcagaatgctttggcgctagccattgttccgatagatgatgctccgaaagctgctcccacttttggaaatggagtcactggctgggaactggcccttgtgacagcaccaagttcaaatgagaccgccgttgccccaagcaagaaactggccggtggtctggacttgctgacccttgacagcctgtacgacgaggcgaaccggagagcgagccagccagcaagctacaacccctgggaggcgacccccgccgcgcctgccccgatgatgaccatggcgccggtgatgcacgacccgttctacgcctcgaacgggtacgctgcgccgcacggcgtgcagatggcggcgatggcgcagcagcagcaggccttcatgctgcagcagcagcagatgatgacgatggccccggcgcagccggtggtccaccacccgatgcagatgcagcagaaccccgcgaacccgttcggcaaccccttcgcggccgccggcatgccgctccacgccgggcccggcaacgtgtacacggggctgatctgatccggtccggcggtccatttcttggtctgcattagcgctgctgttaccacatcattcattcttttttgcccgagttttcttgttgccattgtgagaaggaaatttgtagcacagacacagacacaggtagagtgtattatagcgtcggtcggagtgtatagcaagcagggggtcgtcatcagtggtatcccgtacgtagaaggtgattgcatgtatattatacacacagagtttggtcacctgttcatgtgcagttgagagtccattcttgcggcgaggagacgcggcacggcgccacgtcgagattgagattggattattcttaacattggatacggttgaataatgcagcagccattctttttagcacatgacactgtt

SEQ ID NO: 62341 - DNA, 2458 bp, Zea Mays
ccgcgagccgggaaagcgaccgcccctcctcttctcctccctttctctcgtctcgtcggctcctagctcctcctcctcgctcgccaagggagacgcacccggtccattcgtcctctcctcctatcgcctccccctctcctccccggagatccccgctaccgaaggattatcccgtgcagaggtgaaacgcttatctactactgtctgccccgtgccccgccgacgctgaggcccgacctcagttccaaaatccgtactcggctcggcgtgcctgtccttcggaggattggagtccactgtgctggcggctggcctcgtgcgtcgcttcctggttcgtggctgcgtgtgattgggactggatccaggcagcgagcctctcgtggatttggcccactagtatatcagcttggagttgaggagaatggctgttggtgggactcaaccagtccttaggaagtacctaggcgccctcaaggacacgacgactgtgagcttggcaaaagtgaacagtgattataaggaattggacattgcaatcgtcaaggccacaaaccatgttgagcgcccatcgaaggagaagtacataagagaaattttccattccatttctgctgctaggccacgggcagatgtagcctattgcattcatgcccttgctagacgtctttcgaagacgcgcaactgggcggttgcgctcaagacattgattgtcattcatcgcgcccttcgggaagttgatcccacttttcgtgaagagcttattagttatggcagatctaggtcccatatgttgaacatggcctactttaaggatgactctagtgcagaagcttgggattattctgcatgggtgcgcatttatgctttatatttagaggagaggctcgaatgtttccgagtgttgaagtatgatgtagaaacagatcctccgagaactaaggatcttgatactgttgctttgcttgatcatctaccatcattgcagcaactccttttccgtcttcttgcttgccagccacaaggagcgtcgtcttacaatgttataatccagcatgcactctcaatggttgctttagagagtattaagatctacactgcgattagtgatggaacaatcaatctagttgacaagttcttcgagatgcaaagaaatgatgctgttagggcacttgatgtatacaaaagagcaactaaccaggctgaacgactttcagagttttatgaagtgtgcaaaactatacacattgggcgtggtgagaaattcctgaaaatcgagcagcctccagcatcattcctgaataccatggaggagtatgttagagatgctccaacaggtcaaaaagagaaggctatactagcgatagaatacaaaaaagagccagaggaggaagaaaaaccgtcctcacctcctgcggctccagaaccagaaccggaacaagtgcctgagccagaacccgagccagtgaaagaggaagcaccagaagctgaaccagatttgctgggtctgaacgaacccaaccctgctgcaactgcgatagaagagcagaatgctttggcgctagccattgttccgatagatgatgctccgaaagctgctcccacttttggaaatggagtcactggctgggaactggcccttgtgacagcaccaagttcaaatgagaccgccgttgccccaagcaagaaactggccggtggtctggacttgctgacccttgacagcctgtacgacgaggcgaaccggagagcgagccagccagcaagctacaacccctgggaggcgacccccgccgcgcctgccccgatgatgaccatggcgccggtgatgcacgacccgttctacgcctcgaacgggtacgctgcgccgcacggcgtgcagatggcggcgatggcgcagcagcagcaggccttcatgctgcagcagcagcagatgatgacgatggccccggcgcagccggtggtccaccacccgatgcagatgcagcagaaccccgcgaacccgttcggcaaccccttcgcggccgccggcatgccgctccacgccgggcccggcaacgtgtacacggggctgatctgatccggtccggcggtccatttcttggtctgcattagcgctgctgttaccacatcattcattcttttttgcccgagttttcttgttgccattgtgagaaggaaatttgtagcacagacacagacacaggtagagtgtattatagcgtcggtcggagtgtatagcaagcagggggtcgtcatcagtggtatcccgtacgtagaaggtgattgcatgtatattatacacacagagtttggtcacctgttcatgtgcagttgagagtccattcttgcggcgaggagacgcggcacggcgccacgtcgagattgagattggattattcttaacattggatacggttgaataatgcagcagccattctttttagcacatgacactgtt

SEQ ID NO: 62342 - DNA, 2201 bp, Zea Mays
cgcctccgggttggccgcgagccgggaaagcgaccgcccctcctcttctcctccctttctctcgtctcgtcggctcctagctcctcctcctcgctcgccaagggagacgcacccggtccattcgtcctctcctcctatcgcctccccctctcctccccggagatccccgctaccgaaggattatcccgtgcagaggcccactagtatatcagcttggagttgaggagaatggctgttggtgggactcaaccagtccttaggaagtacctaggcgccctcaaggacacgacgactgtgagcttggcaaaagtgaacagtgattataaggaattggacattgcaatcgtcaaggccacaaaccatgttgagcgcccatcgaaggagaagtacataagagaaattttccattccatttctgctgctaggccacgggcagatgtagcctattgcattcatgcccttgctagacgtctttcgaagacgcgcaactgggcggttgcgctcaagacattgattgtcattcatcgcgcccttcgggaagttgatcccacttttcgtgaagagcttattagttatggcagatctaggtcccatatgttgaacatggcctactttaaggatgactctagtgcagaagcttgggattattctgcatgggtgcgcatttatgctttatatttagaggagaggctcgaatgtttccgagtgttgaagtatgatgtagaaacagatcctccgcaactccttttccgtcttcttgcttgccagccacaaggagcgtcgtcttacaatgttataatccagcatgcactctcaatgagagtattaagatctacactgcgattagtgatggaacaatcaatctagttgacaagttcttcgagatgcaaagaaatgatgctgttagggcacttgatgtatacaaaagagcaactaaccaggctgaacgactttcagagttttatgaagtgtgcaaaactatacacattgggcgtggtgagaaattcctgaaaatcgagcagcctccagcatcattcctgaataccatggaggagtatgttagagatgctccaacaggtcaaaaagagaaggctatactagcgatagaatacaaaaaagagccagaggaggaagaaaaaccgtcctcacctcctgcggctccagaaccagaaccggaacaagtgcctgagccagaacccgagccagtgaaagaggaagcaccagaagctgaaccagatttgctgggtctgaacgaacccaaccctgctgcaactgcgatagaagagcagaatgctttggcgctagccattgttccgatagatgatgctccgaaagctgctcccacttttggaaatggagtcactggctgggaactggcccttgtgacagcaccaagttcaaatgagaccgccgttgccccaagcaagaaactggccggtggtctggacttgctgacccttgacagcctgtacgacgaggcgaaccggagagcgagccagccagcaagctacaacccctgggaggcgacccccgccgcgcctgccccgatgatgaccatggcgccggtgatgcacgacccgttctacgcctcgaacgggtacgctgcgccgcacggcgtgcagatggcggcgatggcgcagcagcagcaggccttcatgctgcagcagcagcagatgatgacgatggccccggcgcagccggtggtccaccacccgatgcagatgcagcagaaccccgcgaacccgttcggcaaccccttcgcggccgccggcatgccgctccacgccgggcccggcaacgtgtacacggggctgatctgatccggtccggcggtccatttcttggtctgcattagcgctgctgttaccacatcattcattcttttttgcccgagttttcttgttgccattgtgagaaggaaatttgtagcacagacacagacacaggtagagtgtattatagcgtcggtcggagtgtatagcaagcagggggtcgtcatcagtggtatcccgtacgtagaaggtgattgcatgtatattatacacacagagtttggtcacctgttcatgtgcagttgagagtccattcttgcggcgaggagacgcggcacggcgccacgtcgagattgagattggattattcttaacattggatacggttgaataatgcagcagccattctttttagcacatgacactgtt

SEQ ID NO: 62343 - DNA, 2170 bp, Zea Mays
gttcgcctccgggttggccgcgagccgggaaagcgaccgcccctcctcttctcctccctttctctcgtctcgtcggctcctagctcctcctcctcgctcgccaagggagacgcacccggtccattcgtcctctcctcctatcgcctccccctctcctccccggagatccccgctaccgaaggattatcccgtgcagaggcccactagtatatcagcttggagttgaggagaatggctgttggtgggactcaaccagtccttaggaagtacctaggcgccctcaaggacacgacgactgtgagcttggcaaaagtgaacagtgattataaggaattggacattgcaatcgtcaaggccacaaaccatgttgagcgcccatcgaaggagaagtacataagaggttgcgctcaagacattgattgtcattcatcgcgcccttcgggaagttgatcccacttttcgtgaagagcttattagttatggcagatctaggtcccatatgttgaacatggcctactttaaggatgactctagtgcagaagcttgggattattctgcatgggtgcgcatttatgctttatatttagaggagaggctcgaatgtttccgagtgttgaagtatgatgtagaaacagatcctccgagaactaaggatcttgatactgttgctttgcttgatcatctaccatcattgcagcaactccttttccgtcttcttgcttgccagccacaaggagcgtcgtcttacaatgttataatccagcatgcactctcaatggttgctttagagagtattaagatctacactgcgattagtgatggaacaatcaatctagttgacaagttcttcgagatgcaaagaaatgatgctgttagggcacttgatgtatacaaaagagcaactaaccaggctgaacgactttcagagttttatgaagtgtgcaaaactatacacattgggcgtggtgagaaattcctgaaaatcgagcagcctccagcatcattcctgaataccatggaggagtatgttagagatgctccaacaggtcaaaaagagaaggctatactagcgatagaatacaaaaaagagccagaggaggaagaaaaaccgtcctcacctcctgcggctccagaaccagaaccggaacaagtgcctgagccagaacccgagccagtgaaagaggaagcaccagaagctgaaccagatttgctgggtctgaacgaacccaaccctgctgcaactgcgatagaagagcagaatgctttggcgctagccattgttccgatagatgatgctccgaaagctgctcccacttttggaaatggagtcactggctgggaactggcccttgtgacagcaccaagttcaaatgagaccgccgttgccccaagcaagaaactggccggtggtctggacttgctgacccttgacagcctgtacgacgaggcgaaccggagagcgagccagccagcaagctacaacccctgggaggcgacccccgccgcgcctgccccgatgatgaccatggcgccggtgatgcacgacccgttctacgcctcgaacgggtacgctgcgccgcacggcgtgcagatggcggcgatggcgcagcagcagcaggccttcatgctgcagcagcagcagatgatgacgatggccccggcgcagccggtggtccaccacccgatgcagatgcagcagaaccccgcgaacccgttcggcaaccccttcgcggccgccggcatgccgctccacgccgggcccggcaacgtgtacacggggctgatctgatccggtccggcggtccatttcttggtctgcattagcgctgctgttaccacatcattcattcttttttgcccgagttttcttgttgccattgtgagaaggaaatttgtagcacagacacagacacaggtagagtgtattatagcgtcggtcggagtgtatagcaagcagggggtcgtcatcagtggtatcccgtacgtagaaggtgattgcatgtatattatacacacagagtttggtcacctgttcatgtgcagttgagagtccattcttgcggcgaggagacgcggcacggcgccacgtcgagattgagattggattattcttaacattggatacggttgaataatgcagcagccattctttttagcacatgacactgtt

SEQ ID NO: 62344 - DNA, 2431 bp, Zea Mays
cgccaataattcattaacctacgtggacgccactggctactgattactgctactaatctaccagtagtatactagtaactagctaaagcaagctgttcgtgcagtgcagcgttgtttgattgggtactgctgccgcgtcgctgtccgctgccaccgggcggtagttcgcctccgggttggccgcgagccgggaaagcgaccgcccctcctcttctcctccctttctctcgtctcgtcggctcctagctcctcctcctcgctcgccaagggagacgcacccggtccattcgtcctctcctcctatcgcctccccctctcctccccggagatccccgctaccgaaggattatcccgtgcagaggcccactagtatatcagcttggagttgaggagaatggctgttggtgggactcaaccagtccttaggaagtacctaggcgccctcaaggacacgacgactgtgagcttggcaaaagtgaacagtgattataaggaattggacattgcaatcgtcaaggccacaaaccatgttgagcgcccatcgaaggagaagtacataagagaaattttccattccatttctgctgctaggccacgggcagatgtagcctattgcattcatgcccttgctagacgtctttcgaagacgcgcaactgggcggttgcgctcaagacattgattgtcattcatcgcgcccttcgggaagttgatcccacttttcgtgaagagcttattagttatggcagatctaggtcccatatgttgaacatggcctactttaaggatgactctagtgcagaagcttgggattattctgcatgggtgcgcatttatgctttatatttagaggagaggctcgaatgtttccgagtgttgaagtatgatgtagaaacagatcctccgagaactaaggatcttgatactgttgctttgcttgatcatctaccatcattgcagcaactccttttccgtcttcttgcttgccagccacaaggagcgtcgtcttacaatgttataatccagcatgcactctcaatggttgctttagagagtattaagatctacactgcgattagtgatggaacaatcaatctagttgacaagttcttcgagatgcaaagaaatgatgctgttagggcacttgatgtatacaaaagagcaactaaccaggctgaacgactttcagagttttatgaagtgtgcaaaactatacacattgggcgtggtgagaaattcctgaaaatcgagcagcctccagcatcattcctgaataccatggaggagtatgttagagatgctccaacaggtcaaaaagagaaggctatactagcgatagaatacaaaaaagagccagaggaggaagaaaaaccgtcctcacctcctgcggctccagaaccagaaccggaacaagtgcctgagccagaacccgagccagtgaaagaggaagcaccagaagctgaaccagatttgctgggtctgaacgaacccaaccctgctgcaactgcgatagaagagcagaatgctttggcgctagccattgttccgatagatgatgctccgaaagctgctcccacttttggaaatggagtcactggctgggaactggcccttgtgacagcaccaagttcaaatgagaccgccgttgccccaagcaagaaactggccggtggtctggacttgctgacccttgacagcctgtacgacgaggcgaaccggagagcgagccagccagcaagctacaacccctgggaggcgacccccgccgcgcctgccccgatgatgaccatggcgccggtgatgcacgacccgttctacgcctcgaacgggtacgctgcgccgcacggcgtgcagatggcggcgatggcgcagcagcagcaggccttcatgctgcagcagcagcagatgatgacgatggccccggcgcagccggtggtccaccacccgatgcagatgcagcagaaccccgcgaacccgttcggcaaccccttcgcggccgccggcatgccgctccacgccgggcccggcaacgtgtacacggggctgatctgatccggtccggcggtccatttcttggtctgcattagcgctgctgttaccacatcattcattcttttttgcccgagttttcttgttgccattgtgagaaggaaatttgtagcacagacacagacacaggtagagtgtattatagcgtcggtcggagtgtatagcaagcagggggtcgtcatcagtggtatcccgtacgtagaaggtgattgcatgtatattatacacacagagtttggtcacctgttcatgtgcagttgagagtccattcttgcggcgaggagacgcggcacggcgccacgtcgagattgagattggattattcttaacattggatacggttgaataatgcagcagccattctttttagcacatgacactgtt

SEQ ID NO: 62345 - DNA, 1230 bp, Zea Mays
taaagtggaataatgccagttcaagatggttaatttggcaaccaggatctcaatacaggcatatgtagtctgcaactgcgaacaagacttagttgcaaaaaaaccaaatatgacaaacaaaattactagtaacatagaaaaatctgttggtatgctcagaactagtaggacacagatgtcgaatccagttgcctattaacttagatgatgccaattttgttggccacatcaagggcatcgtagtcgggtgtcagtttcacataagccttcttctgatcagggtgttgaccttctttgcttgaatgtcatacatcttcttgaccgcagccttgatctttttcttgtctgccttgaggtcaacaataaagaccagagtgttgttatcttcaatcttcttcattgcagattctgtggtgagggggtacttgagaatttggtactgatcaagcttgtttcttccagtagtgctgattcttgggtacttcgggtccctggccttcttcagggtcttgggctggtgaaatgttacagatgtgcgaatcttcttggtcttcttcttgcctgccccagacttcacagccttggccaccttcaaggcctgggccttggcatcacccttcttggcaggagcggctaatcaaacaacaaaatagtcaggtcatgcatacttacagtaagcctatcaaatcaaatagttcatgaagtttagcatggtgattactggttatgcccaacaatatacagcctaccaataaattgatatgattgcattagagatcctagcagtattcatgagacaatatggtaattagagtcagccaattatatactctcccttttgggacgactcccatgggtcaaggaacgagtgcaaaggacaggtagtggttatatcagagtgctaaaaatgtaccaattaccaattaatacctgatacaattcaacaatggcgacacacctgcaaaggaagtaggaactacctaacactgagcactcaatttacagcaatttaaaggctggcacagtgcatgtactgatcaagtgtggcaaacatagaaatagatatgcaacatcaggcatgtacctttaggagccatttgagcttctcaaaactccctcctgaattgcaagtagataaagaccattatgtcaggcggctttcgtctcctcgccggtctgtagcggacgtgaagcgatgacggctgggaggaaaccctagccccggggcag

SEQ ID NO: 62346 - DNA, 1210 bp, Zea Mays
taaagtggaataatgccagttcaagatggttaatttggcaaccaggatctcaatacaggcatatgtagtctgcaactgcgaacaagacttagttgcaaaaaaaccaaatatgacaaacaaaattactagtaacatagaaaaatctgttggtatgctcagaactagtaggacacagatgtcgaatccagttgcctattaacttagatgatgccaattttgttggccacatcaagggcatcgtagtcgggtgtcagtttcacataagccttcttcttcccatcaggcatcttcttgaccgcagccttgatctttttcttgtctgccttgaggtcaacaataaagaccagagtgttgttatcttcaatcttcttcattgcagattctgtggtgagggggtacttgagaatttggtactgatcaagcttgtttcttccagtagtgctgattcttgggtacttcgggtccctggccttcttcagggtcttgggctggtgaaatgttacagatgtgcgaatcttcttggtcttcttcttgcctgccccagacttcacagccttggccaccttcaaggcctgggccttggcatcacccttcttggcaggagcggctaatcaaacaacaaaatagtcaggtcatgcatacttacagtaagcctatcaaatcaaatagttcatgaagtttagcatggtgattactggttatgcccaacaatatacagcctaccaataaattgatatgattgcattagagatcctagcagtattcatgagacaatatggtaattagagtcagccaattatatactctcccttttgggacgactcccatgggtcaaggaacgagtgcaaaggacaggtagtggttatatcagagtgctaaaaatgtaccaattaccaattaatacctgatacaattcaacaatggcgacacacctgcaaaggaagtaggaactacctaacactgagcactcaatttacagcaatttaaaggctggcacagtgcatgtactgatcaagtgtggcaaacatagaaatagatatgcaacatcaggcatgtacctttaggagccatttgagcttctcaaaactccctcctgaattgcaagtagataaagaccattatgtcaggcggatgaagctttcgtctcctcgccggtctgtagcggacgtgaagcgatgacggctgggaggaaaccctagccccggggcag

SEQ ID NO: 62347 - DNA, 1937 bp, Zea Mays
ttggcaacagcgtcctcctcccgcgtgctctccactcccagaccccggggactacaagggcactgggctaggtccgttggcaacagccgccacactgctccgctctgctctctggaggcattgcctgcctcgagttgtcatggcggcagcggggacgcagctgggtcggctccttgttggcggcctctggctcctggccgcgttgctgcagcggggcgctgcggcggcagtggccgccgtggatgggcggcgcgccatcgcagcgactggggagaacttcgtgtgcgcgacattggactggtggccgccggacaagtgcgactatggcacctgcccctggggccgcgccggcctgctcaacctggatctctccaacaaggtcctcctcaacgccgtcagaggacaaggtggtgtacggcaccgcggacctcgggcggccgtgcgcgccgttcgccaagaacgcgtcggagatgcacggcttcacgcagggctgcctgaccctgcgcaggtgggacgagctcaacgccttcttccagaaatctggtgccaggatcgtgttcgggatcaacgcgctaaatggccgtgttccgttgccggatggatccatgggagggccatgggattacaccaatgcggcgtcactgattcggtacaccgcaaacaagggctaccgaatccatggatgggagcttggtaatgaactcagtggcactggagtcggagctcgagttggtgcggaacaatacggtgcagatgtgatcgccctaaaaacactagtcgacgacatatacgcaagccatccatcgaaaccattggtgcttgctcctggaggattctttgaccaagcctggtttgcccaacttattgtcaggaccaggccgaatctactggatgtgatcactcaccacatttacaatttagggccaggaagggacacacatctgattgacaagatcctcaatccatcagtcctcgacgggatgagaagcacattcagcagtcttcaggggctactgaaatccgcaggaacttcgactgtcgcatgggttggcgaagctggaggcgcttacaacagcggccggcacctagtcactgatgcatttgtgttcagcttctggtttttagatcagcttgggatgtcagcaaagtatgacacgaagagctactgcagacagagtttgattggtggcaactacggcctgctaaataccacaacgttccaaccaaaccctgactattacagtgctttactgtggcatcgcctcatgggaaccaaagttctagcaacaacgttcagcggcacgaacaagatccgcgcatacgcacactgcgcaagagattcagtctcggtgagtgtgacgacccaaggggccgtggcggcgcacaagcatggcgcaaggaagcacgtcggcggcaggaagttccggcacgtccacgtccccagcttcgacgaggccgccggcggcgtgagagacgagtaccatctcacccccaaggacggcaacctgaggagccagatcatgctgctgaacggcagggcgttggccaccgacacagcggggaacatccccgcactggaggcggtgaagatggatgcggcacaacccatcgctgtggcgccctactccatcgtgttcgctcgcatttcacatttcaatgcaccggcatgtagttagagtagttagtgggtacagatcataatggcaagggagagtttgttttccttttactccttagaattatgtaaggttgaagaaattatgatgatcaacgatgggaaggggaaaaacttagagttgtaaaaggttgaaagaaattatgatggtcaacgatgggaagagggaaagttagaaatgacagtggaaactcaatcctcgattcaccaaactcgattcaccaagggcaatttaatccgcgtggtaattgaaaatgagaaa

SEQ ID NO: 62348 - DNA, 1988 bp, Zea Mays
ttggcaacagcgtcctcctcccgcgtgctctccactcccagaccccggggactacaagggcactgggctaggtccgttggcaacagccgccacactgctccgctctgctctctggaggcattgcctgcctcgagttgtcatggcggcagcggggacgcagctgggtcggctccttgttggcggcctctggctcctggccgcgttgctgcagcggggcgctgcggcggcagtggccgccgtggatgggcggcgcgccatcgcagcgactggggagaacttcgtgtgcgcgacattggactggtggccgccggacaagtgcgactatggcacctgcccctggggccgcgccggcctgctcaacctggatctctccaacaaggtcctcctcaacgccgtcagaggacaaggtggtgtacggcaccgcggacctcgggcggccgtgcgcgccgttcgccaagaacgcgtcggagatgcacggcttcacgcagggctgcctgaccctgcgcaggtgggacgagctcaacgccttcttccagaaatctggtgccaggatcgtgttcgggatcaacgcgctaaatggccgtgttccgttgccggatggatccatgggagggccatgggattacaccaatgcggcgtcactgattcggtacaccgcaaacaagggctaccgaatccatggatgggagcttggtaatgaactcagtggcactggagtcggagctcgagttggtgcggaacaatacggtgcagatgtgatcgccctaaaaacactagtcgacgacatatacgcaagccatccatcgaaaccattggtgcttgctcctggaggattctttgaccaagcctggtttgcccaacttattgtcaggaccaggccgaatctactggatgtgatcactcaccacatttacaatttagggccaggaagggacacacatctgattgacaagatcctcaatccatcagtcctcgacgggatgagaagcacattcagcagtcttcaggggctactgaaatccgcaggaacttcgactgtcgcatgggttggcgaagctggaggcgcttacaacagcggccggcacctagtcactgatgcatttgtgttcagcttctggtttttagatcagcttgggatgtcagcaaagtatgacacgaagagctactgcagacagagtttgattggtggcaactacggcctgctaaataccacaacgttccaaccaaaccctgactattacagtgctttactgtggcatcgcctcatgggaaccaaagttctagcaacaacgttcagcggcacgaacaagatccgcgcatacgcacactgcgcaagagattcaccaggaatcactctactgctgatcaatctcagcggcaacaccacgacgcaggtctcggtgagtgtgacgacccaaggggccgtggcggcgcacaagcatggcgcaaggaagcacgtcggcggcaggaagttccggcacgtccacgtccccagcttcgacgaggccgccggcggcgtgagagacgagtaccatctcacccccaaggacggcaacctgaggagccagatcatgctgctgaacggcagggcgttggccaccgacacagcggggaacatccccgcactggaggcggtgaagatggatgcggcacaacccatcgctgtggcgccctactccatcgtgttcgctcgcatttcacatttcaatgcaccggcatgtagttagagtagttagtgggtacagatcataatggcaagggagagtttgttttccttttactccttagaattatgtaaggttgaagaaattatgatgatcaacgatgggaaggggaaaaacttagagttgtaaaaggttgaaagaaattatgatggtcaacgatgggaagagggaaagttagaaatgacagtggaaactcaatcctcgattcaccaaactcgattcaccaagggcaatttaatccgcgtggtaattgaaaatgagaaa

SEQ ID NO: 62349 - DNA, 120 bp, Zea Mays
cagaggaagagggaggagaaaggcaacagcgagacagaacgggggctccaccacggcaccaccgaacgagctcacatcagtcgcccttgctttgcattcaagtctgcagcgtgcaacttt

SEQ ID NO: 62350 - DNA, 1848 bp, Zea Mays
cacgccgcactcacacatgcatccataaaccctcagcagagccttgtgtcgcgtcctctcctcgataacccaggccacatcgtccttccgcgccgcgccgccggcgacctaacaacccagaggcctcagcaccgcacgcttgcacgtacgtccaggcgcgctcgccgttacgcccacggggatccaggctttccttcgctgccgttgctggtcgagtgcgccacgccgaaaggtgatcgagctgacgagcgctagacgccaccggccggcgcggcgtggcaagtgcaggggcaggccggtgaggtctgggagaggaggaggaggaggaggaggaggaggaggagatggccggtagggagagcggcgggatggcggcggcgctgcgctgcgctggaaggatcgggatcctggccaccgtcgcagtgaacctcgcgtggatcgcgacgtacatccgccggcgctacttcggcggcgggaaccgatccgacaacaacggtggcggcggggaggtggagccgtcaagagggaagccgccggtcacttcggactccatcgtcaacctcgatcatggcgacccgactatgtacgaggagttctggcgcggcacaggagatagcgcctcgatcttcatccctggttggcaaacaatgagctacttctccgacctcggcggcatctgttggttcctggagcctggattcgagcgcgaggtgcggcgtctccacaggacaggctccactcagctctttcaggccgtgctgtacgcgctctcacctgcaagtgacggcacacccatgaacgtcgtctcaccggcaccgtactactcgtcttacccatctgtgaccaactatctaaactctgcgctctaccgttgggctggtgatgccaatacatttgatggcgacacatgtattgagctcgtctgctccccaaacaaccctgatggtggcctccggaagcctgtcatcaaatccaagtctagcaagcctgtttatgacttcgcctactactggccgcagtacacacccatcaccgaggcagctgcccatgacatcatgctgttcaccgtctccaaatgcaccggccatgccggcaccaggctggggtgggcattggtgaaggatactaaggtggctcagaagatgatcaagtttatagagctcaacacaatcggtgtatccaaggactctcaacttcgtgccgctaagattatcggggcaatatgtaatggctatgagccggtaccatcctctggtaaaacaagccaactcttccatttcgccaaggaaaaaatggcggctcgctgggctagacttcgtgcagctgtggcagcctcagacatctttactctcccttatgagctatctggctattgtagcttttccaatgagactgtcaccgccaatcctccatttgcatggcttcgctacaacaaggatgatattgaagatctggaggccttcctactcgagaaaaagattatcactcgaggtggcacaaggtttggagtggatgcaagggctgtcagagttagtatggttgacacagaccaagccttcaatgtgttcatcaatcgtctggccacaatgaagtgaaatttcagtgcaaattaataaagcactttgtggctactacaaggatgaccgcgttctagatggaacaatcgatgctttggaaagcttaataatgttttatgttgttgaataattccgtgtgttttcgggtatgttgtgtaatactcaatgtcaaatcctatgcttaatcgatgttgtggtccatcctgttatcagcatggccaattatatatggatgaccgtcactgctcagtctttactcctaattacatgg

SEQ ID NO: 62351 - DNA, 743 bp, Zea Mays
tgtttcaccattcacaataaaaaaatggcaacgacagttgaagtttcgacaactaccaattgacactcctagccctgcctcaaagttaccactgaagcttaagccctaaagcaccatctgaagtgctgaaccttgcacacacatctcatgcaccagaacagaactgcagcccccaatggagaacgcagatctacacgaatcacataacatccagcacgagcatacacataataatcaagaaaccgtggcaggaacacagtcagatctcacaccgaagttaaagccgagggagctcatgagcgccttgttgcagatgacaatggagacagaggacaccacggagaggctcagcgcccccaccgtccccagctggaacttctccccgccgacgcccatctccgcggccctccaaacgcagcaccaccagcaccgacagacaaaccaaggaatgccccgaaagatcacgaatttacaatcgagccgcagggatcacgctgtctcgcccatgagaagacgggtcgcgcccggtcagacccaccgctcctgcgtcagttggaaaatcagagccgcggtcggatctgggcgagtagggcgcgaatcctggcagggcggcggcaatggcgaggagatctggggaggagcgggcgggatcaaggcggtggcgctcgtgcccctccggtctcgcttagcttcgcttctttattatatggctggtcggtcggtcgccgtcggtgagaaagctg

SEQ ID NO: 62352 - DNA, 258 bp, Zea Mays
atgggagagcaggcgattcgagctgttgattgggaatctcaacgagctgctcacctgcagattggaattggatcgatggatggaccgcggacgcccgcacgccgattgaatctcctcctccttgggcggctgctaactgggttgggatgggacaggagccttcctcgccacagccgccgtgccgtgctgctcctcttctccgagacgctgggagccctgattggagacgtctggaagacgggaggcggagaggtatga

SEQ ID NO: 62353 - DNA, 926 bp, Zea Mays
tgtttgtcctccctactttttgtactagccaagactgtgagctgataagatcctgaaagtctctcatccaccacatcctctggttttctccgcaacatatcaactatggacttggatgtctttggttgtgctttattacttgccttgaattgcaagattgattgtctttttgtctgttgtactagaactgggcttaacctgcaccttggatgcttgagactccacaacagatgcatcattctccccatctgctactgtcacctccaccacttcatcagcttcttcatcttcatctagaaacattggtatttttcctcttgtttgcctccaaataacttgtcatctccttccttaatccactgctagcctcaaacataactttgcatctccatatgcctctgccaaatgttgatttaacctctttatccctccactaataacctgaccacatagggtgcattccaccttatctttgttttgaagatctgaccaaaatccatacttccaccctgaactagcagacttccgtggcttctggtttggatcgttcttcgggttactcaccagccacagaagatggagcttcatttagagaagacattgtgttgtcgctactcgctacacagtcttgacagaaacctgaaaactagggtactcgctgcacgatgtgcacagaaacctaaaaccagggtactcgttgcacgatgttcacagaaacctgaaaccaggggaagcatgggaggaggaacaccattcttgaatcttgatagaaacctgagagaaagcaaggaggaggacctaccagggaggacctgacgccgtgcagggaggggcatgcagggaactgccgcgcacacaaggaggaggaggagccacacgcataggagccgcgcgcgcacagggagcagctgccgcgcgtacagtta

SEQ ID NO: 62354 - DNA, 1072 bp, Zea Mays
aagtccaaaccaacccatccatctccattcatccgtcttgacagctccactcctaactccagcgaccaccgcgtccccaccatggccgctcgccggagcactagccccgcccggcacggcgtcctccccgccctccttctcatcctatgctcgtccctcccttccctcgccgccgcataccgcccaggcgacatcgtcccgatgctccgctcgggccagtaccacggcgtaatctaatcaacatcaaccattacccaaggcagcaagtatggagttatttcggttcgtttatgtctgatctgtgcgtttttttgggtggttttgcagtcgaggtcggtgtggttcgacgtggtggggcgccattgcccggccttcgcggtcaaccgggaggtgctgatgccgatcccaaagcctacggggttcactggtgctgatccgtacaagataagtactctggaaatgatatacttggggtgacagctaaagttgtggacatgcctcaccactacgtggaagttcatcctgacataaagaagaatttctgggatccacagaattggccaaaatacgttcttgttagatatacatgggaggagcaatcagagatagatgttactggaggattttatgtgttatttggatccgggcttgttttgtccttcattcttgcaatatatgtcctacagtcatctcaagagaagttgacaaggtttgtgcgagaagcagttgcagatagtagcctcccagatggagttgcaaaggtcgagtgatgacctgtctacgatgagctgtcttattacccactaatttctacactgatcagaacctcaagttttttaacagtcaactttcttagctgcggaacgagtaatacaacagagtagcatacatatgaagagctagtggtttatttgattctcttgtgcatgctcttaaaccaactttgcttatatggtggaagtgcataatttcatttccaggcaggagttttggtgcttgctatctcaactgtgagaatttgggactgaataggtttattgtttgcatggttttaaagacggctagggagaac

SEQ ID NO: 62355 - DNA, 1769 bp, Zea Mays
aagtccaaaccaacccatccatctccattcatccgtcttgacagctccactcctaactccagcgaccaccgcgtccccaccatggccgctcgccggagcactagccccgcccggcacggcgtcctccccgccctccttctcatcctatgctcgtccctcccttccctcgccgccgcataccgcccaggcgacatcgtcccgatgctccgctcgggccagtaccacggctcgaggtcggtgtggttcgacgtggtggggcgccattgcccggccttcgcggtcaaccgggaggtgctgatgccgatcccaaagcctacggggttcactggtgctgatccgtacaagatgtgagtaacatccctctagacatgtctaaattatgcattagtataatacaatacttaatgtgatcgtgtgaattcttcagttttatcagggctatttaggtgttgccaagttgactagtagtttctaaaaaatacaagattctagaactgttagatgtacaagtgctttttctctggatgagaaatgacgttcaaccttgttctttctctaagatagcatatctgtaaatgtgctgtgcctgtgagttaatcacataagtgtttaggtctttctacctcatgattattttgattatggaggatttaaatcctggaattaattagcaagacattactggatgatgtgataggaaggatttgcaatatataactataccttatgaaacatccatccaatgcaaaggcccataatggttatggctgtaactcccctggaattgcacattctagaacttgccatgttctagagaaaatctgtaatattcctctgagtatgatatgatgctcattttgaggcggacatgtattaaggattatattatgcactgcacttatcttcaaatggactgaatttgatcagcgaaataacaatgactgaatatgataatgttgcaccactttgtatgctttttactcaattattgtttttttatgaggctatctttgcagaagtatgtttgtcttacctttatgactctgcagaacatttcaaattggacatgaaaagttccatgttccttggctttatgttataaatcgcaaaacctctgaagttccactgatcgatttccatttgaagtactctggaaatgatatacttggggtgacagctaaagttgtggacatgcctcaccactacgtggaagttcatcctgacataaagaagaatttctgggatccacagaattggccaaaatacgttcttgttagatatacatgggaggagcaatcagagatagatgttactggaggattttatgtgttatttggatccgggcttgttttgtccttcattcttgcaatatatgtcctacagtcatctcaagagaagttgacaaggtttgtgcgagaagcagttgcagatagtagcctcccagatggagttgcaaaggtcgagtgatgacctgtctacgatgagctgtcttattacccactaatttctacactgatcagaacctcaagttttttaacagtcaactttcttagctgcggaacgagtaatacaacagagtagcatacatatgaagagctagtggtttatttgattctcttgtgcatgctcttaaaccaactttgcttatatggtggaagtgcataatttcatttccaggcaggagttttggtgcttgctatctcaactgtgagaatttgggactgaataggtttattgtttgcatggttttaaagacggctagggagaac

SEQ ID NO: 62356 - DNA, 1816 bp, Zea Mays
agagatagggctaacagaagagatggcgcctaacttgctgcagaacgatatggttatgcagtttggtctgctaggtctccacttcattgagcttgttcgttgcagacaaaatttgtccaggaaaaaatgtcatcgtttatgaagttaggtggtggttcacagaagctcttgattagcagatattgtcatgggctcatgacccactatgaagctattgctacccagaagactagaaatatatcatccccttctaaggtattcatttctaaaagtatgcttcagtagcaccgaccggtgaccgcttagcccatcacttaaacatgatttctgttgagatttcgaagccaactcattatatatagttagaacttgcgtgtgatcttaactaaaccacctcccttcagacttacgtgtgatcttagtctgtcaatatggcatgtatggtgaatcttacctactcattcttgtgaattctgctcaattcaaaggaaccacatgaaaatgaatcttttacggataataatcacagagctaatgctcgccaggttcaccatttcagagagggaatgctactgcctctacttctgatacagatgacgcttatgtacaacctgctactttgtctcggtcactaaagggtccatcagtttgtccggctttgcctcctgcgtgtaaccttgtcacagcctgacaagacaccactaagtgcagtgtggctccgcccctaagttaacatgttgctataaatgtttcctttttctctaaaaggataggaagtatctcatttgcccactatgttgggttcctgttcctctagcttagatttatcttcaggtaatgtttccatatccatatgcatttgtttcaactttcagctgcagagcatatgtagatatctaaacatggctaggaaatgtagatagattcacttgaactatgttatatcaacgagatggactacatagtaaaaactacatgttcatctgaatcattttctcatcattgcttaagtacttaccgatgcagcataagaagtaaaactatgcagaagctaccaatgttatctgaccacagtttaatccgtgtcctatcgaatatttgtcttttaagaaaaaaacacctcatcaacaatggctgcaagcgtaagatttattttggttaactttgcatgtgtcatatacatccccgtttacagtgaattcatatgtcaatttctttttgtggatgaaacatgacatagggaatatttatggagcttttatactcacattcttgtatttgatgtttgcatcctcgtgaaacctggagtttgaacacatggactgggagaggtggatccattggagcaggcacaggtggactgggagatacgaagcccacctctgggacaacagctgcaggaaggatgggcagactagaaaaggcaaacaagggtttgccatgactgaatgtgattggttgcatgctccacatagtatatctaggtggttacgacaccgaagacaagacaacgagggcttacgatctggctgctctaaaatactaggtccagctactcacgtcaatttccccgtagaaaactatcgagatgagctcgaggagatgaaaggcatgacaaggcaagaattcgttgcgcatctgagaaggagaagcagtggattttctcgaggcgcttccatctaccgaggggtgacgaggcaccaccagcaaggaagatggcagtctcggattggaagggtcgctggaaacaaggatctatacctcgacacttttagtaagaaagatcgttccatttggctgtagaagtagattttag

SEQ ID NO: 62357 - DNA, 2857 bp, Zea Mays
gagaaattgtgtgggctaagcgttacatatattagaattagagttacatgggtgctggaggggcgatcttgcaatgcagacgaataatagcaactatggggagcttacccgcaatatccgagaaaaccagcttggaggggtgatctttggttgcaaacacgatacgattgaagaatgcttcagaaaacagctattcggtctgccttcagtccattattcatatgttagaaatgtcaaacctggcatgcctttatttctattcaattatagtgacagaaagctccatggaattttcgaagctgcaagtcctggtgagatgtatattgattcatatgcttggagtaatgatggttgtttaaggtcagcttttcctgcacaggttcgtatttgcacaaagactcggtatccacctctgctggagagccaatttaaaacattgcttggtgacaactattacaaccatcaccacttctattttgagcttgaccatgcacagacaagagctttaatttctttgttcaaatcacttgctccgtctaatttcattcaagttccagctgtttcaagcaaaaggaatcttgcagttcctgacccaaagaaaatcacagcaaattctaaggaaatcaatccatttagtgttctatcaaatacagccgctccagttaactgggctgatgatgtggaaaatgctagtaactcggatgagaagaaatctggtggttcagtttctgattatgacaatttggatgacaattttcttcaaaatcaatttggtcctcattcaaatccagatgaggtcagtcaaacttcctcaggcaaaattgatggccaaggactggagcttattgaatgtaatcatccacttgtcaatactgtgaatggtaaaagaatcataactgatgaatcaatgcttttgaattcacacaatgagcataatggtgctgtggaagttgatgaagtggagattgaagttcacaataacccaggtggtggtgttgggctacagccagaaagacagactgtcctagaaaagctgaaaggattatctttcctacgacagcaggatgccataacttccaaggattgtactcattctggttcagatcaacgggtacctgatgaaacacagatcaatccaaacctttcctgtggcccatttgatgctacaatggaagataaaacctcttttgatgagtgcagccatggaaatgctgaggtgctgcaaatcatcactgatttacagaagaggactgaagcactggagaagaaactgattgggtcagacaaagaaatactttcattgagggaaatttttaaagactcaggaagaaaagtccagcaactggaatacattgtagatgagttacagttcaaacttgactcttccctggctcaccttggaaacatgtgcaatacactagccaccccatcaatattcctgattggtggttataatggcgtgacttggttatcatctcttgattccttttctcctgagaaagacgcggtcctaggtctcacaccaatgagttctccccgctcatatgcatctgctgctgtgttggatggacacatatttgcttttggcggtggcgatggcatgtcatggtataacacagtggaatgctatagctcaagaaataatgagtggacggaatgcccctccatgaaccagaagaaaggaagtcttgctgggatctgtcttaatgagaaaatatacgctattggtggaggagatggaaatgaattttattcagaagttgagatctttgacccctaccttgggaagtggatatgtagcccatctatgctaacctctcggtttgctcttgctgcgtccggactaaatggagtcatctatacatctggtggctatgatggaaacatgtacttgaaatcagcagaaaggtatgatccaagggagggcttctgggtccggcttccaagtatgagtactaggagaggatcccacaccttaactgtccttggagacaccctatatgctatgggagggtatgatggggacaaaatggtttctagcgttgagatctatgatcctagtcttaatgcttggaggataggtgatcccatgaacactccaagaggatatgccgctgctgtttatcttgatgatagcttattcctaattggtggcatgcagtccagtgtgcagatgttggatactgtggaagtttacaatgcaagttctggctggtcagtccttggttctagttctattgggatgaggtccttcgcatctgccgttgtcttgtaattggtagccagaagtttagaattcatatcatcaaaatttgtaacatagctgccattacaatttacatggaatggttagcacaaatcagggtaaacaacccttctgaagcattctggttaccaacagcgagataggataacatgctggttcgaaattttacttttgaatcttcattcgcgactaaccccacattgtgtggatgaacgattttctcggataattgtcaaactgatgtagaatccaaaagaacttttgtattcaattattgcttctgttttttctccttaagtaggcttgtatacatagcagtgcgtaaaacgttgagatgttggttgagcagactgataagctttcaggttagtataagatgcagcaaatgttgctgttaacttttttcagctgctctattgtcaactgggccacaggctgttagatgagatcatggagtcggcacatgtttctttgaattgcagcagatctcgtgtgaagcggctcgtggatctgtaaatatgtgtgattcatgatattttgttagatatcaactaaatatatgccaagaaacttgggatttgtcattctatt

SEQ ID NO: 62358 - DNA, 2912 bp, Zea Mays
aatttctgggtcttcatcgtgtattttatgattcgttgaggggttccctgatggttgatgcacgcctgcttggtggaggcgggaatggtgatcgatgattcgttgggtgctggaggggcgatcttgcaatgcagacgaataatagcaactatggggagcttacccgcaatatccgagaaaaccagcttggaggggtgatctttggttgcaaacacgatacgattgaagaatgcttcagaaaacagctattcggtctgccttcagtccattattcatatgttagaaatgtcaaacctggcatgcctttatttctattcaattatagtgacagaaagctccatggaattttcgaagctgcaagtcctggtgagatgtatattgattcatatgcttggagtaatgatggttgtttaaggtcagcttttcctgcacaggttcgtatttgcacaaagactcggtatccacctctgctggagagccaatttaaaacattgcttggtgacaactattacaaccatcaccacttctattttgagcttgaccatgcacagacaagagctttaatttctttgttcaaatcacttgctccgtctaatttcattcaagttccagctgtttcaagcaaaaggaatcttgcagttcctgacccaaagaaaatcacagcaaattctaaggaaatcaatccatttagtgttctatcaaatacagccgctccagttaactgggctgatgatgtggaaaatgctagtaactcggatgagaagaaatctggtggttcagtttctgattatgacaatttggatgacaattttcttcaaaatcaatttggtcctcattcaaatccagatgaggtcagtcaaacttcctcaggcaaaattgatggccaaggactggagcttattgaatgtaatcatccacttgtcaatactgtgaatggtaaaagaatcataactgatgaatcaatgcttttgaattcacacaatgagcataatggtgctgtggaagttgatgaagtggagattgaagttcacaataacccaggtggtggtgttgggctacagccagaaagacagactgtcctagaaaagctgaaaggattatctttcctacgacagcaggatgccataacttccaaggattgtactcattctggttcagatcaacgggtacctgatgaaacacagatcaatccaaacctttcctgtggcccatttgatgctacaatggaagataaaacctcttttgatgagtgcagccatggaaatgctgaggtgctgcaaatcatcactgatttacagaagaggactgaagcactggagaagaaactgattgggtcagacaaagaaatactttcattgagggaaatttttaaagactcaggaagaaaagtccagcaactggaatacattgtagatgagttacagttcaaacttgactcttccctggctcaccttggaaacatgtgcaatacactagccaccccatcaatattcctgattggtggttataatggcgtgacttggttatcatctcttgattccttttctcctgagaaagacgcggtcctaggtctcacaccaatgagttctccccgctcatatgcatctgctgctgtgttggatggacacatatttgcttttggcggtggcgatggcatgtcatggtataacacagtggaatgctatagctcaagaaataatgagtggacggaatgcccctccatgaaccagaagaaaggaagtcttgctgggatctgtcttaatgagaaaatatacgctattggtggaggagatggaaatgaattttattcagaagttgagatctttgacccctaccttgggaagtggatatgtagcccatctatgctaacctctcggtttgctcttgctgcgtccggactaaatggagtcatctatacatctggtggctatgatggaaacatgtacttgaaatcagcagaaaggtatgatccaagggagggcttctgggtccggcttccaagtatgagtactaggagaggatcccacaccttaactgtccttggagacaccctatatgctatgggagggtatgatggggacaaaatggtttctagcgttgagatctatgatcctagtcttaatgcttggaggataggtgatcccatgaacactccaagaggatatgccgctgctgtttatcttgatgatagcttattcctaattggtggcatgcagtccagtgtgcagatgttggatactgtggaagtttacaatgcaagttctggctggtcagtccttggttctagttctattgggatgaggtccttcgcatctgccgttgtcttgtaattggtagccagaagtttagaattcatatcatcaaaatttgtaacatagctgccattacaatttacatggaatggttagcacaaatcagggtaaacaacccttctgaagcattctggttaccaacagcgagataggataacatgctggttcgaaattttacttttgaatcttcattcgcgactaaccccacattgtgtggatgaacgattttctcggataattgtcaaactgatgtagaatccaaaagaacttttgtattcaattattgcttctgttttttctccttaagtaggcttgtatacatagcagtgcgtaaaacgttgagatgttggttgagcagactgataagctttcaggttagtataagatgcagcaaatgttgctgttaacttttttcagctgctctattgtcaactgggccacaggctgttagatgagatcatggagtcggcacatgtttctttgaattgcagcagatctcgtgtgaagcggctcgtggatctgtaaatatgtgtgattcatgatattttgttagatatcaactaaatatatgccaagaaacttgggatttgtcattctatt

SEQ ID NO: 62359 - DNA, 2838 bp, Zea Mays
cgggaggtgtgagtccacctcctgcccggttcgctgggatcaaccgcgggcgcgtttcccgctcctgtaggggttgcgttggggttttctcattccattttttgggtgctggaggggcgatcttgcaatgcagacgaataatagcaactatggggagcttacccgcaatatccgagaaaaccagcttggaggggtgatctttggttgcaaacacgatacgattgaagaatgcttcagaaaacagctattcgtgacagaaagctccatggaattttcgaagctgcaagtcctggtgagatgtatattgattcatatgcttggagtaatgatggttgtttaaggtcagcttttcctgcacaggttcgtatttgcacaaagactcggtatccacctctgctggagagccaatttaaaacattgcttggtgacaactattacaaccatcaccacttctattttgagcttgaccatgcacagacaagagctttaatttctttgttcaaatcacttgctccgtctaatttcattcaagttccagctgtttcaagcaaaaggaatcttgcagttcctgacccaaagaaaatcacagcaaattctaaggaaatcaatccatttagtgttctatcaaatacagccgctccagttaactgggctgatgatgtggaaaatgctagtaactcggatgagaagaaatctggtggttcagtttctgattatgacaatttggatgacaattttcttcaaaatcaatttggtcctcattcaaatccagatgaggtcagtcaaacttcctcaggcaaaattgatggccaaggactggagcttattgaatgtaatcatccacttgtcaatactgtgaatggtaaaagaatcataactgatgaatcaatgcttttgaattcacacaatgagcataatggtgctgtggaagttgatgaagtggagattgaagttcacaataacccaggtggtggtgttgggctacagccagaaagacagactgtcctagaaaagctgaaaggattatctttcctacgacagcaggatgccataacttccaaggattgtactcattctggttcagatcaacgggtacctgatgaaacacagatcaatccaaacctttcctgtggcccatttgatgctacaatggaagataaaacctcttttgatgagtgcagccatggaaatgctgaggtgctgcaaatcatcactgatttacagaagaggactgaagcactggagaagaaactgattgggtcagacaaagaaatactttcattgagggaaatttttaaagactcaggaagaaaagtccagcaactggaatacattgtagatgagttacagttcaaacttgactcttccctggctcaccttggaaacatgtgcaatacactagccaccccatcaatattcctgattggtggttataatggcgtgacttggttatcatctcttgattccttttctcctgagaaagacgcggtcctaggtctcacaccaatgagttctccccgctcatatgcatctgctgctgtgttggatggacacatatttgcttttggcggtggcgatggcatgtcatggtataacacagtggaatgctatagctcaagaaataatgagtggacggaatgcccctccatgaaccagaagaaaggaagtcttgctgggatctgtcttaatgagaaaatatacgctattggtggaggagatggaaatgaattttattcagaagttgagatctttgacccctaccttgggaagtggatatgtagcccatctatgctaacctctcggtttgctcttgctgcgtccggactaaatggagtcatctatacatctggtggctatgatggaaacatgtacttgaaatcagcagaaaggtatgatccaagggagggcttctgggtccggcttccaagtatgagtactaggagaggatcccacaccttaactgtccttggagacaccctatatgctatgggagggtatgatggggacaaaatggtttctagcgttgagatctatgatcctagtcttaatgcttggaggataggtgatcccatgaacactccaagaggatatgccgctgctgtttatcttgatgatagcttattcctaattggtggcatgcagtccagtgtgcagatgttggatactgtggaagtttacaatgcaagttctggctggtcagtccttggttctagttctattgggatgaggtccttcgcatctgccgttgtcttgtaattggtagccagaagtttagaattcatatcatcaaaatttgtaacatagctgccattacaatttacatggaatggttagcacaaatcagggtaaacaacccttctgaagcattctggttaccaacagcgagataggataacatgctggttcgaaattttacttttgaatcttcattcgcgactaaccccacattgtgtggatgaacgattttctcggataattgtcaaactgatgtagaatccaaaagaacttttgtattcaattattgcttctgttttttctccttaagtaggcttgtatacatagcagtgcgtaaaacgttgagatgttggttgagcagactgataagctttcaggttagtataagatgcagcaaatgttgctgttaacttttttcagctgctctattgtcaactgggccacaggctgttagatgagatcatggagtcggcacatgtttctttgaattgcagcagatctcgtgtgaagcggctcgtggatctgtaaatatgtgtgattcatgatattttgttagatatcaactaaatatatgccaagaaacttgggatttgtcattctatt

SEQ ID NO: 62360 - DNA, 2879 bp, Zea Mays
cgggaggtgtgagtccacctcctgcccggttcgctgggatcaaccgcgggcgcgtttcccgctcctgtaggggttgcgttggggttttctcattccattttttgggtgctggaggggcgatcttgcaatgcagacgaataatagcaactatggggagcttacccgcaatatccgagaaaaccagcttggaggggtgatctttggttgcaaacacgatacgattgaagaatgcttcagaaaacagctattcggtgacagaaagctccatggaattttcgaagctgcaagtcctggtgagatgtatattgattcatatgcttggagtaatgatggttgtttaaggtcagcttttcctgcacaggttcgtatttgcacaaagactcggtatccacctctgctggagagccaatttaaaacattgcttggtgacaactattacaaccatcaccacttctattttgagcttgaccatgcacagacaagagctttaatttctttgttcaaatcacttgctccgtctaatttcattcaagttccagctgtttcaagcaaaaggaatcttgcagttcctgacccaaagaaaatcacagcaaattctaaggaaatcaatccatttagtgttctatcaaatacagccgctccagttaactgggctgatgatgtggaaaatgctagtaactcggatgagaagaaatctggtggttcagtttctgattatgacaatttggatgacaattttcttcaaaatcaatttggtcctcattcaaatccagatgaggtcagtcaaacttcctcaggcaaaattgatggccaaggactggagcttattgaatgtaatcatccacttgtcaatactgtgaatggtaaaagaatcataactgatgaatcaatgcttttgaattcacacaatgagcataatggtgctgtggaagttgatgaagtggagattgaagttcacaataacccaggtggtggtgttgggctacagccagaaagacagactgtcctagaaaagctgaaaggattatctttcctacgacagcaggatgccataacttccaaggattgtactcattctggttcagatcaacgggtacctgatgaaacacagatcaatccaaacctttcctgtggcccatttgatgctacaatggaagataaaacctcttttgatgagtgcagccatggaaatgctgaggtgctgcaaatcatcactgatttacagaagaggactgaagcactggagaagaaactgattgggtcagacaaagaaatactttcattgagggaaatttttaaagactcaggaagaaaagtccagcaactggaatacattgtagatgagttacagttcaaacttgactcttccctggctcaccttggaaacatgtgcaatacactagccaccccatcaatattcctgattggtggttataatggcgtgacttggttatcatctcttgattccttttctcctgagaaagacgcggtcctaggtctcacaccaatgagttctccccgctcatatgcatctgctgctgtgttggatggacacatatttgcttttggcggtggcgatggcatgtcatggtataacacagtggaatgctatagctcaagaaataatgagtggacggaatgcccctccatgaaccagaagaaaggaagtcttgctgggatctgtcttaatgagaaaatatacgctattggtggaggagatggaaatgaattttattcagaagttgagatctttgacccctaccttgggaagtggatatgtagcccatctatgctaacctctgtatgttctcagcctcagttgcatgcatatacacaatttgcggtttgctcttgctgcgtccggactaaatggagtcatctatacatctggtggctatgatggaaacatgtacttgaaatcagcagaaaggtatgatccaagggagggcttctgggtccggcttccaagtatgagtactaggagaggatcccacaccttaactgtccttggagacaccctatatgctatgggagggtatgatggggacaaaatggtttctagcgttgagatctatgatcctagtcttaatgcttggaggataggtgatcccatgaacactccaagaggatatgccgctgctgtttatcttgatgatagcttattcctaattggtggcatgcagtccagtgtgcagatgttggatactgtggaagtttacaatgcaagttctggctggtcagtccttggttctagttctattgggatgaggtccttcgcatctgccgttgtcttgtaattggtagccagaagtttagaattcatatcatcaaaatttgtaacatagctgccattacaatttacatggaatggttagcacaaatcagggtaaacaacccttctgaagcattctggttaccaacagcgagataggataacatgctggttcgaaattttacttttgaatcttcattcgcgactaaccccacattgtgtggatgaacgattttctcggataattgtcaaactgatgtagaatccaaaagaacttttgtattcaattattgcttctgttttttctccttaagtaggcttgtatacatagcagtgcgtaaaacgttgagatgttggttgagcagactgataagctttcaggttagtataagatgcagcaaatgttgctgttaacttttttcagctgctctattgtcaactgggccacaggctgttagatgagatcatggagtcggcacatgtttctttgaattgcagcagatctcgtgtgaagcggctcgtggatctgtaaatatgtgtgattcatgatattttgttagatatcaactaaatatatgccaagaaacttgggatttgtcattctatt

SEQ ID NO: 62361 - DNA, 2892 bp, Zea Mays
cgggaggtgtgagtccacctcctgcccggttcgctgggatcaaccgcgggcgcgtttcccgctcctgtaggggttgcgttggggttttctcattccattttttgggtgctggaggggcgatcttgcaatgcagacgaataatagcaactatggggagcttacccgcaatatccgagaaaaccagcttggaggggtgatctttggttgcaaacacgatacgattgaagaatgcttcagaaaacagctattcggtctgccttcagtccattattcatatgttagaaatgtcaaacctggcatgcctttatttctattcaattatagtgacagaaagctccatggaattttcgaagctgcaagtcctggtgagatgtatattgattcatatgcttggagtaatgatggttgtttaaggttcgtatttgcacaaagactcggtatccacctctgctggagagccaatttaaaacattgcttggtgacaactattacaaccatcaccacttctattttgagcttgaccatgcacagacaagagctttaatttctttgttcaaatcacttgctccgtctaatttcattcaagttccagctgtttcaagcaaaaggaatcttgcagttcctgacccaaagaaaatcacagcaaattctaaggaaatcaatccatttagtgttctatcaaatacagccgctccagttaactgggctgatgatgtggaaaatgctagtaactcggatgagaagaaatctggtggttcagtttctgattatgacaatttggatgacaattttcttcaaaatcaatttggtcctcattcaaatccagatgaggtcagtcaaacttcctcaggcaaaattgatggccaaggactggagcttattgaatgtaatcatccacttgtcaatactgtgaatggtaaaagaatcataactgatgaatcaatgcttttgaattcacacaatgagcataatggtgctgtggaagttgatgaagtggagattgaagttcacaataacccaggtggtggtgttgggctacagccagaaagacagactgtcctagaaaagctgaaaggattatctttcctacgacagcaggatgccataacttccaaggattgtactcattctggttcagatcaacgggtacctgatgaaacacagatcaatccaaacctttcctgtggcccatttgatgctacaatggaagataaaacctcttttgatgagtgcagccatggaaatgctgaggtgctgcaaatcatcactgatttacagaagaggactgaagcactggagaagaaactgattgggtcagacaaagaaatactttcattgagggaaatttttaaagactcaggaagaaaagtccagcaactggaatacattgtagatgagttacagttcaaacttgactcttccctggctcaccttggaaacatgtgcaatacactagccaccccatcaatattcctgattggtggttataatggcgtgacttggttatcatctcttgattccttttctcctgagaaagacgcggtcctaggtctcacaccaatgagttctccccgctcatatgcatctgctgctgtgttggatggacacatatttgcttttggcggtggcgatggcatgtcatggtataacacagtggaatgctatagctcaagaaataatgagtggacggaatgcccctccatgaaccagaagaaaggaagtcttgctgggatctgtcttaatgagaaaatatacgctattggtggaggagatggaaatgaattttattcagaagttgagatctttgacccctaccttgggaagtggatatgtagcccatctatgctaacctctcggtttgctcttgctgcgtccggactaaatggagtcatctatacatctggtggctatgatggaaacatgtacttgaaatcagcagaaaggtatgatccaagggagggcttctgggtccggcttccaagtatgagtactaggagaggatcccacaccttaactgtccttggagacaccctatatgctatgggagggtatgatggggacaaaatggtttctagcgttgagatctatgatcctagtcttaatgcttggaggataggtgatcccatgaacactccaagaggatatgccgctgctgtttatcttgatgatagcttattcctaattggtggcatgcagtccagtgtgcagatgttggatactgtggaagtttacaatgcaagttctggctggtcagtccttggttctagttctattgggatgaggtccttcgcatctgccgttgtcttgtaattggtagccagaagtttagaattcatatcatcaaaatttgtaacatagctgccattacaatttacatggaatggttagcacaaatcagggtaaacaacccttctgaagcattctggttaccaacagcgagataggataacatgctggttcgaaattttacttttgaatcttcattcgcgactaaccccacattgtgtggatgaacgattttctcggataattgtcaaactgatgtagaatccaaaagaacttttgtattcaattattgcttctgttttttctccttaagtaggcttgtatacatagcagtgcgtaaaacgttgagatgttggttgagcagactgataagctttcaggttagtataagatgcagcaaatgttgctgttaacttttttcagctgctctattgtcaactgggccacaggctgttagatgagatcatggagtcggcacatgtttctttgaattgcagcagatctcgtgtgaagcggctcgtggatctgtaaatatgtgtgattcatgatattttgttagatatcaactaaatatatgccaagaaacttgggatttgtcattctatt

SEQ ID NO: 62362 - DNA, 2809 bp, Zea Mays
cgggaggtgtgagtccacctcctgcccggttcgctgggatcaaccgcgggcgcgtttcccgctcctgtaggggttgcgttggggttttctcattccattttttgggtgctggaggggcgatcttgcaatgcagacgaataatagcaactatggggagcttacccgcaatatccgagaaaaccagcttggaggggtgatctttggttgcaaacacgatacgattgaagaatgcttcagaaaacagctattcgctgcaagtcctggtgagatgtatattgattcatatgcttggagtaatgatggttgtttaaggtcagcttttcctgcacaggttcgtatttgcacaaagactcggtatccacctctgctggagagccaatttaaaacattgcttggtgacaactattacaaccatcaccacttctattttgagcttgaccatgcacagacaagagctttaatttctttgttcaaatcacttgctccgtctaatttcattcaagttccagctgtttcaagcaaaaggaatcttgcagttcctgacccaaagaaaatcacagcaaattctaaggaaatcaatccatttagtgttctatcaaatacagccgctccagttaactgggctgatgatgtggaaaatgctagtaactcggatgagaagaaatctggtggttcagtttctgattatgacaatttggatgacaattttcttcaaaatcaatttggtcctcattcaaatccagatgaggtcagtcaaacttcctcaggcaaaattgatggccaaggactggagcttattgaatgtaatcatccacttgtcaatactgtgaatggtaaaagaatcataactgatgaatcaatgcttttgaattcacacaatgagcataatggtgctgtggaagttgatgaagtggagattgaagttcacaataacccaggtggtggtgttgggctacagccagaaagacagactgtcctagaaaagctgaaaggattatctttcctacgacagcaggatgccataacttccaaggattgtactcattctggttcagatcaacgggtacctgatgaaacacagatcaatccaaacctttcctgtggcccatttgatgctacaatggaagataaaacctcttttgatgagtgcagccatggaaatgctgaggtgctgcaaatcatcactgatttacagaagaggactgaagcactggagaagaaactgattgggtcagacaaagaaatactttcattgagggaaatttttaaagactcaggaagaaaagtccagcaactggaatacattgtagatgagttacagttcaaacttgactcttccctggctcaccttggaaacatgtgcaatacactagccaccccatcaatattcctgattggtggttataatggcgtgacttggttatcatctcttgattccttttctcctgagaaagacgcggtcctaggtctcacaccaatgagttctccccgctcatatgcatctgctgctgtgttggatggacacatatttgcttttggcggtggcgatggcatgtcatggtataacacagtggaatgctatagctcaagaaataatgagtggacggaatgcccctccatgaaccagaagaaaggaagtcttgctgggatctgtcttaatgagaaaatatacgctattggtggaggagatggaaatgaattttattcagaagttgagatctttgacccctaccttgggaagtggatatgtagcccatctatgctaacctctcggtttgctcttgctgcgtccggactaaatggagtcatctatacatctggtggctatgatggaaacatgtacttgaaatcagcagaaaggtatgatccaagggagggcttctgggtccggcttccaagtatgagtactaggagaggatcccacaccttaactgtccttggagacaccctatatgctatgggagggtatgatggggacaaaatggtttctagcgttgagatctatgatcctagtcttaatgcttggaggataggtgatcccatgaacactccaagaggatatgccgctgctgtttatcttgatgatagcttattcctaattggtggcatgcagtccagtgtgcagatgttggatactgtggaagtttacaatgcaagttctggctggtcagtccttggttctagttctattgggatgaggtccttcgcatctgccgttgtcttgtaattggtagccagaagtttagaattcatatcatcaaaatttgtaacatagctgccattacaatttacatggaatggttagcacaaatcagggtaaacaacccttctgaagcattctggttaccaacagcgagataggataacatgctggttcgaaattttacttttgaatcttcattcgcgactaaccccacattgtgtggatgaacgattttctcggataattgtcaaactgatgtagaatccaaaagaacttttgtattcaattattgcttctgttttttctccttaagtaggcttgtatacatagcagtgcgtaaaacgttgagatgttggttgagcagactgataagctttcaggttagtataagatgcagcaaatgttgctgttaacttttttcagctgctctattgtcaactgggccacaggctgttagatgagatcatggagtcggcacatgtttctttgaattgcagcagatctcgtgtgaagcggctcgtggatctgtaaatatgtgtgattcatgatattttgttagatatcaactaaatatatgccaagaaacttgggatttgtcattctatt

SEQ ID NO: 62363 - DNA, 2930 bp, Zea Mays
ctccccagccactccgggaggtgtgagtccacctcctgcccggttcgctgggatcaaccgcgggcgcgtttcccgctcctgtaggggttgcgttggggttttctcattccattttttggaacaggtgctggaggggcgatcttgcaatgcagacgaataatagcaactatggggagcttacccgcaatatccgagaaaaccagcttggaggggtgatctttggttgcaaacacgatacgattgaagaatgcttcagaaaacagctattcggtctgccttcagtccattattcatatgttagaaatgtcaaacctggcatgcctttatttctattcaattatagtgacagaaagctccatggaattttcgaagctgcaagtcctggtgagatgtatattgattcatatgcttggagtaatgatggttgtttaaggtcagcttttcctgcacaggttcgtatttgcacaaagactcggtatccacctctgctggagagccaatttaaaacattgcttggtgacaactattacaaccatcaccacttctattttgagcttgaccatgcacagacaagagctttaatttctttgttcaaatcacttgctccgtctaatttcattcaagttccagctgtttcaagcaaaaggaatcttgcagttcctgacccaaagaaaatcacagcaaattctaaggaaatcaatccatttagtgttctatcaaatacagccgctccagttaactgggctgatgatgtggaaaatgctagtaactcggatgagaagaaatctggtggttcagtttctgattatgacaatttggatgacaattttcttcaaaatcaatttggtcctcattcaaatccagatgaggtcagtcaaacttcctcaggcaaaattgatggccaaggactggagcttattgaatgtaatcatccacttgtcaatactgtgaatggtaaaagaatcataactgatgaatcaatgcttttgaattcacacaatgagcataatggtgctgtggaagttgatgaagtggagattgaagttcacaataacccaggtggtggtgttgggctacagccagaaagacagactgtcctagaaaagctgaaaggattatctttcctacgacagcaggatgccataacttccaaggattgtactcattctggttcagatcaacgggtacctgatgaaacacagatcaatccaaacctttcctgtggcccatttgatgctacaatggaagataaaacctcttttgatgagtgcagccatggaaatgctgaggtgctgcaaatcatcactgatttacagaagaggactgaagcactggagaagaaactgattgggtcagacaaagaaatactttcattgagggaaatttttaaagactcaggaagaaaagtccagcaactggaatacattgtagatgagttacagttcaaacttgactcttccctggctcaccttggaaacatgtgcaatacactagccaccccatcaatattcctgattggtggttataatggcgtgacttggttatcatctcttgattccttttctcctgagaaagacgcggtcctaggtctcacaccaatgagttctccccgctcatatgcatctgctgctgtgttggatggacacatatttgcttttggcggtggcgatggcatgtcatggtataacacagtggaatgctatagctcaagaaataatgagtggacggaatgcccctccatgaaccagaagaaaggaagtcttgctgggatctgtcttaatgagaaaatatacgctattggtggaggagatggaaatgaattttattcagaagttgagatctttgacccctaccttgggaagtggatatgtagcccatctatgctaacctctcggtttgctcttgctgcgtccggactaaatggagtcatctatacatctggtggctatgatggaaacatgtacttgaaatcagcagaaaggtatgatccaagggagggcttctgggtccggcttccaagtatgagtactaggagaggatcccacaccttaactgtccttggagacaccctatatgctatgggagggtatgatggggacaaaatggtttctagcgttgagatctatgatcctagtcttaatgcttggaggataggtgatcccatgaacactccaagaggatatgccgctgctgtttatcttgatgatagcttattcctaattggtggcatgcagtccagtgtgcagatgttggatactgtggaagtttacaatgcaagttctggctggtcagtccttggttctagttctattgggatgaggtccttcgcatctgccgttgtcttgtaattggtagccagaagtttagaattcatatcatcaaaatttgtaacatagctgccattacaatttacatggaatggttagcacaaatcagggtaaacaacccttctgaagcattctggttaccaacagcgagataggataacatgctggttcgaaattttacttttgaatcttcattcgcgactaaccccacattgtgtggatgaacgattttctcggataattgtcaaactgatgtagaatccaaaagaacttttgtattcaattattgcttctgttttttctccttaagtaggcttgtatacatagcagtgcgtaaaacgttgagatgttggttgagcagactgataagctttcaggttagtataagatgcagcaaatgttgctgttaacttttttcagctgctctattgtcaactgggccacaggctgttagatgagatcatggagtcggcacatgtttctttgaattgcagcagatctcgtgtgaagcggctcgtggatctgtaaatatgtgtgattcatgatattttgttagatatcaactaaatatatgccaagaaacttgggatttgtcattctatt

SEQ ID NO: 62364 - DNA, 2954 bp, Zea Mays
cttgaaatctgtgccagaagccgacactactccccagccactccgggaggtgtgagtccacctcctgcccggttcgctgggatcaaccgcgggcgcgtttcccgctcctgtaggggttgcgttggggttttctcattccattttttgggtgctggaggggcgatcttgcaatgcagacgaataatagcaactatggggagcttacccgcaatatccgagaaaaccagcttggaggggtgatctttggttgcaaacacgatacgattgaagaatgcttcagaaaacagctattcggtctgccttcagtccattattcatatgttagaaatgtcaaacctggcatgcctttatttctattcaattatagtgacagaaagctccatggaattttcgaagctgcaagtcctggtgagatgtatattgattcatatgcttggagtaatgatggttgtttaaggtcagcttttcctgcacaggttcgtatttgcacaaagactcggtatccacctctgctggagagccaatttaaaacattgcttggtgacaactattacaaccatcaccacttctattttgagcttgaccatgcacagacaagagctttaatttctttgttcaaatcacttgctccgtctaatttcattcaagttccagctgtttcaagcaaaaggaatcttgcagttcctgacccaaagaaaatcacagcaaattctaaggaaatcaatccatttagtgttctatcaaatacagccgctccagttaactgggctgatgatgtggaaaatgctagtaactcggatgagaagaaatctggtggttcagtttctgattatgacaatttggatgacaattttcttcaaaatcaatttggtcctcattcaaatccagatgaggtcagtcaaacttcctcaggcaaaattgatggccaaggactggagcttattgaatgtaatcatccacttgtcaatactgtgaatggtaaaagaatcataactgatgaatcaatgcttttgaattcacacaatgagcataatggtgctgtggaagttgatgaagtggagattgaagttcacaataacccaggtggtggtgttgggctacagccagaaagacagactgtcctagaaaagctgaaaggattatctttcctacgacagcaggatgccataacttccaaggattgtactcattctggttcagatcaacgggtacctgatgaaacacagatcaatccaaacctttcctgtggcccatttgatgctacaatggaagataaaacctcttttgatgagtgcagccatggaaatgctgaggtgctgcaaatcatcactgatttacagaagaggactgaagcactggagaagaaactgattgggtcagacaaagaaatactttcattgagggaaatttttaaagactcaggaagaaaagtccagcaactggaatacattgtagatgagttacagttcaaacttgactcttccctggctcaccttggaaacatgtgcaatacactagccaccccatcaatattcctgattggtggttataatggcgtgacttggttatcatctcttgattccttttctcctgagaaagacgcggtcctaggtctcacaccaatgagttctccccgctcatatgcatctgctgctgtgttggatggacacatatttgcttttggcggtggcgatggcatgtcatggtataacacagtggaatgctatagctcaagaaataatgagtggacggaatgcccctccatgaaccagaagaaaggaagtcttgctgggatctgtcttaatgagaaaatatacgctattggtggaggagatggaaatgaattttattcagaagttgagatctttgacccctaccttgggaagtggatatgtagcccatctatgctaacctctcggtttgctcttgctgcgtccggactaaatggagtcatctatacatctggtggctatgatggaaacatgtacttgaaatcagcagaaaggtatgatccaagggagggcttctgggtccggcttccaagtatgagtactaggagaggatcccacaccttaactgtccttggagacaccctatatgctatgggagggtatgatggggacaaaatggtttctagcgttgagatctatgatcctagtcttaatgcttggaggataggtgatcccatgaacactccaagaggatatgccgctgctgtttatcttgatgatagcttattcctaattggtggcatgcagtccagtgtgcagatgttggatactgtggaagtttacaatgcaagttctggctggtcagtccttggttctagttctattgggatgaggtccttcgcatctgccgttgtcttgtaattggtagccagaagtttagaattcatatcatcaaaatttgtaacatagctgccattacaatttacatggaatggttagcacaaatcagggtaaacaacccttctgaagcattctggttaccaacagcgagataggataacatgctggttcgaaattttacttttgaatcttcattcgcgactaaccccacattgtgtggatgaacgattttctcggataattgtcaaactgatgtagaatccaaaagaacttttgtattcaattattgcttctgttttttctccttaagtaggcttgtatacatagcagtgcgtaaaacgttgagatgttggttgagcagactgataagctttcaggttagtataagatgcagcaaatgttgctgttaacttttttcagctgctctattgtcaactgggccacaggctgttagatgagatcatggagtcggcacatgtttctttgaattgcagcagatctcgtgtgaagcggctcgtggatctgtaaatatgtgtgattcatgatattttgttagatatcaactaaatatatgccaagaaacttgggatttgtcattctatt

SEQ ID NO: 62365 - DNA, 2275 bp, Zea Mays
cgggaggtgtgagtccacctcctgcccggttcgctgggatcaaccgcgggcgcgtttcccgctcctgtaggggttgcgttggggttttctcattccattttttgggtgctggaggggcgatcttgcaatgcagacgaataatagcaactatggggagcttacccgcaatatccgagaaaaccagcttggaggggtgatctttggttgcaaacacgatacgattgaagaatgcttcagaaaacagctattcggtctgttaagtgcacctttcacctcttgctactatgttctacagatgttgctaagataatatggtattatagattctgtatgctgatggaaaataaaatgccttgtttctaaatattggctcaattaatttaactttttttttgaatttctatattgataagattatgattccttattgacttattttataggtctgccttcagtccattattcatatgttagaaatgtcaaacctggcatgcctttatttctattcaattatagtgacagaaagctccatggaattttcgaagctgcaagtcctggtgagatgtatattgattcatatgcttggagtaatgatggttgtttaaggtcagcttttcctgcacaggttcgtatttgcacaaagactcggtatccacctctgctggagagccaatttaaaacattgcttggtgacaactattacaaccatcaccacttctattttgagcttgaccatgcacagacaagagctttaatttctttgttcaaatcacttgctccgtctaatttcattcaagttccagctgtttcaagcaaaaggaatcttgcagttcctgacccaaagaaaatcacagcaaattctaaggaaatcaatccatttagtgttctatcaaatacagccgctccagttaactgggctgatgatgtggaaaatgctagtaactcggatgagaagaaatctggtggttcagtttctgattatgacaatttggatgacaattttcttcaaaatcaatttggtcctcattcaaatccagatgaggtcagtcaaacttcctcaggcaaaattgatggccaaggactggagcttattgaatgtaatcatccacttgtcaatactgtgaatggtaaaagaatcataactgatgaatcaatgcttttgaattcacacaatgagcataatggtgctgtggaagttgatgaagtggagattgaagttcacaataacccaggtggtggtgttgggctacagccagaaagacagactgtcctagaaaagctgaaaggattatctttcctacgacagcaggatgccataacttccaaggattgtactcattctggttcagatcaacgggtacctgatgaaacacagatcaatccaaacctttcctgtggcccatttgatgctacaatggaagataaaacctcttttgatgagtgcagccatggaaatgctgaggtgctgcaaatcatcactgatttacagaagaggactgaagcactggagaagaaactgattgggtcagacaaagaaatactttcattgagggaaatttttaaagactcaggaagaaaagtccagcaactggaatacattgtagatgagttacagttcaaacttgactcttccctggctcaccttggaaacatgtgcaatacactagccaccccatcaatattcctgattggtggttataatggcgtgacttggttatcatctcttgattccttttctcctgagaaagacgcggtcctaggtctcacaccaatgagttctccccgctcatatgcatctgctgctgtgttggatggacacatatttgcttttggcggtggcgatggcatgtcatggtataacacagtggaatgctatagctcaagaaataatgagtggacggaatgcccctccatgaaccagaagaaaggaagtcttgctgggatctgtcttaatgagaaaatatacgctattggtggaggagatggaaatgaattttattcagaagttgagatctttgacccctaccttgggaagtggatatgtagcccatctatgctaacctctcggtttgctcttgctgcgtccggactaaatggagtcatctatacatctggtggctatgatggaaacatgtacttgaaatcagcagaaaggtatgatccaagggagggcttctgggtccggcttccaagtatgagtactaggagaggatcccacaccttaactgtccttggagacaccctccagcctgcaggctttgttgactccactcgt

SEQ ID NO: 62366 - DNA, 1069 bp, Zea Mays
caaatttgggctctatattgaaggcattgacagagccagattatggaagtgatgcaagctccctaaggactgcagcaaccaaggtacctggtggttggcatttagatggacaaaaacgctggataggtaacagcacttttgcagatgtcctcatcattttggctaggaatgcagatacaaaccaactaaatggatttattgtaaagaaaggagctcctggtctaaaagccacaaaaattgaaaataaaattggactcagaatggttcaaaatggagacataattctaaataaagtatttgtccctgaggaagacagattaacaggcatcaattcatttcaggatataaacaaggtcctcgctatgtctcgaattatggtggcatggcaaccaataggcatatcaatgggagtttatgacatctgccatcggtatttgaaagaaagaaagcaatttggagctccactggcagcttttcagctcaatcaagaaaagcttgtccgcatgcttggcaacattcaggctatgcttctcgttggatggcgactgtgcaagctgtatgagtcaggcaaaatgacaccaggccggtctagtttaggcaaggcatggacgtccaagaaggccagggaggtggtttctcttgggcgagagctactgggtggcaatggcattttggttgattttcttgtcgccaaggcattttgtgacgtggaacccattttctcgtacgagggcacctatgacattaatagcctggtggctggcagagagatcaccgggatcgcgagcttcaagcctgctgtgtcagcaaaatcacgcctgtgaaagttgtttttttctttgttcccgaagacagtagaaatcaaccttgtacattcagatgattgggaataagaacggtaggaaagctgtaaaactcgacgtgcttcctcgtatgtactgttctgtttcaaattattcgacgttttgtcggaacggaacggaggacctgtatggctgtatatgatactcatcctatatatcacgcagcttttgaagattttgtaaaaaaacaaccataataaaaacaa

SEQ ID NO: 62367 - DNA, 1220 bp, Zea Mays
cccaacaaatttgggctctatattgaagaggttgcacgggtcgatgcgagctgctccacatttattctagtgcactcctcgttggctatgtccactattgccctttgtggatctgaggctcaaaagcagaaatacttaccatctcttacccagttcaaaactattggttgctgggcattgacagagccagattatggaagtgatgcaagctccctaaggactgcagcaaccaaggtacctggtggttggcatttagatggacaaaaacgctggataggtaacagcacttttgcagatgtcctcatcattttggctaggaatgcagatacaaaccaactaaatggatttattgtaaagaaaggagctcctggtctaaaagccacaaaaattgaaaataaaattggactcagaatggttcaaaatggagacataattctaaataaagtatttgtccctgaggaagacagattaacaggcatcaattcatttcaggatataaacaaggtcctcgctatgtctcgaattatggtggcatggcaaccaataggcatatcaatgggagtttatgacatctgccatcggtatttgaaagaaagaaagcaatttggagctccactggcagcttttcagctcaatcaagaaaagcttgtccgcatgcttggcaacattcaggctatgcttctcgttggatggcgactgtgcaagctgtatgagtcaggcaaaatgacaccaggccggtctagtttaggcaaggcatggacgtccaagaaggccagggaggtggtttctcttgggcgagagctactgggtggcaatggcattttggttgattttcttgtcgccaaggcattttgtgacgtggaacccattttctcgtacgagggcacctatgacattaatagcctggtggctggcagagagatcaccgggatcgcgagcttcaagcctgctgtgtcagcaaaatcacgcctgtgaaagttgtttttttctttgttcccgaagacagtagaaatcaaccttgtacattcagatgattgggaataagaacggtaggaaagctgtaaaactcgacgtgcttcctcgtatgtactgttctgtttcaaattattcgacgttttgtcggaacggaacggaggacctgtatggctgtatatgatactcatcctatatatcacgcagcttttgaagattttgtaaaaaaacaaccataataaaaacaa

SEQ ID NO: 62368 - DNA, 1558 bp, Zea Mays
gagctctcggacggcggtgtccggccgggagcgccggtgctggggacggcggcaaggtcgggctgccggcgcttgacgtgacgctcgcgttcccgcaggccacgcccgcatcgctcttcccgccagccgtttcggactactaccaatttgatgatttgctgactgatgaagagaaggcactcaggaagaaggtccgaggtatcatggaaaaggaaatcgcgcccattatgactgagtactgggagaaggctgaattcccattccatgccattcccagccttgccagtcttggtttagctggtggtacaataaaggggtatgggtgccctggactctcgcttacagctagtgctatttcgatagcagaggttgcacgggtcgatgcgagctgctccacatttattctagtgcactcctcgttggctatgtccactattgccctttgtggatctgaggctcaaaagcagaaatacttaccatctcttacccagttcaaaactattggttgctgggcattgacagagccagattatggaagtgatgcaagctccctaaggactgcagcaaccaaggtacctggtggttggcatttagatggacaaaaacgctggataggtaacagcacttttgcagatgtcctcatcattttggctaggaatgcagatacaaaccaactaaatggatttattgtaaagaaaggagctcctggtctaaaagccacaaaaattgaaaataaaattggactcagaatggttcaaaatggagacataattctaaataaagtatttgtccctgaggaagacagattaacaggcatcaattcatttcaggatataaacaaggtcctcgctatgtctcgaattatggtggcatggcaaccaataggcatatcaatgggagtttatgacatctgccatcggtatttgaaagaaagaaagcaatttggagctccactggcagcttttcagctcaatcaagaaaagcttgtccgcatgcttggcaacattcaggctatgcttctcgttggatggcgactgtgcaagctgtatgagtcaggcaaaatgacaccaggccggtctagtttaggcaaggcatggacgtccaagaaggccagggaggtggtttctcttgggcgagagctactgggtggcaatggcattttggttgattttcttgtcgccaaggcattttgtgacgtggaacccattttctcgtacgagggcacctatgacattaatagcctggtggctggcagagagatcaccgggatcgcgagcttcaagcctgctgtgtcagcaaaatcacgcctgtgaaagttgtttttttctttgttcccgaagacagtagaaatcaaccttgtacattcagatgattgggaataagaacggtaggaaagctgtaaaactcgacgtgcttcctcgtatgtactgttctgtttcaaattattcgacgttttgtcggaacggaacggaggacctgtatggctgtatatgatactcatcctatatatcacgcagcttttgaagattttgtaaaaaaacaaccataataaaaacaa

SEQ ID NO: 62369 - DNA, 1675 bp, Zea Mays
cgtcttcgttttgtttcgtttcgtatcggatcgtgccgctcttcccttctcgtctagtcttgtctttctttcctcctctgttactccacctacagacctactactgccatcgggagggtaagctcttcggagccggagccgggtccacgttaacgccatcgagtgctgcgatgggcagcttaggagggagcgccggtgctggggacggcggcaaggtcgggctgccggcgcttgacgtgacgctcgcgttcccgcaggccacgcccgcatcgctcttcccgccagccgagaaggcactcaggaagaaggtccgaggtatcatggaaaaggaaatcgcgcccattatgactgagtactgggagaaggctgaattcccattccatgccattcccagccttgccagtcttggtttagctggtggtacaataaaggggtatgggtgccctggactctcgcttacagctagtgctatttcgatagcagaggttgcacgggtcgatgcgagctgctccacatttattctagtgcactcctcgttggctatgtccactattgccctttgtggatctgaggctcaaaagcagaaatacttaccatctcttacccagttcaaaactattggttgctgggcattgacagagccagattatggaagtgatgcaagctccctaaggactgcagcaaccaaggtacctggtggttggcatttagatggacaaaaacgctggataggtaacagcacttttgcagatgtcctcatcattttggctaggaatgcagatacaaaccaactaaatggatttattgtaaagaaaggagctcctggtctaaaagccacaaaaattgaaaataaaattggactcagaatggttcaaaatggagacataattctaaataaagtatttgtccctgaggaagacagattaacaggcatcaattcatttcaggatataaacaaggtcctcgctatgtctcgaattatggtggcatggcaaccaataggcatatcaatgggagtttatgacatctgccatcggtatttgaaagaaagaaagcaatttggagctccactggcagcttttcagctcaatcaagaaaagcttgtccgcatgcttggcaacattcaggctatgcttctcgttggatggcgactgtgcaagctgtatgagtcaggcaaaatgacaccaggccggtctagtttaggcaaggcatggacgtccaagaaggccagggaggtggtttctcttgggcgagagctactgggtggcaatggcattttggttgattttcttgtcgccaaggcattttgtgacgtggaacccattttctcgtacgagggcacctatgacattaatagcctggtggctggcagagagatcaccgggatcgcgagcttcaagcctgctgtgtcagcaaaatcacgcctgtgaaagttgtttttttctttgttcccgaagacagtagaaatcaaccttgtacattcagatgattgggaataagaacggtaggaaagctgtaaaactcgacgtgcttcctcgtatgtactgttctgtttcaaattattcgacgttttgtcggaacggaacggaggacctgtatggctgtatatgatactcatcctatatatcacgcagcttttgaagattttgtaaaaaaacaaccataataaaaacaa

SEQ ID NO: 62370 - DNA, 1835 bp, Zea Mays
cggagctgtctgatttttgcatctctagagttttgcacgggcgcatgcacccaaccaaacacacgggtagtctctccactccaactcacgcccgaatcgtcttcgttttgtttcgtttcgtatcggatcgtgccgctcttcccttctcgtctagtcttgtctttctttcctcctctgttactccacctacagacctactactgccatcgggagggtaagctcttcggagccggagccgggtccacgttaacgccatcgagtgctgcgatgggcagcttaggagggagcgccggtgctggggacggcggcaaggtcgggctgccggcgcttgacgtgacgctcgcgttcccgcaggccacgcccgcatcgctcttcccgccagccgtttcggactactaccaatttgatgatttgctgactgatgaagagaaggcactcaggaagaaggtccgaggtatcatggaaaaggaaatcgcgcccattatgactgagtactgggagaaggctgaattcccattccatgccattcccagccttgccagtcttggtttagctggtggtacaataaaggggtatgggtgccctggactctcgcttacagctagtgctatttcgatagcagaggttgcacgggtcgatgcgagctgctccacatttattctagtgcactcctcgttggctatgtccactattgccctttgtggatctgaggctcaaaagcagaaatacttaccatctcttacccagttcaaaactattggttgctgggcattgacagagccagattatggaagtgatgcaagctccctaaggactgcagcaaccaaggtacctggtggttggcatttagatggacaaaaacgctggataggtaacagcacttttgcagatgtcctcatcattttggctaggaatgcagatacaaaccaactaaatggatttattgtaaagaaaggagctcctggtctaaaagccacaaaaattgaaaataaaattggactcagaatggttcaaaatggagacataattctaaataaagtatttgtccctgaggaagacagattaacaggcatcaattcatttcaggatataaacaaggtcctcgctatgtctcgaattatggtggcatggcaaccaataggcatatcaatgggagtttatgacatctgccatcggtgggaatcacattgctacatgtatttgaaagaaagaaagcaatttggagctccactggcagcttttcagctcaatcaagaaaagcttgtccgcatgcttggcaacattcaggctatgcttctcgttggatggcgactgtgcaagctgtatgagtcaggcaaaatgacaccaggccggtctagtttaggcaaggcatggacgtccaagaaggccagggaggtggtttctcttgggcgagagctactgggtggcaatggcattttggttgattttcttgtcgccaaggcattttgtgacgtggaacccattttctcgtacgagggcacctatgacattaatagcctggtggctggcagagagatcaccgggatcgcgagcttcaagcctgctgtgtcagcaaaatcacgcctgtgaaagttgtttttttctttgttcccgaagacagtagaaatcaaccttgtacattcagatgattgggaataagaacggtaggaaagctgtaaaactcgacgtgcttcctcgtatgtactgttctgtttcaaattattcgacgttttgtcggaacggaacggaggacctgtatggctgtatatgatactcatcctatatatcacgcagcttttgaagattttgtaaaaaaacaaccataataaaaacaa

SEQ ID NO: 62371 - DNA, 1068 bp, Zea Mays
gtcgttgctgttgcacaccactagttgcaacagtttaagtagccttggcctcgtcgcctcctccactcactcgctcatcttcttgcaccaccgacaggccagccttcgattctcgtagtcaaagcttttgaggtaccactagtgaaatgagcgaggacaaggtgtcttagaagttactacttagaagagatggctagtaccgcaagccaaccgtttcaagaagggaagcagcacctgcacctgaaccatggtggccgtgctcttcattcagcgtacggtggtactgctgcgtggcctgccagctcggtgacgccgcctctgaccaggctggagacaccagcgtcgtcgagcaaaagcacggcggaggcgcggcaggccctcaagatccacagcgcggcagagaagcggcggcgggagaggatcaatgctcacctcgcgacgctgaggagaatgatccctgacgctagtcagatggacaaggccaccttgctagcccgggtggtttgccaactcaaggacctcaagaagaaatcggccgaaaccacgcagccaccactggccaccatccccggagagaccaacgagatcgccgtcgtctgctgcaccggcacggcctccactgcctacgagagagcggcggcgacgtacatcagggcctccgtcagctgtgacgaccggccggggctccacgctgacctcgccggagcgttacgcgccatgaggctgaggccgctgagggcggacatggccgccctgggaggcagggctcagtgtgacttcgtactgtgcagagaggacggcgccggctgccgcacgctgaaggctctcgaggagggcgtcaggcaggcgctggccaaggctgcgttcccggagacgccaccgtacggatgcaacgccgctaggagcaggaggcagaggcttgcgggatcacattgttacttgcatggttttgtcgcgaagctctattaaaagtgtcgaaggcagatcggataatattacaagtgactctaagcttggtatgcataaattttcactagcggtttcagttatgccgcggcagaaaaaata

SEQ ID NO: 62372 - DNA, 3894 bp, Zea Mays
caccgatgacatggcatagggattagcacaactatgaatcttgccagtggatccaatgataggggcgccgcataaatggtatgagggtagggcaaggttctatatttgtatgactagtcgatgcatctagaggtggaacctactagagacgtggtaccggggcgagggaagggtgagcatgtttgtagatcttgcccataggggaccagtcgtcccgagttgtaataggaaattagtgtaggggtgagttttttgtgtgaatcccgctggctataaaggaggatgtgaaacaaggaagtctatcgattgaaatttgagacaaagaaaggcaaaggtaacgggtgactcctcgcgtcttcgaggagcgtgcgacctcaccgccgccgtccatgcccccaccctgcccttgccccctagcttacaccatatgtgtctagcggcttctgctgctttgtcgcgccacccgcctcctcccccaacctctcgaccactccatccccaatcatctgcatcgtgacgtcggcgccctcaatgtcgcacaactgtcatctgccaccgtactggtagacgacgacccctccgcccttcccgactctccggcttgttgtctcgtccgtccgtcacctctgtatcacggccgccgtcgcgaatccctcttctagcgccgccggatgccgtcgtcatcgtcttcggtgccgcccaggccggagaatgtccaggacgtcacggctgatgcgatcaacggattccctgtgctcaattctggcagcggcgccggaggccatgggcatgggcacgcgactgccggaacgtatgtgcggccctccctggccgccccattgccttcgccgacggcgcgcgccatcgccggctacggctacggctacgcagccaacaccggcttcaacgccgcgaacgcaatggcggcacgttctcccggtcccggtggagaaccagggacaaactcgctggagctgctcatgcacttggccggatggaataaccacccgccatgggcacagagctatgcgggcatgtccccgcggggccagccgctagtcctctctccctccgccacgtcccccgggtgggcaccgtcgtcgttcgcccccggggctctggcgggaacaagtggcggcagcagcagcagttttggcggccgtggcgctgtcgccgtccaaagcggcgccgtggcccgtaggtacgatctcggtcccggcagttggagcgcgggccgcggcaaaccaccaaacgtgagtcagctacagattactgcggccgcaaccgccgccaccggatcatgctcaaccagcaagacgaagtcgtcgccacttggaggcggcaacacagaacaagaacgcctgacccccgtgcttgcaatgccgactacccaggggaaggttgccgcggcgaggattggccgcgtcaggaagcgcgcgcccaagaatggcatcatcgacagcagtgcggcgccgtccaggaacctgaggcacagggccgccaacaagcagcgaacggccaaagacgcagccgccggcgttgacgagagccccgccgccaacgccaggcgcgtcgacaaccagcctgctggcggcccggcaaaatccgccgcaagcgcggacgcgcgaaacaacgatattcagatcgtcccttctccgccgccggcacgcaatggcaggaagaggaagcagaacgcttccgctgcgtcatcgagatgcagcagcctggccaccaggaggagcggcacggacgcggtggcgccagcgacgaagaagcacaccatcctgacgtggctcatcgacggcggcttcgtgtccgacggagagacggtgttgtatgttccaggaggggacggcggcgcgggcgcggagaaggtggtgtcgggcgcggtgacccgggccggcgtccactgcagctgctgcgacggcgtggtgccgctgccggtgttcgaggcccacgccggggcgcggcggcgcgacccgggccccgggcagcggcagccgtgggagaagctcctgctcgtgtccggcaactccctcctgcggtgcatgcaggaggcgtgggagatggagaaagtgaggaccttccatgcgcaggccaaggtgagggccgcgctggagcaggaggaggacaagtgctcgcaggccaagaggaggctcctcgccaagcatctgaagaagggggtggtcgtcgagaggatcatgtctcctaggatggagaagataaaggcaggcgagaaggactccagcgacgacgcctgcggcgtctgcgccgacggcggggagctcctctgctgcgactcctgcacctccaccttccacccggagtgcctcgccatcaaggtaccagagggctcgtggtcgtgccactactgccggtgcgtgctgtgcatgtcaaacgatgacctgcagggcctgtccacatgccagcagtgtgctcgcaagtaccacgagagctgccgtccattgccggggaacgggtgcgacatcggcacgtactgtggcgagacctgcaagaagctcttttctcagttagcacaagtgacaggcgtgacgaaccctaccggggatggtttttggtgggcgctcttgaggattcagaaagatgaaccggccagctccgaggaaatgcctgccgttctcgagcgcaacgtgaagcttgcggtggcgctgggcgtgttcaacgagtgcttcaacccggtgaaggatcggcgcaccaagatcgatatgctccaccaagctgtgtatagccttgggtctcaatttaagcggctaagctacgaagggttctacaccatggttctggagaaggatggagagatcgtttcagcagccctgctgaggatccatggcacacaagtcgcggagatgcctttcgcaggcacgctgccagcttaccggaaacaaggaatgatgcgtcgcctggtcagtgctgtggagcaggtgctggcgtcagtgcaagtggagaagctggtgatacctgccatagattctctggtggacacatggaagaggtccttcttcttcaggcccgtggatccccagctgagggaggagctcaagaggctgagcctggtggtgatcaccggcaccaccctgctccacaaacccatcgttccgctgccgccgccacgtccaccgtcgccccaacaagcggggagtccagaggcatggtggcgcaagtacgcggacccgtcggcgcgcctgaccgacgacgagcgggcgttcctggagatggacgtcgacacggcgccgcccttccgctacaccgacctggtcacaggcaacgtgtctctgcacaggttctgtcaagccgggagctcgtcgtcggcctgcgccgctgccgtgtccacagggagagcgagcggcagcgctgcaccgcctccgggtccgggagcatttgcggtgcagccgggcggctggcgttcttgccgcaaggctgcgagcgcgatggctccccagcccagctacgcgcgcggcggcgggcgcagcggtatactccatggcatgaagtgaccgatccaccccctgccctcggcgctgggcagggcttgctgcagctctgtggactgtggtgtaattcagctctgagcctctgactctgagaatgaagatgatgcggaattgcggacatactctgacagtctcatgtaccagtactcgatccatctcagcatttagacctggataatatcgatactagcgacattccgtagtgtaatgcttgtgattggtttaagatttggagttgactagagaactaaatgctttacttcagaggattttggtggtgaatggtgatcagctgcgtactctgcaatcttcatataccatttgtttgtgtgtttgattttgtcttttaaataggagcataaggatgtatttggttggacgt

SEQ ID NO: 62373 - DNA, 2036 bp, Zea Mays
agttctagtcaatagagtcgaactataaatcgtttgtttgaactaagagagacccagatagcaattaaaacttttacagacatactttaaaattttatagacttgcaaccgaaatacactttattctttcttcagcctagtccgactaccgactaagaccgactcagctccggcgaccctcaaaccgcaccagccatggacgggccgcgttggacggaagaggtggacgacctggtcgacgccggcgacgtcgacggcgccatcgccctccttgagtccgtcgtctccgatttgtcaacctccgctgctccccctgccactgaccttcgcctcgccacggcgctcggcgacctcgcgggcctgcacgcctcccggggagacaccctccgagccgacgagctccgcgcccgcgccatcgcccttcggtcccgcgccacggtccctgggactgggaccctagggtttgtttccccccctcgtcgtccttgttgctcttgtagttcgttgttggaagcccttcgctcaggcctcatgtttcaactgcttagttattgctctattgggctattattagagttaccttcgttgggttgttcatacatagaaataggaatatatagattataatgtgaaattcgatgcatgattggtcacctaagtcctggattactcctaatttttagcaattgccacttgactctgtactctgtagttacacagtttccctgcgttgctcagattgtagcttgccttcatggctgctacttctaacaacagattcagtggcaaaattgatatatctaaaacagtaataccaggggcactagctagttatgtactacttcgacttcctcattaaccattgtaattggcttcatgtacaatctcctgcttgggtgccttttccttagttcttaattagttacttatatgtttgttttgtgccaaatgacgctctcaagggatcaggagctgtcagagaaatgtccatcacaagagtgtgcaacgggttcaaaagactcagaagtctcagctaatactaataaaagcaatgaagatgaggaggatgattgggaggctattgcagatagtggtgcccttgatgacacactagtgcgctctcttgagcaaggagctagagtatcttcttgcagctcccccgaaaaaagtagcaccccatcttcagggcccaaaaggagggggaggggctcatttctttacaataagagtgttttgtacagtgaccagtgtggttcggaaagagagttggataacaaacagtctaaacctcaggttggatcaaaggatcatgtgaatgagccagagaataatgctgttacagctgctacacagtttgggacaaggcatgtccttgttttttatgactttccgccaagtacacgcacaacagatctggaaaggatttttgagaagtttggggatcacggggttgccattcgctggattaatgatacttctgcacttgctgtttttcggactccatcagctgctaatgaggctcaagcttgcatacctccaagatacaaagtacggtcactgaagccggatgatgatctattgacaaaaatagatggtagagacctagatccgcccaagccaagaccaaagacatctgcaagaacggctcaaaggctaattgctcatgggatgggattgaaacagttcacaaactttgggtctgatgagttgaagaaacaggagggagagaggaaggacagaattgccgctagacaagcaatgcgtgatgaggcttggggttcagattgatggagaacatactatgattgctggtcgcccacatcatgtctgcgagtttgttacattggtgttttagatgcttgtactctttgcatggtcaaatgttgattttgatacagagaaatctgacgcgatgtgtatcgtagtggcgacgtgtacgccaagcatgttgtacgggcagcaagggattaggatgagatttttctgaactgaaaagcaaagcacgcgcagcactatattttgcgaccttaccacct

SEQ ID NO: 62374 - DNA, 1102 bp, Zea Mays
tttgtcaattcataagatcaaaaaatagagttcataaaaaaatcctgctttaacaatgtttttattttcctgtaccaaatagacaaaagtctataacctcaaatgaccacgtgatatatactcccaactcaacattctgaatcctaaggaagaaattgaatgatattccaagactcccacttttttaatcagatctttaggaccgtattgtgtgtatttgaagatctagcactttgttagatcaataaaataagactaatcatcatgcaaaagaactgctatgccaatctctaggtttccctcctccatgtcgatccctttctttcacaagaaccatgttgaactacctatatagggcagccgaaaggacaatactaaatagcctaaggcacattgcacgcgagctttatcgtataagcacaagagtcttacccaagagtgggcttctccttcgagttgcacataaaagaagaggatagaagctaaagcatgtcccatggactgcctaaaaagaacactctgtttactaaaaataaatcatgataacaactatatgctactatcatcaagactaattcaattcatttgttgattcataagatcaacaaatggagttcataggaaaaaaatcgctttaacaatgtttttattttcctataccaaactgaagaaattatgtaacatcaaacgactacatgatactcccaacttgacattccaaagcataaggaagaaaataaatctattccaagacacccactttttttaaccaaatctccaagactagattgcgtgtattttaagatctagcactttgtcaaatcaataaaataaaactaatcgtaatgtaaaataactgatatgccgatctccaagtattcctcctccatgttgatgccttccttcaccagacccacgatgaacaaattggatctagatcatgtcgcgaagaggctacactgtggagttgggaaggaacgtgtgagacaacgatgaggtggtatattggataggagaggtgatgacacaggtgggaccgtggaaccctagagagcgggaggtgtgcgggttgatcaaaactggcggggaagggagaggcggg

SEQ ID NO: 62375 - DNA, 384 bp, Zea Mays
atgcccttggaccccgacgtccccatggctacagcccagaggtataacgtggcggcgcaagtggagcagcacgtgggagtggaatcggggggtggtgatggaggggaaggtcttttaatggagggaaccgttggcgtttgtcgtttggattggggcgaatgcaaccgggagagcgatgggagtggagccgcaggcctcggagtccgcaaggggcggagcgtgcggggcccgccggaggggataagggaaggtgtcccacctgccaacgccggcgatcgaactgctgcggcggcggatccgccgcgtctgcgcggcgtcctgaccccagcctttcctggcccggcttcctgctctgttttccttgtaaattttctacattactag

SEQ ID NO: 62376 - DNA, 67 bp, Zea Mays
gtttggcacaggtcgtgtacagatctactagtacaaccaaggcaaaggcattacggttcattggtcc

SEQ ID NO: 62377 - DNA, 500 bp, Zea Mays
caacagaacggaatatacggaatacggctctgcacagccgacgcgatgagggactgggcgccgtcgatcatcgccacggcgctgttcgcgctcctgtgcccgggcggcgtgctgcagatgcccggccggcaccgccccgtcgacctcatgaacatgaagaccagcttcccgtccatgctcgtccacgccgtcatctacttcctgctgctcatgctcttcctcgtcatcctgcggcctcacctctacatctgacgtgagcgtgttccccaccccttcacacaagcttctagcatgtttcagtttcttctttcttgggatgcagttttgggcccttttaatagctttgtaaccttatgaaccagaggattatataagtaatatgcgatccgtagcttccgttgggcaataaagaactgaagtttccctgcttcctgaaaacttttagtttgcttcagagtttcaggcttcagtgtgtcagtttatctggaccgaagtttcgt

SEQ ID NO: 62378 - DNA, 1072 bp, Zea Mays
gtttattttttgcagtcttgtgtgtctataatgttagaaatcaaatggtgtgatgcttaattatgacacatggtttatttagatttcatgtttttagtagctggtattttttacaattcattatatttgttgaatgatgcttacctcatatgatatatgtttaatctttgtgtgtatggggatccggtgggtgacccatacctacatgggtatgggtatagggcaaatccatacccacccgtgaatataatcgacccgacagaattttttttgtcgtgggtatgggtataggatagtaataacaggtgggtacttacccattgtcatctctattttttaaatgaactggacaggagagctaccgattatattaataaagtagaagtgggtcggccggacagaacaacaaacaacaggcggttgtattgggaaatcaacacgccgacaccatacaactcaactcgtcgattggattgagacatcaacacgacataacattcaccgccgacacagagtgcctaaacaacacaaacagtggcaaccccaaacacaaagcccttccagagtcatcgttaccaagctcaacacaagatacgagcatgtccgactctgccagatgggtcgcacattgccaaaagcaacacgatgacgcctacaccaaaacgtgacacataaggatgaagatagtgatgcaccatcgtgccaagcctcgacacacccacacgcgtcagcaatcttgatctaacacccacctttggttatttgcctgacctccaaaacagtccagaccacgaggaagggggctcgcctcattgtcgagccacatcccttaacaaggcagcttcgacttcacgtgcaaaaaaaaccccacgtccacccgcaaacctgacgccaagaagtgaaagcatgggtcgaaggtaacattgaggtcgagacgaactaaaagactgagcaatgtgacacccttaacagggaaagtggcgccggacagacgtccccaatgctttcacccaagatgccctctagcacatcgaaagactagttccctagatcaaagcaagtagcctccgtc

SEQ ID NO: 62379 - DNA, 771 bp, Zea Mays
ccacaattgagcttcgtccacctgcaccttcatccccgcgtgggagtcgctctgtcgctgctatggtgggccctgctttcgtgcggtcccacgtgtagctgctgcgaaagagggtacgaggtggggcgcgaccttcctcgccgacctcgccatcgcacggatccacacggcctctagacaccgccttcaagagcccctcgctttgatgctgagagcgttcctgagtcagatcttacgaaggcctccatggtgagcttaggaggctacaatttgtcaaaaatgcaatttcatttgatagtgaaataacatgtcaagcagttattagctactatttttaccattcatttgacctagaaaatattcatctgaatatatgttaggttgctcctttgtttcttcctcacttccgttatcttatagaatagcattggtttcttttcttttttgttctttctctcagggaccaaacctctcagatagagcaagccagaatggagaattaaaataaacaacattagcgcagatgattagatcccatagtgcaattaacaatctgtatgcaacctcatatactttcaaggttacatgaacatgagaccttcaataaaaataacatcacacttgttggtatagaccacttcttatctatctatttggaagcaccttttgttggttaatagtgttggtattccctcatttggtgtaagacccatgtactctaaatctatagcagccataaaaatagtcatatacttagcaggcacgaaaaag

SEQ ID NO: 62380 - DNA, 2211 bp, Zea Mays
attcatgtccccaaagattgaactccaactataataatccttatatctgctttcaaggaagtgactattgcagaggccagatctcactaaacctgcattcccataagaaatattggtttttgtgccatttataataaaacataatattgtatatatagtctttaaataccaataaagatacctgaagatgcagaagacatgtcggtgttcgaatttcatgcattaccatcaaagcaaaggacaacagtgttgtaccatttaacagattcagtacttctgcttctaaagaaaaaccgagtgtagaacttatgtgttctttgtccaatggaatttagatattttcaaaacagattgaagcatcaaaaggtaccttgaataatttaatggctgttggggtgccacagggagaaggtacgttcgaaaccttagatatagcataagtcatgtgcatgatatttttcttgtgagcatgtaacatgtaattctaggttattgcttctaaattatggctattcttgtttaagcttatatcaaaacaagaaagtgtgttcaacgaaatgataaatcctggcatcacagattgacaagtggagataaacgcgattcagatttgtaatatggatacatatttaccagtttcttctactgactaataaacaacaaaggagatacagaaaagaattactcaatcataagcttcaaggtcaaaatcatcagtcatgaatttcactcagatgtggattaaaaactaaatatccaaatgcttccacttgaaggttaaaaaatgcatgagctacagagtaagtaaactgggacaggaaacatgattcctcaaactgctagatgataattagtcatccatacagtcagataacttcagttgaagggtatagatatgaactgaactatagtaacataattttgaaaatggagaatggtcaactcaaagaagggtcataaaagaggcaatgatcaaaacagatggtaacagggagacacattgatgtatattgatcacctgggactaaggattgtttgacacacccaaacatgaacataacacgacaagttttggtacagccaacaactaagtgtcgcagatatgcgtatgttgcgttggatatgtgggcacacaagattggaccgagtgagaaacgatgacatacgcgatcggctaagagtagcgccaattgaagaaaagcttattcaacaccgattgagatggtttggatatgtccaccggagaccactagaggcaccggtgcatatagacaccataagatggacaataatgtgagagaggtagaggtcgaccaaacttgacatgggaggagccaatcaaaagggacttgaaagaatggaatataccaatgaagttgtgtttgaatagaagtgcttggaaagaagctacccacgtgcccgaaccgtgattaggcatttttccttatagtgctctaaaaagcttttcccctccactttctcactctctcttttgtaacatcttgttgtgtttcaactctagcctacctcaacttgcttgggactaaaagactatgttgatgatgttgatgttgtgtttcctatcctaaatgacataactcaagagcccccgagccaaaccaaggcagacctatgacctatgtctgtagaaactggagtttggtgatagatttgggtaaaatcaattcactgaaaatacataaagaggctgaaatgtgggattgtattcttttttatgatagaaagaacagggattttggtgatagagatgaagcgaacagctagaatacaaatcagacaatatgaggcgaaatgaagaaccaccaccgattaccgccacgctttcccacgcagaatcgatgtaccgtttcactcaaatcgcactaatcgacgaaatgaagacgacgaggagggaacagcgacccccaaatccccattactgcgactcagcagcgagaaccccaaccgggcgcaccgatcctgcaactccccctaaattccacgagcatccacccactacccacgcagggtaggctgtaccaggaagtgccgctaccgccgaatgcataggagtaccacgcggatttaagcagggctgggggccgaatcggaggggtataccttcgcggacggccaatcgtcggctcgaatcggcgctgcgaacgccctaccgcgatcggagagatagggccccggccttcttcacgcgag

SEQ ID NO: 62381 - DNA, 147 bp, Zea Mays
atgaataaatgcatcttgtttccaacatcatcaattcacctattttcaactagcatctttctctttccaacaacattgaatatctatctgcaaatgacatcctcagcgatcaaaagaattgttacttcatggcccaagcatacatga

SEQ ID NO: 62382 - DNA, 2235 bp, Zea Mays
cccagcctcccacgcgtgaccgtgagagggaagggggtatttaacagacggcgggccgaggatgcgagctctcgcggcagcagcaactgcagtggcggcgcctacccccacgcgcctccgcctcccgctcctctcccgcaccctgcgctctggtcactgtagaagctcttattcctccaggctcctacggttctcgtgcagtgccaccaccatgggagatgagacctcaacctcggttgctccccaggaacaggaatccactgtggctgggagtgtcaagcaacagctctccgggctggtccttatgtccctccgggctactgtgcctgaggtggaggtagaaccgatggttgaagtttcagcaaagtttgctgactaccaatgcaacaatgctatgggattatggtcaaaggttaaaggatctggaaccagtttcaaaaaccctaatgccattggacaggccattgccaagaacttgccttcttctgatattattgaatccacatctgttgctggacctggttttgtgaatattgtcttatcaaaccgctgggttgcacagagaatacaagacatgctcgttaacggtatcaagacttgggcaccaattcttccagtaaagagggcagtgattgatttttcatcacctaatattgcaaaggaaatgcatgtgggacatctaaggtctacaattattggagatacattagcacgcatgtttgagttctcgaatgttgatgttctgcgaagaaaccatgtaggagattggggtacacagttcgggatgctaatagaatatctttttgagaaatttccaaattggcaagagattggtagccaggccattggagaccttcagattttctataaagcatccaagcatagatttgacaatgatccagaatttaaagcaagggctcaacaaggagttgttcggctacagggaggagaagagagatatcgagaagcatggaaaaagatttgtgacattagcaggagtgaatttgacttggtctacaaacgcctaaatgtggtgcttgaagaaaagggggagagtttctataatccttatattcctcaagtgttggaggaattgagtagcaaaggcttgatcaaggagagtgagggtgccagagttatatttattcaaggtcatcagatccccttgatagtggttaagagtgatggtggcttcaactatgcctcgactgacttggctgccctttggtatcggctcaatgttgagcaggcagagtggatcatatacgtgacagatgttggtcagcagcagcactttgacatgtttttcagtgctgcaaagatggctggttggctgccaggtccaaacgaaaagaagtttccgaaaacaagccatgttggatttggtctagttcttggttcagatggcaagcggttccgaacgcgcagtactgaggttgttcgattggtagagctacttgatgaggctaaatctcggagcaaatcagaactactacaacggctcactgaaaatggcaaaattgttgactggacggatgaggaattagagcaaacttcagaggcagttggatatggtgctgtgaagtatgctgatctcaagaataatcgtctgactaattacacatttagttttgaacaaatgctgagcgataagggaaatactgctgtgtaccttcagtatgcacatgctcgtatttgttccattattcggaaatccaacaaggatgtggaagatctgaagatgactggagccatttctcttgaccatccagatgagcgtgtgttggggctgtatcttatccgatttgctgaggtggttgaagaggcatgcacgaatctgcttccaaatgttgtgtgtgaatacttgtacaatctatctgaaatgttcacaaaattctataccaactgtcaggtggtcgggtcaccggaggagacgagccgactgttgctttgccaagcgactgctgttgtcatgcgacagtgcttcaatctgctagggatcaccccagtctacaagctgtgatcggctgcatgtttgaagtttgatttatacattcaacatcgctttacgtagaaacccattcatcatggttgcagttttggccttgtaacctagttgaggcagttaacagactataatccatctccctgtttgaaaatagaagcaactcaaaagtttgtaacaaaatatgctctgcagagtttctattgatccattacattacgtaaaaaata

SEQ ID NO: 62383 - DNA, 2238 bp, Zea Mays
cccagcctcccacgcgtgaccgtgagagggaagggggtatttaacagacggcgggccgaggatgcgagctctcgcggcagcagcaactgcagtggcggcgcctacccccacgcgcctccgcctcccgctcctctcccgcaccctgcgctctggtcactgtagaagctcttattcctccaggctcctacggttctcgtgcagtgccaccaccatgggagatgagacctcaacctcggttgctccccaggaacaggaatccactgtgcaggctgggagtgtcaagcaacagctctccgggctggtccttatgtccctccgggctactgtgcctgaggtggaggtagaaccgatggttgaagtttcagcaaagtttgctgactaccaatgcaacaatgctatgggattatggtcaaaggttaaaggatctggaaccagtttcaaaaaccctaatgccattggacaggccattgccaagaacttgccttcttctgatattattgaatccacatctgttgctggacctggttttgtgaatattgtcttatcaaaccgctgggttgcacagagaatacaagacatgctcgttaacggtatcaagacttgggcaccaattcttccagtaaagagggcagtgattgatttttcatcacctaatattgcaaaggaaatgcatgtgggacatctaaggtctacaattattggagatacattagcacgcatgtttgagttctcgaatgttgatgttctgcgaagaaaccatgtaggagattggggtacacagttcgggatgctaatagaatatctttttgagaaatttccaaattggcaagagattggtagccaggccattggagaccttcagattttctataaagcatccaagcatagatttgacaatgatccagaatttaaagcaagggctcaacaaggagttgttcggctacagggaggagaagagagatatcgagaagcatggaaaaagatttgtgacattagcaggagtgaatttgacttggtctacaaacgcctaaatgtggtgcttgaagaaaagggggagagtttctataatccttatattcctcaagtgttggaggaattgagtagcaaaggcttgatcaaggagagtgagggtgccagagttatatttattcaaggtcatcagatccccttgatagtggttaagagtgatggtggcttcaactatgcctcgactgacttggctgccctttggtatcggctcaatgttgagcaggcagagtggatcatatacgtgacagatgttggtcagcagcagcactttgacatgtttttcagtgctgcaaagatggctggttggctgccaggtccaaacgaaaagaagtttccgaaaacaagccatgttggatttggtctagttcttggttcagatggcaagcggttccgaacgcgcagtactgaggttgttcgattggtagagctacttgatgaggctaaatctcggagcaaatcagaactactacaacggctcactgaaaatggcaaaattgttgactggacggatgaggaattagagcaaacttcagaggcagttggatatggtgctgtgaagtatgctgatctcaagaataatcgtctgactaattacacatttagttttgaacaaatgctgagcgataagggaaatactgctgtgtaccttcagtatgcacatgctcgtatttgttccattattcggaaatccaacaaggatgtggaagatctgaagatgactggagccatttctcttgaccatccagatgagcgtgtgttggggctgtatcttatccgatttgctgaggtggttgaagaggcatgcacgaatctgcttccaaatgttgtgtgtgaatacttgtacaatctatctgaaatgttcacaaaattctataccaactgtcaggtggtcgggtcaccggaggagacgagccgactgttgctttgccaagcgactgctgttgtcatgcgacagtgcttcaatctgctagggatcaccccagtctacaagctgtgatcggctgcatgtttgaagtttgatttatacattcaacatcgctttacgtagaaacccattcatcatggttgcagttttggccttgtaacctagttgaggcagttaacagactataatccatctccctgtttgaaaatagaagcaactcaaaagtttgtaacaaaatatgctctgcagagtttctattgatccattacattacgtaaaaaata

SEQ ID NO: 62384 - DNA, 2242 bp, Zea Mays
cccagcctcccacgcgtgaccgtgagagggaagggggtatttaacagacggcgggccgaggatgcgagctctcgcggcagcagcaactgcagtggcggcgcctacccccacgcgcctccgcctcccgctcctctcccgcaccctgcgctctgccaggtcactgtagaagctcttattcctccaggctcctacggttctcgtgcagtgccaccaccatgggagatgagacctcaacctcggttgctccccaggaacaggaatccactgtgcaggctgggagtgtcaagcaacagctctccgggctggtccttatgtccctccgggctactgtgcctgaggtggaggtagaaccgatggttgaagtttcagcaaagtttgctgactaccaatgcaacaatgctatgggattatggtcaaaggttaaaggatctggaaccagtttcaaaaaccctaatgccattggacaggccattgccaagaacttgccttcttctgatattattgaatccacatctgttgctggacctggttttgtgaatattgtcttatcaaaccgctgggttgcacagagaatacaagacatgctcgttaacggtatcaagacttgggcaccaattcttccagtaaagagggcagtgattgatttttcatcacctaatattgcaaaggaaatgcatgtgggacatctaaggtctacaattattggagatacattagcacgcatgtttgagttctcgaatgttgatgttctgcgaagaaaccatgtaggagattggggtacacagttcgggatgctaatagaatatctttttgagaaatttccaaattggcaagagattggtagccaggccattggagaccttcagattttctataaagcatccaagcatagatttgacaatgatccagaatttaaagcaagggctcaacaaggagttgttcggctacagggaggagaagagagatatcgagaagcatggaaaaagatttgtgacattagcaggagtgaatttgacttggtctacaaacgcctaaatgtggtgcttgaagaaaagggggagagtttctataatccttatattcctcaagtgttggaggaattgagtagcaaaggcttgatcaaggagagtgagggtgccagagttatatttattcaaggtcatcagatccccttgatagtggttaagagtgatggtggcttcaactatgcctcgactgacttggctgccctttggtatcggctcaatgttgagcaggcagagtggatcatatacgtgacagatgttggtcagcagcagcactttgacatgtttttcagtgctgcaaagatggctggttggctgccaggtccaaacgaaaagaagtttccgaaaacaagccatgttggatttggtctagttcttggttcagatggcaagcggttccgaacgcgcagtactgaggttgttcgattggtagagctacttgatgaggctaaatctcggagcaaatcagaactactacaacggctcactgaaaatggcaaaattgttgactggacggatgaggaattagagcaaacttcagaggcagttggatatggtgctgtgaagtatgctgatctcaagaataatcgtctgactaattacacatttagttttgaacaaatgctgagcgataagggaaatactgctgtgtaccttcagtatgcacatgctcgtatttgttccattattcggaaatccaacaaggatgtggaagatctgaagatgactggagccatttctcttgaccatccagatgagcgtgtgttggggctgtatcttatccgatttgctgaggtggttgaagaggcatgcacgaatctgcttccaaatgttgtgtgtgaatacttgtacaatctatctgaaatgttcacaaaattctataccaactgtcaggtggtcgggtcaccggaggagacgagccgactgttgctttgccaagcgactgctgttgtcatgcgacagtgcttcaatctgctagggatcaccccagtctacaagctgtgatcggctgcatgtttgaagtttgatttatacattcaacatcgctttacgtagaaacccattcatcatggttgcagttttggccttgtaacctagttgaggcagttaacagactataatccatctccctgtttgaaaatagaagcaactcaaaagtttgtaacaaaatatgctctgcagagtttctattgatccattacattacgtaaaaaata

SEQ ID NO: 62385 - DNA, 2182 bp, Zea Mays
ggataagtgcgcttcttctggatgaataaattgttaggtcactgtagaagctcttattcctccaggctcctacggttctcgtgcagtgccaccaccatgggagatgagacctcaacctcggttgctccccaggaacaggaatccactgtggctgggagtgtcaagcaacagctctccgggctggtccttatgtccctccgggctactgtgcctgaggtggaggtagaaccgatggttgaagtttcagcaaagtttgctgactaccaatgcaacaatgctatgggattatggtcaaaggttaaaggatctggaaccagtttcaaaaaccctaatgccattggacaggccattgccaagaacttgccttcttctgatattattgaatccacatctgttgctggacctggttttgtgaatattgtcttatcaaaccgctgggttgcacagagaatacaagacatgctcgttaacggtatcaagacttgggcaccaattcttccagtaaagagggcagtgattgatttttcatcacctaatattgcaaaggaaatgcatgtgggacatctaaggtctacaattattggagatacattagcacgcatgtttgagttctcgaatgttgatgttctgcgaagaaaccatgtaggagattggggtacacagttcgggatgctaatagaatatctttttgagaaatttccaaattggcaagagattggtagccaggccattggagaccttcagattttctataaagcatccaagcatagatttgacaatgatccagaatttaaagcaagggctcaacaaggagttgttcggctacagggaggagaagagagatatcgagaagcatggaaaaagatttgtgacattagcaggagtgaatttgacttggtctacaaacgcctaaatgtggtgcttgaagaaaagggggagagtttctataatccttatattcctcaagtgttggaggaattgagtagcaaaggcttgatcaaggagagtgagggtgccagagttatatttattcaaggtcatcagatccccttgatagtggttaagagtgatggtggcttcaactatgcctcgactgacttggctgccctttggtatcggctcaatgttgagcaggcagagtggatcatatacgtgacagatgttggtcagcagcagcactttgacatgtttttcagtgctgcaaagatggctggttggctgccaggtccaaacgaaaagaagtttccgaaaacaagccatgttggatttggtctagttcttggttcagatggcaagcggttccgaacgcgcagtactgaggttgttcgattggtagagctacttgatgaggctaaatctcggagcaaatcagaactactacaacggctcactgaaaatggcaaaattgttgactggacggatgaggaattagagcaaacttcagaggcagttggatatggtgctgtgaagtatgctgatctcaagaataatcgtctgactaattacacatttagttttgaacaaatgctgagcgataagggaaatactgctgtgtaccttcagtatgcacatgctcgtatttgttccattattcggaaatccaacaaggatgtggaagatctgaagatgactggagccatttctcttgaccatccagatgagcgtgtgttggggctgtatcttatccgatttgctgaggtggttgaagaggcatgcacgaatctgcttccaaatgttgtgtgtgaatacttgtacaatctatctgaaatgttcacaaaattctataccaactgtcaggtggtcgggtcaccggaggagacgagccgactgttgctttgccaagcgactgctgttgtcatgcgacagtgcttcaatctgctagggatcaccccagtctacaagctgtgatcggctgcatgtttgaagtttgatttatacattcaacatcgctttacgtagaaacccattcatcatggttgcagttttggccttgtaacctagttgaggcagttaacagactataatccatctccctgtttgaaaatagaagcaactcaaaagtttgtaacaaaatatgctctgcagagtttctattgatccattacattacgtattttggtgtttgtattccctcatggcagctcatcagccaatgctgtatggcaagttgctagtcaggtgt

SEQ ID NO: 62386 - DNA, 2358 bp, Zea Mays
cacgctagtacgctacgctaccggctgcggtggctctcccgagtcgaagtggcagctcccagcctcccacgcgtgaccgtgagagggaagggggtatttaacagacggcgggccgaggatgcgagctctcgcggcagcagcaactgcagtggcggcgcctacccccacgcgcctccgcctcccgctcctctcccgcaccctgcgctctgccaggtcactgtagaagctcttattcctccaggctcctacggttctcgtgcagtgccaccaccatgggagatgagacctcaacctcggttgctccccaggaacaggaatccactgtggctgggagtgtcaagcaacagctctccgggctggtccttatgtccctccgggctactgtgcctgaggtggaggtagaaccgatggttgaagtttcagcaaagtttgctgactaccaatgcaacaatgctatgggattatggtcaaaggttaaaggatctggaaccagtttcaaaaaccctaatgccattggacaggccattgccaagaacttgccttcttctgatattattgaatccacatctgttgctggacctggttttgtgaatattgtcttatcaaaccgctgggttgcacagagaatacaagacatgctcgttaacggtatcaagacttgggcaccaattcttccagtaaagagggcagtgattgatttttcatcacctaatattgcaaaggaaatgcatgtgggacatctaaggtctacaattattggagatacattagcacgcatgtttgagttctcgaatgttgatgttctgcgaagaaaccatgtaggagattggggtacacagttcgggatgctaatagaatatctttttgagaaatttccaaattggcaagagattggtagccaggccattggagaccttcagattttctataaagcatccaagcatagatttgacaatgatccagaatttaaagcaagggctcaacaaggagttgttcggctacagggaggagaagagagatatcgagaagcatggaaaaagatttgtgacattagcaggagtgaatttgacttggtctacaaacgcctaaatgtggtgcttgaagaaaagggggagagtttctataatccttatattcctcaagtgttggaggaattgagtagcaaaggcttgatcaaggagagtgagggtgccagagttatatttattcaaggtcatcagatccccttgatagtggttaagagtgatggtggcttcaactatgcctcgactgacttggctgccctttggtatcggctcaatgttgagcaggcagagtggatcatatacgtgacagatgttggtcagcagcagcactttgacatgtttttcagtgctgcaaagatggctggttggctgccaggtccaaacgaaaagaagtttccgaaaacaagccatgttggatttggtctagttcttggttcagatggcaagcggttccgaacgcgcagtactgaggttgttcgattggtagagctacttgatgaggctaaatctcggagcaaatcagaactactacaacggctcactgaaaatggcaaaattgttgactggacggatgaggaattagagcaaacttcagaggcagttggatatggtgctgtgaagtatgctgatctcaagaataatcgtctgactaattacacatttagttttgaacaaatgctgagcgataagggaaatactgctgtgtaccttcagtatgcacatgctcgtatttgttccattattcggaaatccaacaaggatgtggaagatctgaagatgactggagccatttctcttgaccatccagatgagcgtgtgttggggctgtatcttatccgatttgctgaggtggttgaagaggcatgcacgaatctgcttccaaatgttgtgtgtgaatacttgtacaatctatctgaaatgttcacaaaattctataccaactgtcaggtggtcgggtcaccggaggagacgagccgactgttgctttgccaagcgactgctgttgtcatgcgacagtgcttcaatctgctagggatcaccccagtctacaagctgtgatcggctgcatgtttgaagtttgatttatacattcaacatcgctttacgtagaaacccattcatcatggttgcagttttggccttgtaacctagttgaggcagttaacagactataatccatctccctgtttgaaaatagaagcaactcaaaagtttgtaacaaaatatgctctgcagagtttctattgatccattacattacgtattttggtgtttgtattccctcatggcagctcatcagccaatgctgtatggcaagttgctagtcaggtgt

SEQ ID NO: 62387 - DNA, 4004 bp, Zea Mays
  misc_feature (2258)..(2357): n is a, c, g, or t
ccgcattcatctcattgtactactaccttctctcccgtgacacgccatctccgcaaaaccgccgctcgtcacctctcaacgccaccatgctccggccggcagccggagggctgaccctttccggttcctccaccgcgcgacctcttcctcctctcgcccgttcttagcccaaccaccatcaccgtcatcattcataaacaaaaaggcaggcaggcagtcagtccctcggcaggcacgagcgcagacggtgcgaggcgtccgcgtcgcgtccttccacctgtctccttcgccttgcgtgctcctggcttcaagaaaccgccgcacgccatccagcctgcggtgcggtggtcgcgcagcccgcctggctgccaccgctttccctctcctttcgcttctccgctaccgctaccgctaccaccagcggcgcgggcctccgggtcgtccggccggattcgttccccgggccgtgcaaccacgcacgcgcttgggttccgctcgtcgccgaaagcttctgctctgctcagtttccagctgggaggaggcgccgcctgcggaccgctgcgcaccacggagggaggtgaacttctttctgccacccactacatgactatcgacatcttgttggtggtggacaagctctcctctcagcctcagtgtgtccttcgcgaggctctggaatctcgcctgacgaacaaggttgctcctgcccctccatgatccacctcaactcctcaagccccagcagaatttcagcttctggtggctgcctttgcccctctgtttcctgcctgtcgtcctctcgcaatcctgaattgtgtctcattgcaaaagccctctacttgcgtcgctgaaataaactagtttgtccttgcaatcctgggtgggtgtctcattgcttcagcgctctgcctgcgcctctgaaggctgaagcaaagtatttctgcttcctcttacatagcccttccagcctgtctgcatcaccgtgccattcgtaaccccttcatccttctagctcaacttggactcgccatggatagcacagttgttggtctcaaactggttgtgctagccctttctgtggccatctggttgtttggcacctgctgccatgccgatttcacccctgcagacgactacctcatcaactgcggctccacggtcgacgcgactgtcgaccacagggttttcgtgtctgacacttctggggcagccatcctgacgaccccgacccagagcaccgccgcgaccacctcgccgaatttggtctcagggtttgaaggtgctatgctgtatcagactgctaggatattcgttgtgccatcgtcctatgccttcatgctcaagagccatggccgacattttgtccgccttcacttcttccccttcaaataccagagctatgacctcaccacggcgaccttcaaggtgtccacgcaggatgtcgtgctcctcgacaatttcacagcgcccagtagttcttcgccggtgttcaaggagtattccctgaacattaccagggacatgctcatcctcacatttgtgcctcttgggaacaacacaccggccttcgtcaatgctatcgaggtcatctctgtccctgatctcataaccgactcggtactaagtctggaccctgtcggtcagtatcttgggctgtcaacacagccgctgcagacattctacaggatcaacgtggggggacccaaggtgactcctgagaacgacacgctctggcggacatgggttactgatcaaagctccttcgtaaattccactcccactacacttgccaatttcccaggaaagctgaattttcagaacggattggcaacagaggaggatgcaccggacagtgtgtacaatactgcaaggcggttgcaaaacagtactcgctccgtgtccaatatgacgtggcaatttgatgttgatgcccgttcaagctatctcattcggttccatttatgtgacattgtgagcaaggctccttatcagctcctgtttgatgtatatgtggatagctggtcggtggtgaaagatctagatctctccgataaagcatttggcaacttggcaacaccatattacattgatgctgtcttgctatcaagtgatccatctggtaagctcagtgtcagcattgggccttctgctgtaaagatagcagcgccggatggtatcctgaatggcttggagatcatgaagatgaacatcagtacagggtctgtttccattgtggcaccaccttcagtggcaagaannnnnnnnnnnnnnnnnnnnnnnnnnnnnnnnnnnnnnnnnnnnnnnnnnnnnnnnnnnnnnnnnnnnnnnnnnnnnnnnnnnnnnnnnnnnnnnnnnnncaagctacatccaccagcaccaagtcggccctcaagttcttggacacccctcaatggtcttagcttccttaccacaggcagccgaaccaccagtcggaccactcttacgtctggaactaccggtgacacgagctaccgaattccttttgttgtgctgcaagatgcgacaaatcactttgatgagcagatggtcattggagttggaggctttgggaaggtctacaaagcagtgatgcaggatggaagcaaacttgcagtaaagcggggcaaccagaagtcccaccaagggctgagggagttccgtacagagattgaattgctgtcagggctgcgacaccgtcatctcgtgtcgctcattggttactgtgatgaacacaacgagatgatcttggtgtatgaatacatggagaaaggaactctgaagagccatctttatggcggtgatatgccgcctctcagctggaagaaaagactggaaatctgcgtaggagcagcaagagggctccactaccttcacaccggttttgcccagtcaatcatacaccgtgacgtcaagtcagcaaacatactactcgatgaaaatctcttggccaaggtttctgattttggcctctcaaaggttgggcctgaattcgaccagacgcatgtgagcacagcagtgaaagggagcttcgggtaccttgatcctgagtacttccggagacagaagctgactgacaaatcagatgtgtactcttttggtgtggtgctgcttgaggtgatttgtgcgaggccggttatcgacccgactcttccaagggacatgatcaacctcgcggagtgggctatcaagtggcaaaagagaggagagcttgatcagattgtcgaccagcgcattgctgggacagtcaggcctgaagcactgaggaagtttggagagacggtggagaaatgccttgcagagtatggtgtcgagcgtcctactatgggggatgtgctgtggaacctggagtttgtgctgcagctgcaggaggcaggtccagacatgtccaacatcaacagtatgaatcagatctctgaactcccttcaaatccaaagagagttagctccctggatatcagcagtacagatcaaagccgcgtgcccatcgactactccgacatgtcaacgagtaacgccttctcgcagctaatcaatgcagaaggaaggtgaactggatagaattgttccagtcactgaaaaaaatgtttgttacaaaaactagagatgcctcttgtgtgactacccagcctatcccttctcacatatacaacaccaagttgtgaatcttattgaaattttgtttgccacttgtaactacttatgttctagaaaagggtgagtagctttattgcaatcgtcttttgctcaaatatgtctgtacatgttctgtcacgacccaccagccgaccttcattcgctaagatagttcggcaacatgcttaacgtaaatacagcacactatcatacgccaatggcgccgagatcacatattcagcaaaaagttgctgcacagatgctacggtagtttctagtcaaagagaaattcatacctacgaagagatgaactagatccgttttatctttttgagccagattaatcgaattctaactaaaggaattgggat

SEQ ID NO: 62388 - DNA, 4057 bp, Zea Mays
  misc_feature (2311)..(2410): n is a, c, g, or t
gttccattccgtcatctactacgcggacccgccccctctgccgcgttccaccctaccccggtccccggctggctggctggcccgcccgcattcatctcattgtactactaccttctctcccgtgacacgccatctccgcaaaaccgccgctcgtcacctctcaacgccaccatgctccggccggcagccggagggctgaccctttccggttcctccaccgcgcgacctcttcctcctctcgcccgttcttagcccaaccaccatcaccgtcatcattcataaacaaaaaggcaggcaggcagtcagtccctcggcaggcacgagcgcagacggtgcgaggcgtccgcgtcgcgtccttccacctgtctccttcgccttgcgtgctcctggcttcaagaaaccgccgcacgccatccagcctgcggtgcggtggtcgcgcagcccgcctggctgccaccgctttccctctcctttcgcttctccgctaccgctaccgctaccaccagcggcgcgggcctccgggtcgtccggccggattcgttccccgggccgtgcaaccacgcacgcgcttgggttccgctcgtcgccgaaagcttctgctctgctcagtttccagctgggaggaggcgccgcctgcggaccgctgcgcaccacggagggagatcgacatcttgttggtggtggacaagctctcctctcagcctcagtgtgtccttcgcgaggctctggaatctcgcctgacgaacaaggttgctcctgcccctccatgatccacctcaactcctcaagccccagcagaatttcagcttctggtggctgcctttgcccctctgtttcctgcctgtcgtcctctcgcaatcctgaattgtgtctcattgcaaaagccctctacttgcgtcgctgaaataaactagtttgtccttgcaatcctgggtgggtgtctcattgcttcagcgctctgcctgcgcctctgaaggctgaagcaaagtatttctgcttcctcttacatagcccttccagcctgtctgcatcaccgtgccattcgtaaccccttcatccttctagctcaacttggactcgccatggatagcacagttgttggtctcaaactggttgtgctagccctttctgtggccatctggttgtttggcacctgctgccatgccgatttcacccctgcagacgactacctcatcaactgcggctccacggtcgacgcgactgtcgaccacagggttttcgtgtctgacacttctggggcagccatcctgacgaccccgacccagagcaccgccgcgaccacctcgccgaatttggtctcagggtttgaaggtgctatgctgtatcagactgctaggatattcgttgtgccatcgtcctatgccttcatgctcaagagccatggccgacattttgtccgccttcacttcttccccttcaaataccagagctatgacctcaccacggcgaccttcaaggtgtccacgcaggatgtcgtgctcctcgacaatttcacagcgcccagtagttcttcgccggtgttcaaggagtattccctgaacattaccagggacatgctcatcctcacatttgtgcctcttgggaacaacacaccggccttcgtcaatgctatcgaggtcatctctgtccctgatctcataaccgactcggtactaagtctggaccctgtcggtcagtatcttgggctgtcaacacagccgctgcagacattctacaggatcaacgtggggggacccaaggtgactcctgagaacgacacgctctggcggacatgggttactgatcaaagctccttcgtaaattccactcccactacacttgccaatttcccaggaaagctgaattttcagaacggattggcaacagaggaggatgcaccggacagtgtgtacaatactgcaaggcggttgcaaaacagtactcgctccgtgtccaatatgacgtggcaatttgatgttgatgcccgttcaagctatctcattcggttccatttatgtgacattgtgagcaaggctccttatcagctcctgtttgatgtatatgtggatagctggtcggtggtgaaagatctagatctctccgataaagcatttggcaacttggcaacaccatattacattgatgctgtcttgctatcaagtgatccatctggtaagctcagtgtcagcattgggccttctgctgtaaagatagcagcgccggatggtatcctgaatggcttggagatcatgaagatgaacatcagtacagggtctgtttccattgtggcaccaccttcagtggcaagaannnnnnnnnnnnnnnnnnnnnnnnnnnnnnnnnnnnnnnnnnnnnnnnnnnnnnnnnnnnnnnnnnnnnnnnnnnnnnnnnnnnnnnnnnnnnnnnnnnncaagctacatccaccagcaccaagtcggccctcaagttcttggacacccctcaatggtcttagcttccttaccacaggcagccgaaccaccagtcggaccactcttacgtctggaactaccggtgacacgagctaccgaattccttttgttgtgctgcaagatgcgacaaatcactttgatgagcagatggtcattggagttggaggctttgggaaggtctacaaagcagtgatgcaggatggaagcaaacttgcagtaaagcggggcaaccagaagtcccaccaagggctgagggagttccgtacagagattgaattgctgtcagggctgcgacaccgtcatctcgtgtcgctcattggttactgtgatgaacacaacgagatgatcttggtgtatgaatacatggagaaaggaactctgaagagccatctttatggcggtgatatgccgcctctcagctggaagaaaagactggaaatctgcgtaggagcagcaagagggctccactaccttcacaccggttttgcccagtcaatcatacaccgtgacgtcaagtcagcaaacatactactcgatgaaaatctcttggccaaggtttctgattttggcctctcaaaggttgggcctgaattcgaccagacgcatgtgagcacagcagtgaaagggagcttcgggtaccttgatcctgagtacttccggagacagaagctgactgacaaatcagatgtgtactcttttggtgtggtgctgcttgaggtgatttgtgcgaggccggttatcgacccgactcttccaagggacatgatcaacctcgcggagtgggctatcaagtggcaaaagagaggagagcttgatcagattgtcgaccagcgcattgctgggacagtcaggcctgaagcactgaggaagtttggagagacggtggagaaatgccttgcagagtatggtgtcgagcgtcctactatgggggatgtgctgtggaacctggagtttgtgctgcagctgcaggaggcaggtccagacatgtccaacatcaacagtatgaatcagatctctgaactcccttcaaatccaaagagagttagctccctggatatcagcagtacagatcaaagccgcgtgcccatcgactactccgacatgtcaacgagtaacgccttctcgcagctaatcaatgcagaaggaaggtgaactggatagaattgttccagtcactgaaaaaaatgtttgttacaaaaactagagatgcctcttgtgtgactacccagcctatcccttctcacatatacaacaccaagttgtgaatcttattgaaattttgtttgccacttgtaactacttatgttctagaaaagggtgagtagctttattgcaatcgtcttttgctcaaatatgtctgtacatgttctgtcacgacccaccagccgaccttcattcgctaagatagttcggcaacatgcttaacgtaaatacagcacactatcatacgccaatggcgccgagatcacatattcagcaaaaagttgctgcacagatgctacggtagtttctagtcaaagagaaattcatacctacgaagagatgaactagatccgttttatctttttgagccagattaatcgaattctaactaaaggaattgggat

SEQ ID NO: 62389 - DNA, 997 bp, Zea Mays
cggccaccccctgagcctcatgagatcagactaacaatcaggctgaccagctgctgtgctccacgcgccagggaacggcccagtgggagggaaagcctcacaccgtcacgcggtagaggtgctcgacgaaatggccacttggcgggctcacggtcaagggacgtcccgcgggccgttcagaagagagtaaccactctcctccttgggctcagtgcacaggtcacttcaggatgcgagagccaggttgttggagcgtaagagccaaggagggatatggaaggtcagtgagaacagagaagatgccaacgggaaatttccatccggaacactgtgacatatgtacctgtgttcctccatgtcattgtgacaatgtcctccgcagaatatgcagagagccagacacgggtactgaaagaaaatcaatgccaagtggaagagctcctctgctcgtgcaagactcttttttgtggccatcgccaatctgccaggaagattcatgttatttctgaaggagcaagctagaatgcactgttaatcactgttgttgtgtcgactacttgtaattttgcactacagctgttgaaactgctcactttagcttacatttgtgcttcgtctcgagctatccttgacttaattcttgtggagaaagttaggaggacacagcttcatagcgcaacgttgcaagcaacagaaatggaaaagaaaaaacaatccttccagagttactgaagcaaactggaaagctctacgaataacggtgatgtgaaaaatgcagaagggggtagctgtagcagcttacagggatcacacgctttttttcttcacttattatacttgttccttgttgtgaacaagttaaaagcacaataactttctagctgttgtgtgacatggcactgagttgtactaaatacaagcatcaatggttctaagtcgtatgttccattatcaaggaaattgtatttttcccacgatgaagaattttaaatttcac

SEQ ID NO: 62390 - DNA, 2066 bp, Zea Mays
tcgccacgtaacaactcccccaatccgtcccgtcggccggacgagcagggcccaagggcccaccttaccatggcgaccgccactgccgcccccgtccccgccggcggccacccgtaccgccgcgcccgcactcgctgcggcccaccgcgcctgcaccgcctgcgcttcccggccgcagcagcagccgcttcgtcttccctgcccgccccgtcgtccatgctgccaccgctgccagatggaggcgggcggctggtggcggagctggtgtgcgcgttcaacgagctcacggagcggatgggggaggacctggcgacgtcctcctcgtcgagcctgctcttccgtgtgctgaagctggcgctccccgccctccgcgacgtggagggcggccgggcactcgcacgcgcgctcgccgtcgccgcgaccctcgctgacctccagatggatgctgaagtcatatcagccggcatactaagagaagcattagatgcaggagctgtaagaatgagggatgtaaaaacacagattgggatcagcacagctcatttgctgcatgacagcttaaggattaagcatgctccttcgaagcttgacgtattggatgatgaaggtgcaagcacattgagaaggtttattctttcatactatgatatcagggcagtcatattggagcttggaatgaagcttgatatgatgagacaccttgattacctccctaagtatttgcagcagataaaatctctcgaagtcatgaagatatatgccccacttgcacatgctgttggagcgggtaatctgtcactagaattagaggatctttcatttcgttacttgtttcctcattcctatgaccatgttgatcagtggttgagaagccaagaaggtgactgcaaggctataataaatttgtacaaggagcagttgcttcaagcactgcaggctgataatgagttgaggaggattgcacaggacatctcaattcaagggaggtataaaagccgtttcagtactatgaagaagctagtaaaagatggacggaagccagaagaagttaaagacattctaggtttgagggtaatcttggagcctcggtgtggtggcaattcatctgattggggccctagggcttgccacaggacacatgaaattattcaagctatgtggaaggaaatcccgggtagaacaaaagattatataactcacccaaaacgaaatggttaccagagcttgcatgtggccatcgatgtcagtgaacctgggaaggtgaggccattaatggaggtacagatacgcaccaaggagatgcataggtttgctgttggtggagaggcatctcactctctctacaagggtggtcttactgatcctggagaggctaaaaggctcaagactattatgttggcggcagcggagttagcagctctgcgcctacgagacctaccaggcagtgaccacgtagttgggaactgcaagaacccggctttctgtcagcttgacaaaaatggggatgggagaatcagcatcgaggagctcactgaggtgatggaggatctaggtgctggaggcgaagacgcaacagagctcatgcatcttcttgatgcaaacagtgacggctccttgagctctgacgaattcgagtcattccagagacaatcgaagtgatgagaaacttggaggacgatgataaccactataggaagatcttgaaggagaagctgcacacgatcgacagtgcaggtctcatccatgtgtaccgcaaggagctcagtgacaaattgcttgtgggctgacctggcagccatcttattgttgttttgtatgtataccacactgagaggtgactccagcactgatctgtaaatagtcgttgaacgtacgtggtatccagcaatattacggtagtgaatttatagggtggattgcgagatcaagaaatgaaggtaaatatataagagattcaaagatttagaggtaaatatataagaggttcgaagatttagacaggttcgaaccatataacaccctatgtccttttagtgttcattgtctatatacaatgtgatcagatg

SEQ ID NO: 62391 - DNA, 2224 bp, Zea Mays
tcgccacgtaacaactcccccaatccgtcccgtcggccggacgagcagggcccaagggcccaccttaccatggcgaccgccactgccgcccccgtccccgccggcggccacccgtaccgccgcgcccgcactcgctgcggcccaccgcgcctgcaccgcctgcgcttcccggccgcagcagcagccgcttcgtcttccctgcccgccccgtcgtccatgctgccaccgctgccagatggaggcgggcggctggtggcggagctggtgtgcgcgttcaacgagctcacggagcggatgggggaggacctggcgacgtcctcctcgtcgagcctgctcttccgtgtgctgaagctggcgctccccgccctccgcgacgtggagggcggccgggcactcgcacgcgcgctcgccgtcgccgcgaccctcgctgacctccagattactctgttcacttaacaaagttaacatacttacatttcctaatgataacggacctctcttgaatcagaactttcctgcatttcgtaaattgcacatttttgccccatcaagctctcaaagtttaccaggcttttgaattgaatgctgaacacagatggatgctgaagtcatatcagccggcatactaagagaagcattagatgcaggagctgtaagaatgagggatgtaaaaacacagattgggatcagcacagctcatttgctgcatgacagcttaaggattaagcatgctccttcgaagcttgacgtattggatgatgaaggtgcaagcacattgagaaggtttattctttcatactatgatatcagggcagtcatattggagcttggaatgaagcttgatatgatgagacaccttgattacctccctaagtatttgcagcagataaaatctctcgaagtcatgaagatatatgccccacttgcacatgctgttggagcgggtaatctgtcactagaattagaggatctttcatttcgttacttgtttcctcattcctatgaccatgttgatcagtggttgagaagccaagaaggtgactgcaaggctataataaatttgtacaaggagcagttgcttcaagcactgcaggctgataatgagttgaggaggattgcacaggacatctcaattcaagggaggtataaaagccgtttcagtactatgaagaagctagtaaaagatggacggaagccagaagaagttaaagacattctaggtttgagggtaatcttggagcctcggtgtggtggcaattcatctgattggggccctagggcttgccacaggacacatgaaattattcaagctatgtggaaggaaatcccgggtagaacaaaagattatataactcacccaaaacgaaatggttaccagagcttgcatgtggccatcgatgtcagtgaacctgggaaggtgaggccattaatggaggtacagatacgcaccaaggagatgcataggtttgctgttggtggagaggcatctcactctctctacaagggtggtcttactgatcctggagaggctaaaaggctcaagactattatgttggcggcagcggagttagcagctctgcgcctacgagacctaccaggcagtgaccacgtagttgggaactgcaagaacccggctttctgtcagcttgacaaaaatggggatgggagaatcagcatcgaggagctcactgaggtgatggaggatctaggtgctggaggcgaagacgcaacagagctcatgcatcttcttgatgcaaacagtgacggctccttgagctctgacgaattcgagtcattccagagacagatcgaagtgatgagaaacttggaggacgatgataaccactataggaagatcttgaaggagaagctgcacacgatcgacagtgcaggtctcatccatgtgtaccgcaaggagctcagtgacaaattgcttgtgggctgacctggcagccatcttattgttgttttgtatgtataccacactgagaggtgactccagcactgatctgtaaatagtcgttgaacgtacgtggtatccagcaatattacggtagtgaatttatagggtggattgcgagatcaagaaatgaaggtaaatatataagagattcaaagatttagaggtaaatatataagaggttcgaagatttagacaggttcgaaccatataacaccctatgtccttttagtgttcattgtctatatacaatgtgatcagatg

SEQ ID NO: 62392 - DNA, 2485 bp, Zea Mays
catgtttgtaggaagatatgtaggtgtaaaatgcacctgaatttgtgtcctgtgtagctgcaacctccggctgcaacttgagcaacggcacctggtgaaatcaagacatgttgacctattactttcattggaagggacatttttcttgatcctgtctaagaatataacagatatttgtataagttacctttaagcgctttatgtactcactacttaaatatctacattgcatttccattgatatatatgtggtggacctgcatattttactcatcacttaggtcatttcatagccataatagaataaatgtatctattttatctacatgaggtccatatttttttacctctcaaagccaatctacgttaattcaaaatatgtttctgagcttaccgtgactctcttgtatccattaggaggacctaccaattagactatatgttaaatatgttaaggaatattttatgtcagaaagtttgaggcatattttctaagacagagaaattgcatctgatgtcaagttctctttcgacattgtgcgcttttaagtgcaggtacagaatcagggatggatccttctccttgagacgattagccgacagatctatcacttggaaccgatgacagatcaatcattttcattagaagcaaataaagcatgtagcatttcttgggtcccctccaaaccaaaggaaaaatgctaaaagaacattgcattcctacttcttaatcgtgttagataaaaatattggtggcggtgtgtccgtgtcacaatggtcgaaagcaagcaacatcgcaatataaatacatgagtgtacatgttgtcactgaaagaggtagtgcttagaacttacctaaaaaggagctgaacattcctatcaatatatgtgcaatggacaaccacatgtccatgggaatccttgatgtacagaaaaacaataaatacgtgagtacacatatgtttaactaagtttttaatctgctaactacaattgtattactaatattaaagtgtatggaagcatgtaaatgaaaattataacagatctagacaacagtaaagaggccttctcgattagtgttcaaaccacaacactgtggttgcattaatcctcaacacaaaggaaaataatatagtatgtgagtatcaatgctatttaccaaaattttattacattctctatgaccaaaaaatcatggagaatgcgagttttttcaaacgtatgaatatttgaaagaatctaaaacagtagtgttcttaataatttgaaatacgatctcaacctctactaaataaacaacagtgaaggctctcatttttttgtctattccaaaagaagaacaatgtaacctcggctaacaaacatatagcgccaaggctaaaattaataatgactttcgtgcttattgtatctccatcatccttccccatttaaacacaatagtcagtaaatgacgtgctacaggattaataaacagctgaggacaatccaaccccataccttccatggattaagctgatgctgaaccattgtattctagccatgttcgaagtaataataaacatggaatacataacaatggccttgcatcacgtaaaagcaaaagaaggtggcagtgcccttcggccactagcaatccttgaatagattaaaaaggaaaaagaacaacagtggttgcagcaaatactcatcgagaactgttagttaaccaatccaaaaaaacaataatataatgcttgcacagggaggaaaatctatgattctaaactaggtggagctataaaacataagtagcagttttatttctatccttagtacatatagtcatttgtgtgttgtataggaaatcaggcatgaattgaaaagaaaagtattaatgaaggaactgaaagattgtagggtaaatcgtctagaatggttggaggaaatataagtaacagttctgttaccatctgttatataaagagttttatgttaaagtgatttgagcatattcatatagtaaagtcacagtgcctttcacgaatatcacgtacctaattaataacatttatcccattcttcctagggataaaatggatattcatttgataaggaaaatggatgtaataatggtaaaactatatacagaatgagaacccgatgcttgatagaggagcagtgatatggtacatatatcctttgtctcaacaattttaacctttcttcctcagcttgtctattgtggcatccggcgtggaagcacaaaacgttgtagcatatggtgtggaaacatcggaggagctccggccaccgctactggcaatctcggagccccacgacttcttggcctgcgggagcggtctctccctgaaggctgactctaggcaccatagaagacagagcagatcttcgacgatgagaatggggacagattggagcagcagctgcggccgaggcacaagctgatcggtgggaggagaaccaagcagagcagctttag

SEQ ID NO: 62393 - DNA, 1465 bp, Zea Mays
attcgagtttcatttattaatgaacatggtgaggaagaggttggaattgatggtggtggaattttcaaggatttcatggaaaatattactcgagcggcttttgatgtgcagtacggtctcttcaaggatcaggattggttcatgaactacatctgcaatatttccattttcttggaagtctacttgggaaggcaatgtatgaaggcatacttgttgacttgccgtttgcaacgttcttcttgagcaagttgaaacaaaagtacaattttttaaatgatcttccttcattggatccagaattgtatcggcatcttctatttttaaagcattataatggtgatatctcagagttggaactatattttgttattgtaaataatgaatatggtgaacaatgtgaagaagaacttctccctggtgggaggcacatgcgtgtaacaaatgataatgttattacttttatccatcttgtcgccaatcatcggttaaactaccagatccgtgcacaaagtacacacttcttgagaggttttcagcagcttataccaaaagattggattgatatgttcaatgaacatgaaattcaggttcttatatctggatctttagaaagcttggatattgatgacctgcggtcgaacaccaactattctgcaggatatcatccggaccatgagcttattgagatgttttgggaggtcttgaagagcttaagttcggacaaccagaaaaagtttctcaagtttgttactggatgttctcgtggccccctccttggatttcagtatctcgaaccaaaattctgcattcagagagctggtgttccagggctggaggagcatgcagaccgcttgcctacatcagctacctgcatgaaccttctgaagcttccaccctataaaagcaaggagcagatgcaaaccaaactattgtatgcgataaactcagaagctggttttgatctaagttgatcatgttcgggattcagtatttgtgcagtgtagatagttgttagagaacagcttaaaggcacccagagccaaaccaccaaccctcggcctcattcgaagccccatgaggccacgaaggaaaaaagaaaagaaagaaaaggaagaagaaaagacacttgtttctcaaaatagttggatgtgtggagggagtctgcaatatactccctccgctttttttatttgtcatggtttagtttaaaaatgaactgccagtaaagaaaactagggcttcccaacataaataggtggacgctgtttaatcaatcatggacatgtacgtatgtattctatacagaaatttctatttctatatttaaccagtgctggttttgcacgaccaattggtggtttcaatcttgcagagaaactgatgccctcattgggccatggcccatggctgcgtagataattctccgctataagatcttctcagcacgataaaaaagataaaaaaa

SEQ ID NO: 62394 - DNA, 1371 bp, Zea Mays
tagattcgagtttcatttattaatgaacatggtgaggaagaggttggaattgatggtggtggaattttcaaggatttcatggaaaatattactcgagcggcttttgatgtgcagtacggtctcttcaaggagactgctgatcatcttttgtacccaaacccaggatcaggattggttcatgaactacatctgcaatatttccattttcttggaagtctacttgggaaggcaatgtatgaaggcatacttgttgacttgccgtttgcaacgttcttcttgagcaagttgaaacaaaagtacaattttttaaatgatcttccttcattggatccagaattgtatcggcatcttctatttttaaagcattataatggtgatatctcagagttggaactatattttgttattgtaaataatgaatatggtgaacaatgtgaagaagaacttctccctggtgggaggcacatgcgtgtaacaaatgataatgttattacttttatccatcttgtcgccaatcatcggttaaactaccagatccgtgcacaaagtacacacttcttgagaggttttcagcagcttataccaaaagattggattgatatgttcaatgaacatgaaattcaggttcttatatctggatctttagaaagcttggatattgatgacctgcggtcgaacaccaactattctgcaggatatcatccggaccatgagcttattgagatgttttgggaggtcttgaagagcttaagttcggacaaccagaaaaagtttctcaatatctcgaaccaaaattctgcattcagagagctggtgttccagggctggaggagcatgcagaccgcttgcctacatcagctacctgcatgaaccttctgaagcttccaccctataaaagcaaggagcagatgcaaaccaaactattgtatgcgataaactcagaagctggttttgatctaagttgatcatgttcgggattcagtatttgtgcagtgtagatagttgttagagaacagcttaaaggcacccagagccaaaccaccaaccctcggcctcattcgaagccccatgaggccacgaaggaaaaaagaaaagaaagaaaaggaagaagaaaagacacttgtttctcaaaatagttggatgtgtggagggagtctgcaatatactccctccgctttttttatttgtcatggtttagtttaaaaatgaactgccagtaaagaaaactagggcttcccaacataaataggtggacgctgtttaatcaatcatggacatagaaactgatgccctcattgggccatggcccatggctgcgtagataattctccgctataagatcttctcagcacgataaaaaagataaaaaaa

SEQ ID NO: 62395 - DNA, 1414 bp, Zea Mays
tagattcgagtttcatttattaatgaacatggtgaggaagaggttggaattgatggtggtggaattttcaaggatttcatggaaaatattactcgagcggcttttgatgtgcagtacggtctcttcaaggagactgctgatcatcttttgtacccaaacccaggatcaggattggttcatgaactacatctgcaatatttccattttcttggaagtctacttgggaaggcaatgtatgaaggcatacttgttgacttgccgtttgcaacgttcttcttgagcaagttgaaacaaaagtacaattttttaaatgatcttccttcattggatccagaattgtatcggcatcttctatttttaaagcattataatggtgatatctcagagttggaactatattttgttattgtaaataatgaatatggtgaacaatgtgaagaagaacttctccctggtgggaggcacatgcgtgtaacaaatgataatgttattacttttatccatcttgtcgccaatcatcggttaaactaccagatccgtgcacaaagtacacacttcttgagaggttttcagcagcttataccaaaagattggattgatatgttcaatgaacatgaaattcaggttcttatatctggatctttagaaagcttggatattgatgacctgcggtcgaacaccaactattctgcaggatatcatccggaccatgagcttattgagatgttttgggaggtcttgaagagcttaagttcggacaaccagaaaaagtttctcaagtttgttactggatgttctcgtggccccctccttggatttcagtatctcgaaccaaaattctgcattcagagagctggtgttccagggctggaggagcatgcagaccgcttgcctacatcagctacctgcatgaaccttctgaagcttccaccctataaaagcaaggagcagatgcaaaccaaactattgtatgcgataaactcagaagctggttttgatctaagttgatcatgttcgggattcagtatttgtgcagtgtagatagttgttagagaacagcttaaaggcacccagagccaaaccaccaaccctcggcctcattcgaagccccatgaggccacgaaggaaaaaagaaaagaaagaaaaggaagaagaaaagacacttgtttctcaaaatagttggatgtgtggagggagtctgcaatatactccctccgctttttttatttgtcatggtttagtttaaaaatgaactgccagtaaagaaaactagggcttcccaacataaataggtggacgctgtttaatcaatcatggacatagaaactgatgccctcattgggccatggcccatggctgcgtagataattctccgctataagatcttctcagcacgataaaaaagataaaaaaa

SEQ ID NO: 62396 - DNA, 1132 bp, Zea Mays
  misc_feature (1132)..(1132): n is a, c, g, or t
atgccgttaggtatgttagtatgttcaaacgtggctatagtgactgtggcacttactgcacaatggccttgggcggctgacatcattgctgtttgtacctcgttgttggatacgttgccagcagtcacaacacctactgaaagggcagatgacgatgatgagatgcccatggatgtcaatattaaaattaatcttgatgttgatttggaaagacagataactgcagcaattgattcaaagctacttcaacatttggtgaatgccctcttcagaggtacattaagcacaaatgattctgatctgtctggaccatcagatgctgaagttgatgctgtaggatctatttgtgcttttcttcatgttacgttcaatacatttcctctagagcgaattatgactgtcctggcataccggactgaaattgttcctgcactatggaagttcataaaacgttgccatgcaagccgaagatggccattttttttgaagtttgcatcttcattacctgctgattctcctggttggctccttcccatgtctgtattctgtcccatatacaagcacatgttgaagatcattgataccggggagttctatgaacaggagaaacccctttcccttaaagatttgaagtccttggttctcattttaaaacagacgccaggtgaagctctgatattgggtgggtgggcattatggcaacttctgtgggttattccatcctcttctactcagaaagtgtcacccaacccttcaggccttaaaaagttgtcagtggagaatgtcaagactagagctagggttgggttatctgaacttctcacacagttgcaagactggaacagccgactaccattcactgctgcaagtgatttctattctcaagaagctacgagcgaaaattttgtgtctcaagcaatacttggtaatactcgagcatcagagatcataaagcttgctccttttttggctccatttaccagtcgagtcaaaatattcacttcccaattaacgtgttctagacaatcaacatcacattctgcattgacaagacagcggttcaaaataagaagaagtcgacttttggaagatgcttttgatcagctaagtttgctttctgaagaagatctcn

SEQ ID NO: 62397 - DNA, 1012 bp, Zea Mays
  misc_feature (1012)..(1012): n is a, c, g, or t
atgccgttaggtatgttagtatgttcaaacgtggctatagtgactgtggcacttactgcacaatggccttgggcggctgacatcattgctgtttgtacctcgttgttggatacgttgccagcagtcacaacacctactgaaagggcagatgacgatgatgagatgcccatggatgtcaatattaaaattaatcttgatgttgatttggaaagacagataactgcagcaattgattcaaagctacttcaacatttggtgaatgccctcttcagaggtacattaagcacaaatgattctgatctgtctggaccatcagatgctgaagttgatgctgtaggatctatttgtgcttttcttcatgttacgttcaatacatttcctctagagcgaattatgactgtcctggcataccggactgaaattgttcctgcactatggaagttcataaaacgttgccatgcaagccgaagatggccattttttttgaagtttgcatcttcattacctgctgattctcctggttggctccttcccatgtctgtattctgtcccatatacaagcacatgttgaagatcattgataccggggagttctatgaacaggagaaacccctttcccttaaagatttgaagtccttggttctcattttaaaacaggcattatggcaacttctgtgggttattccatcctcttctactcagaaagtgtcacccaacccttcaggccttaaaaagttgtcagtggagaatgtcaagactagagctagggttgggttatctgaacttctcacacagttgcaagactggaacagccgactaccattcactgctgcaagtgatttctattctcaagaagctacgagcgaaaattttgtgtctcaatcccaattaacgtgttctagacaatcaacatcacattctgcattgacaagacagcggttcaaaataagaagaagtcgacttttggaagatgcttttgatcagctaagtttgctttctgaagaagatctcn

SEQ ID NO: 62398 - DNA, 991 bp, Zea Mays
  misc_feature (991)..(991): n is a, c, g, or t
atgccgttaggtatgttagtatgttcaaacgtggctatagtgactgtggcacttactgcacaatggccttgggcggctgacatcattgctgtttgtacctcgttgttggatacgttgccagcagtcacaacacctactgaaagggcagatgacgatgatgagatgcccatggatgtcaatattaaaattaatcttgatgttgatttggaaagacagataactgcagcaattgattcaaagctacttcaacatttggtgaatgccctcttcagaggtacattaagcacaaatgattctgatctgtctggaccatcagatgctgaagttgatgctttcataaaacgttgccatgcaagccgaagatggccattttttttgaagtttgcatcttcattacctgctgattctcctggttggctccttcccatgtctgtattctgtcccatatacaagcacatgttgaagatcattgataccggggagttctatgaacaggagaaacccctttcccttaaagatttgaagtccttggttctcattttaaaacaggcattatggcaacttctgtgggttattccatcctcttctactcagaaagtgtcacccaacccttcaggccttaaaaagttgtcagtggagaatgtcaagactagagctagggttgggttatctgaacttctcacacagttgcaagactggaacagccgactaccattcactgctgcaagtgatttctattctcaagaagctacgagcgaaaattttgtgtctcaagcaatacttggtaatactcgagcatcagagatcataaagcttgctccttttttggctccatttaccagtcgagtcaaaatattcacttcccaattaacgtgttctagacaatcaacatcacattctgcattgacaagacagcggttcaaaataagaagaagtcgacttttggaagatgcttttgatcagctaagtttgctttctgaagaagatctcn

SEQ ID NO: 62399 - DNA, 2086 bp, Zea Mays
  misc_feature (2086)..(2086): n is a, c, g, or t
gactcctctttcccctccccgagcgtgcacgtctcgtcatcgccctactcgctcgccccatcccggagtctccccggctcccaaaccctagcgcctcccggacctcgtgagggaggcggcgatgttcttctccggtgacccatcggcgcggcggcgggtcgacctcggcgggcggagcagcaaggagcgggaccgcaaggtgctgctcgagcagacgcgcgaggagcggcgccggcgccagggcctccgcctccagaacacctccgccacgaagatccagaaattcttcagagggaagaaggctttggaattggcccgctcagaggttcggaagaatttttgctcaacttttggggagcattgcgagaggatagagtggaacatctttggcactaattctgactttcttcggcaattactgttcttcttcaatgcaaatgaagacaatgacatagctatactttgtcatgtctgcaatttgctgctgcaatatgttaaacaaggcggagatgttgtaactctcttcactggtgtgaatggctcctcgctgcaacctcttgttgctcaccgagtaaaaaaatttgccctcatctgtgtgcaagcagtctatcaaaagaggcatgattggggcagccaacttttaacaacacctggaaccacatcagtgccttctgtgtcattactggaaactgtaggttgcttgataaatccaaaatttctttggaactgcaaagtagttggttatcttcagcagagaaagatctattgcttatttcgtggcattatcgtatctgtaccgtggatccaagatggagtttctcgtctcagcttctgtccatcccttttctatggcatcgtttaccacaactcaagaaggttttctccgttaacgggctcaacaaatattatatccatcaaatagcttgccttttgcccagtcttgttgatgtccttccaaacgatatatcagctaatcatccaggatatgcgtgcgtccttgcaaatgttcttgaagctgcaacctggattttgtctgatgcaaagttagcttctgattcagcggctgacatcattgctgtttgtacctcgttgttggatacgttgccagcagtcacaacacctactgaaagggcagatgacgatgatgagatgcccatggatgtcaatattaaaattaatcttgatgttgatttggaaagacagataactgcagcaattgattcaaagctacttcaacatttggtgaatgccctcttcagaggtacattaagcacaaatgattctgatctgtctggaccatcagatgctgaagttgatgctgtaggatctatttgtgcttttcttcatgttacgttcaatacatttcctctagagcgaattatgactgtcctggcataccggactgaaattgttcctgcactatggaagttcataaaacgttgccatgcaagccgaagatggccattttttttgaagtttgcatcttcattacctgctgattctcctggttggctccttcccatgtctgtattctgtcccatatacaagcacatgttgaagatcattgataccggggagttctatgaacaggagaaacccctttcccttaaagatttgaagtccttggttctcattttaaaacaggcattatggcaacttctgtgggttattccatcctcttctactcagaaagtgtcacccaacccttcaggccttaaaaagttgtcagtggagaatgtcaagactagagctagggttgggttatctgaacttctcacacagttgcaagactggaacagccgactaccattcactgctgcaagtgatttctattctcaagaagctacgagcgaaaattttgtgtctcaagcaatacttggtaatactcgagcatcagagatcataaagcttgctccttttttggctccatttaccagtcgagtcaaaatattcacttcccaattaacgtgttctagacaatcaacatcacattctgcattgacaagacagcggttcaaaataagaagaagtcgacttttggaagatgcttttgatcagctaagtttgctttctgaagaagatctcn

SEQ ID NO: 62400 - DNA, 2090 bp, Zea Mays
  misc_feature (2090)..(2090): n is a, c, g, or t
gactcctctttcccctccccgagcgtgcacgtctcgtcatcgccctactcgctcgccccatcccggagtctccccggctcccaaaccctagcgcctcccggacctcgcaggtgagggaggcggcgatgttcttctccggtgacccatcggcgcggcggcgggtcgacctcggcgggcggagcagcaaggagcgggaccgcaaggtgctgctcgagcagacgcgcgaggagcggcgccggcgccagggcctccgcctccagaacacctccgccacgaagatccagaaattcttcagagggaagaaggctttggaattggcccgctcagaggttcggaagaatttttgctcaacttttggggagcattgcgagaggatagagtggaacatctttggcactaattctgactttcttcggcaattactgttcttcttcaatgcaaatgaagacaatgacatagctatactttgtcatgtctgcaatttgctgctgcaatatgttaaacaaggcggagatgttgtaactctcttcactggtgtgaatggctcctcgctgcaacctcttgttgctcaccgagtaaaaaaatttgccctcatctgtgtgcaagcagtctatcaaaagaggcatgattggggcagccaacttttaacaacacctggaaccacatcagtgccttctgtgtcattactggaaactgtaggttgcttgataaatccaaaatttctttggaactgcaaagtagttggttatcttcagcagagaaagatctattgcttatttcgtggcattatcgtatctgtaccgtggatccaagatggagtttctcgtctcagcttctgtccatcccttttctatggcatcgtttaccacaactcaagaaggttttctccgttaacgggctcaacaaatattatatccatcaaatagcttgccttttgcccagtcttgttgatgtccttccaaacgatatatcagctaatcatccaggatatgcgtgcgtccttgcaaatgttcttgaagctgcaacctggattttgtctgatgcaaagttagcttctgattcagcggctgacatcattgctgtttgtacctcgttgttggatacgttgccagcagtcacaacacctactgaaagggcagatgacgatgatgagatgcccatggatgtcaatattaaaattaatcttgatgttgatttggaaagacagataactgcagcaattgattcaaagctacttcaacatttggtgaatgccctcttcagaggtacattaagcacaaatgattctgatctgtctggaccatcagatgctgaagttgatgctgtaggatctatttgtgcttttcttcatgttacgttcaatacatttcctctagagcgaattatgactgtcctggcataccggactgaaattgttcctgcactatggaagttcataaaacgttgccatgcaagccgaagatggccattttttttgaagtttgcatcttcattacctgctgattctcctggttggctccttcccatgtctgtattctgtcccatatacaagcacatgttgaagatcattgataccggggagttctatgaacaggagaaacccctttcccttaaagatttgaagtccttggttctcattttaaaacaggcattatggcaacttctgtgggttattccatcctcttctactcagaaagtgtcacccaacccttcaggccttaaaaagttgtcagtggagaatgtcaagactagagctagggttgggttatctgaacttctcacacagttgcaagactggaacagccgactaccattcactgctgcaagtgatttctattctcaagaagctacgagcgaaaattttgtgtctcaagcaatacttggtaatactcgagcatcagagatcataaagcttgctccttttttggctccatttaccagtcgagtcaaaatattcacttcccaattaacgtgttctagacaatcaacatcacattctgcattgacaagacagcggttcaaaataagaagaagtcgacttttggaagatgcttttgatcagctaagtttgctttctgaagaagatctcn

SEQ ID NO: 62401 - DNA, 1973 bp, Zea Mays
  misc_feature (1973)..(1973): n is a, c, g, or t
ctcgactcctctttcccctccccgagcgtgcacgtctcgtcatcgccctactcgctcgccccatcccggagtctccccggctcccaaaccctagcgcctcccggacctcgcaggtgagggaggcggcgatgttcttctccggtgacccatcggcgcggcggcgggtcgacctcggcgggcggagcagcaaggagcgggaccgcaaggtgctgctcgagcagacgcgcgaggagcggcgccggcgccagggcctccgcctccagaacacctccgccacgaagatccaggagatgttgtaactctcttcactggtgtgaatggctcctcgctgcaacctcttgttgctcaccgagtaaaaaaatttgccctcatctgtgtgcaagcagtctatcaaaagaggcatgattggggcagccaacttttaacaacacctggaaccacatcagtgccttctgtgtcattactggaaactgtaggttgcttgataaatccaaaatttctttggaactgcaaagtagttggttatcttcagcagagaaagatctattgcttatttcgtggcattatcgtatctgtaccgcaaaatgtcagaaattctggtcattttgatagtgcatctgtgctggagcaagtgcttatgcttgttgcttcgcatgttggccatcatccctgttgttgtctgaaagtggatccaagatggagtttctcgtctcagcttctgtccatcccttttctatggcatcgtttaccacaactcaagaaggttttctccgttaacgggctcaacaaatattatatccatcaaatagcttgccttttgcccagtcttgttgatgtccttccaaacgatatatcagctaatcatccaggatatgcgtgcgtccttgcaaatgttcttgaagctgcaacctggattttgtctgatgcaaagttagcttctgattcagcggctgacatcattgctgtttgtacctcgttgttggatacgttgccagcagtcacaacacctactgaaagggcagatgacgatgatgagatgcccatggatgtcaatattaaaattaatcttgatgttgatttggaaagacagataactgcagcaattgattcaaagctacttcaacatttggtgaatgccctcttcagaggtacattaagcacaaatgattctgatctgtctggaccatcagatgctgaagttgatgctgtaggatctatttgtgcttttcttcatgttacgttcaatacatttcctctagagcgaattatgactgtcctggcataccggactgaaattgttcctgcactatggaagttcataaaacgttgccatgcaagccgaagatggccattttttttgaagtttgcatcttcattacctgctgattctcctggttggctccttcccatgtctgtattctgtcccatatacaagcacatgttgaagatcattgataccggggagttctatgaacaggagaaacccctttcccttaaagatttgaagtccttggttctcattttaaaacaggcattatggcaacttctgtgggttattccatcctcttctactcagaaagtgtcacccaacccttcaggccttaaaaagttgtcagtggagaatgtcaagactagagctagggttgggttatctgaacttctcacacagttgcaagactggaacagccgactaccattcactgctgcaagtgatttctattctcaagaagctacgagcgaaaattttgtgtctcaagcaatacttggtaatactcgagcatcagagatcataaagcttgctccttttttggctccatttaccagtcgagtcaaaatattcacttcccaattaacgtgttctagacaatcaacatcacattctgcattgacaagacagcggttcaaaataagaagaagtcgacttttggaagatgcttttgatcagctaagtttgctttctgaagaagatctcn

SEQ ID NO: 62402 - DNA, 2197 bp, Zea Mays
  misc_feature (2197)..(2197): n is a, c, g, or t
ctctcgactcctctttcccctccccgagcgtgcacgtctcgtcatcgccctactcgctcgccccatcccggagtctccccggctcccaaaccctagcgcctcccggacctcgtgagggaggcggcgatgttcttctccggtgacccatcggcgcggcggcgggtcgacctcggcgggcggagcagcaaggagcgggaccgcaaggtgctgctcgagcagacgcgcgaggagcggcgccggcgccagggcctccgcctccagaacacctccgccacgaagatccagaaattcttcagagggaagaaggctttggaattggcccgctcagaggttcggaagaatttttgctcaacttttggggagcattgcgagaggatagagtggaacatctttggcactaattctgactttcttcggcaattactgttcttcttcaatgcaaatgaagacaatgacatagctatactttgtcatgtctgcaatttgctgctgcaatatgttaaacaaggcggagatgttgtaactctcttcactggtgtgaatggctcctcgctgcaacctcttgttgctcaccgagtaaaaaaatttgccctcatctgtgtgcaagcagtctatcaaaagaggcatgattggggcagccaacttttaacaacacctggaaccacatcagtgccttctgtgtcattactggaaactgtaggttgcttgataaatccaaaatttctttggaactgcaaagtagttggttatcttcagcagagaaagatctattgcttatttcgtggcattatcgtatctgtaccgcaaaatgtcagaaattctggtcattttgatagtgcatctgtgctggagcaagtgcttatgcttgttgcttcgcatgttggccatcatccctgttgttgtctgaaagtggatccaagatggagtttctcgtctcagcttctgtccatcccttttctatggcatcgtttaccacaactcaagaaggttttctccgttaacgggctcaacaaatattatatccatcaaatagcttgccttttgcccagtcttgttgatgtccttccaaacgatatatcagctaatcatccaggatatgcgtgcgtccttgcaaatgttcttgaagctgcaacctggattttgtctgatgcaaagttagcttctgattcagcggctgacatcattgctgtttgtacctcgttgttggatacgttgccagcagtcacaacacctactgaaagggcagatgacgatgatgagatgcccatggatgtcaatattaaaattaatcttgatgttgatttggaaagacagataactgcagcaattgattcaaagctacttcaacatttggtgaatgccctcttcagaggtacattaagcacaaatgattctgatctgtctggaccatcagatgctgaagttgatgctgtaggatctatttgtgcttttcttcatgttacgttcaatacatttcctctagagcgaattatgactgtcctggcataccggactgaaattgttcctgcactatggaagttcataaaacgttgccatgcaagccgaagatggccattttttttgaagtttgcatcttcattacctgctgattctcctggttggctccttcccatgtctgtattctgtcccatatacaagcacatgttgaagatcattgataccggggagttctatgaacaggagaaacccctttcccttaaagatttgaagtccttggttctcattttaaaacaggcattatggcaacttctgtgggttattccatcctcttctactcagaaagtgtcacccaacccttcaggccttaaaaagttgtcagtggagaatgtcaagactagagctagggttgggttatctgaacttctcacacagttgcaagactggaacagccgactaccattcactgctgcaagtgatttctattctcaagaagctacgagcgaaaattttgtgtctcaagcaatacttggtaatactcgagcatcagagatcataaagcttgctccttttttggctccatttaccagtcgagtcaaaatattcacttcccaattaacgtgttctagacaatcaacatcacattctgcattgacaagacagcggttcaaaataagaagaagtcgacttttggaagatgcttttgatcagctaagtttgctttctgaagaagatctcn

SEQ ID NO: 62403 - DNA, 2119 bp, Zea Mays
  misc_feature (2119)..(2119): n is a, c, g, or t
ctcgactctcgactcctctttcccctccccgagcgtgcacgtctcgtcatcgccctactcgctcgccccatcccggagtctccccggctcccaaaccctagcgcctcccggacctcgcaggtgagggaggcggcgatgttcttctccggtgacccatcggcgcggcggcgggtcgacctcggcgggcggagcagcaaggagcgggaccgcaaggtgctgctcgagcagacgcgcgaggagcggcgccggcgccagggcctccgcctccagaacacctccgccacgaagatccagaaattcttcagagggaagaaggctttggaattggcccgctcagaggttcggaagaatttttgctcaacttttggggagcattgcgagaggatagagtggaacatctttggcactaattctgactttcttcggcaattactgttcttcttcaatgcaaatgaagacaatgacatagctatactttgtcatgtctgcaatttgctgctgcaatatgttaaacaaggcggagatgttgtaactctcttcactggtgtgaatggctcctcgctgcaacctcttgttgctcaccgagtaaaaaaatttgccctcatctgtgtgcaagcagtctatcaaaagaggcatgattggggcagccaacttttaacaacacctggaaccacatcagtgccttctgtgtcattactggaaactgtaggttgcttgataaatccaaaatttctttggaactgcaaagtagttggttatcttcagcagagaaagatctattgcttatttcgtggcattatcgtatctgtaccgcaaaatgtcagaaattctggtcattttgatagtgcatctgtgctggagcaagtgcttatgcttgttgcttcgcatgttggccatcatccctgttgttgtctgaaagtggatccaagatggagtttctcgtctcagcttctgtccatcccttttctatggcatcgtttaccacaactcaagaaggttttctccgttaacgggctcaacaaatattatatccatcaaatagcttgccttttgcccagtcttgttgatgtccttccaaacgatatatcagctaatcatccaggatatgcgtgcgtccttgcaaatgttcttgaagctgcaacctggattttgtctgatgcaaagttagcttctgattcagcggctgacatcattgctgtttgtacctcgttgttggatacgttgccagcagtcacaacacctactgaaagggcagatgacgatgatgagatgcccatggatgtcaatattaaaattaatcttgatgttgatttggaaagacagataactgcagcaattgattcaaagctacttcaacatttggtgaatgccctcttcagaggtacattaagcacaaatgattctgatctgtctggaccatcagatgctgaagttgatgctgtaggatctatttgtgcttttcttcatgttacgttcaatacatttcctctagagcgaattatgactgtcctggcataccggactgaaattgttcctgcactatggaagttcataaaacgttgccatgcaagccgaagatggccattttttttgaagtttgcatcttcattacctgctgattctcctggttggctccttcccatgtctgtattctgtcccatatacaagcacatgttgaagatcattgataccggggagttctatgaacaggagaaacccctttcccttaaagatttgaagtccttggttctcattttaaaacaggcattatggcaacttctgtgggttattccatcctcttctactcagaaagtgtcacccaacccttcaggccttaaaaagttgtcagtggagaatgtcaagactagagctagggttgggttatctgaacttctcacacagttgcaagactggaacagccgactaccattcactgctgcaagtgatttctattctcaagaagctacgagcgaaaattttgtgtctcaatcccaattaacgtgttctagacaatcaacatcacattctgcattgacaagacagcggttcaaaataagaagaagtcgacttttggaagatgcttttgatcagctaagtttgctttctgaagaagatctcn

SEQ ID NO: 62404 - DNA, 1946 bp, Zea Mays
  misc_feature (1946)..(1946): n is a, c, g, or t
cccccaccgtctcgactctcgactcctctttcccctccccgagcgtgcacgtctcgtcatcgccctactcgctcgccccatcccggagtctccccggctcccaaaccctagcgcctcccggacctcgcaggtgagggaggcggcgatgttcttctccggtgacccatcggcgcggcggcgggtcgacctcggcgggcggagcagcaaggagcgggaccgcaaggtgctgctcgagcagacgcgcgaggagcggcgccggcgccagggcctccgcctccagaacacctccgccacgaagatccagaaattcttcagagggaagaaggctttggaattggcccgctcagaggttcggaagaatttttgctcaacttttggggagcattgcgagaggatagagtggaacatctttggcactaattctgactttcttcggcaattactgttcttcttcaatgcaaatgaagacaatgacatagctatactttgtcatgtctgcaatttgctgctgcaatatgttaaacaaggcggagatgttgtaactctcttcactggtgtgaatggctcctcgctgcaacctcttgttgctcaccgagtaaaaaaatttgccctcatctgtgtgcaagcagtctatcaaaagaggcatgattggggcagccaacttttaacaacacctggaaccacatcagtgccttctgtgtcattactggaaactgtaggttgcttgataaatccaaaatttctttggaactgcaaagtagttggttatcttcagcagagaaagatctattgcttatttcgtggcattatcgtatctgtaccggttttctccgttaacgggctcaacaaatattatatccatcaaatagcttgccttttgcccagtcttgttgatgtccttccaaacgatatatcagctaatcatccaggatatgcgtgcgtccttgcaaatgttcttgaagctgcaacctggattttgtctgatgcaaagttagcttctgattcagcggctgacatcattgctgtttgtacctcgttgttggatacgttgccagcagtcacaacacctactgaaagggcagatgacgatgatgagatgcccatggatgtcaatattaaaattaatcttgatgttgatttggaaagacagataactgcagcaattgattcaaagctacttcaacatttggtgaatgccctcttcagaggtacattaagcacaaatgattctgatctgtctggaccatcagatgctgaagttgatgctgtaggatctatttgtgcttttcttcatgttacgttcaatacatttcctctagagcgaattatgactgtcctggcataccggactgaaattgttcctgcactatggaagttcataaaacgttgccatgcaagccgaagatggccattttttttgaagtttgcatcttcattacctgctgattctcctggttggctccttcccatgtctgtattctgtcccatatacaagcacatgttgaagatcattgataccggggagttctatgaacaggagaaacccctttcccttaaagatttgaagtccttggttctcattttaaaacaggcattatggcaacttctgtgggttattccatcctcttctactcagaaagtgtcacccaacccttcaggccttaaaaagttgtcagtggagaatgtcaagactagagctagggttgggttatctgaacttctcacacagttgcaagactggaacagccgactaccattcactgctgcaagtgatttctattctcaagaagctacgagcgaaaattttgtgtctcaatcccaattaacgtgttctagacaatcaacatcacattctgcattgacaagacagcggttcaaaataagaagaagtcgacttttggaagatgcttttgatcagctaagtttgctttctgaagaagatctcn

SEQ ID NO: 62405 - DNA, 2208 bp, Zea Mays
  misc_feature (2208)..(2208): n is a, c, g, or t
ccgcccccaccgtctcgactctcgactcctctttcccctccccgagcgtgcacgtctcgtcatcgccctactcgctcgccccatcccggagtctccccggctcccaaaccctagcgcctcccggacctcgcaggtgagggaggcggcgatgttcttctccggtgacccatcggcgcggcggcgggtcgacctcggcgggcggagcagcaaggagcgggaccgcaaggtgctgctcgagcagacgcgcgaggagcggcgccggcgccagggcctccgcctccagaacacctccgccacgaagatccagagggaagaaggctttggaattggcccgctcagaggttcggaagaatttttgctcaacttttggggagcattgcgagaggatagagtggaacatctttggcactaattctgactttcttcggcaattactgttcttcttcaatgcaaatgaagacaatgacatagctatactttgtcatgtctgcaatttgctgctgcaatatgttaaacaaggcggagatgttgtaactctcttcactggtgtgaatggctcctcgctgcaacctcttgttgctcaccgagtaaaaaaatttgccctcatctgtgtgcaagcagtctatcaaaagaggcatgattggggcagccaacttttaacaacacctggaaccacatcagtgccttctgtgtcattactggaaactgtaggttgcttgataaatccaaaatttctttggaactgcaaagtagttggttatcttcagcagagaaagatctattgcttatttcgtggcattatcgtatctgtaccgcaaaatgtcagaaattctggtcattttgatagtgcatctgtgctggagcaagtgcttatgcttgttgcttcgcatgttggccatcatccctgttgttgtctgaaagtggatccaagatggagtttctcgtctcagcttctgtccatcccttttctatggcatcgtttaccacaactcaagaaggttttctccgttaacgggctcaacaaatattatatccatcaaatagcttgccttttgcccagtcttgttgatgtccttccaaacgatatatcagctaatcatccaggatatgcgtgcgtccttgcaaatgttcttgaagctgcaacctggattttgtctgatgcaaagttagcttctgattcagcggctgacatcattgctgtttgtacctcgttgttggatacgttgccagcagtcacaacacctactgaaagggcagatgacgatgatgagatgcccatggatgtcaatattaaaattaatcttgatgttgatttggaaagacagataactgcagcaattgattcaaagctacttcaacatttggtgaatgccctcttcagaggtacattaagcacaaatgattctgatctgtctggaccatcagatgctgaagttgatgctgtaggatctatttgtgcttttcttcatgttacgttcaatacatttcctctagagcgaattatgactgtcctggcataccggactgaaattgttcctgcactatggaagttcataaaacgttgccatgcaagccgaagatggccattttttttgaagtttgcatcttcattacctgctgattctcctggttggctccttcccatgtctgtattctgtcccatatacaagcacatgttgaagatcattgataccggggagttctatgaacaggagaaacccctttcccttaaagatttgaagtccttggttctcattttaaaacaggcattatggcaacttctgtgggttattccatcctcttctactcagaaagtgtcacccaacccttcaggccttaaaaagttgtcagtggagaatgtcaagactagagctagggttgggttatctgaacttctcacacagttgcaagactggaacagccgactaccattcactgctgcaagtgatttctattctcaagaagctacgagcgaaaattttgtgtctcaagcaatacttggtaatactcgagcatcagagatcataaagcttgctccttttttggctccatttaccagtcgagtcaaaatattcacttcccaattaacgtgttctagacaatcaacatcacattctgcattgacaagacagcggttcaaaataagaagaagtcgacttttggaagatgcttttgatcagctaagtttgctttctgaagaagatctcn

SEQ ID NO: 62406 - DNA, 2231 bp, Zea Mays
  misc_feature (2231)..(2231): n is a, c, g, or t
cgcccccctgccccgcccccaccgtctcgactctcgactcctctttcccctccccgagcgtgcacgtctcgtcatcgccctactcgctcgccccatcccggagtctccccggctcccaaaccctagcgcctcccggacctcgcaggtgagggaggcggcgatgttcttctccggtgacccatcggcgcggcggcgggtcgacctcggcgggcggagcagcaaggagcgggaccgcaaggtgctgctcgagcagacgcgcgaggagcggcgccggcgccagggcctccgcctccagaacacctccgccacgaagatccagaaattcttcagagggaagaaggctttggaattggcccgctcagaggttcggaagaatttttgctcaacttttggggagcattgcgagaggatagagtggaacatctttggcactaattctgactttcttcggcaattactgttcttcttcaatgcaaatgaagacaatgacatagctatactttgtcatgtctgcaatttgctgctgcaatatgttaaacaaggcggagatgttgtaactctcttcactggtgtgaatggctcctcgctgcaacctcttgttgctcaccgagtaaaaaaatttgccctcatctgtgtgcaagcagtctatcaaaagaggcatgattggggcagccaacttttaacaacacctggaaccacatcagtgccttctgtgtcattactggaaactgtaggttgcttgataaatccaaaatttctttggaactgcaaagtagttggttatcttcagcagagaaagatctattgcttatttcgtggcattatcgtatctgtaccgcaaaatgtcagaaattctggtcattttgatagtgcatctgtgctggagcaagtgcttatgcttgttgcttcgcatgttggccatcatccctgttgttgtctgaaagtggatccaagatggagtttctcgtctcagcttctgtccatcccttttctatggcatcgtttaccacaactcaagaaggttttctccgttaacgggctcaacaaatattatatccatcaaatagcttgccttttgcccagtcttgttgatgtccttccaaacgatatatcagctaatcatccaggatatgcgtgcgtccttgcaaatgttcttgaagctgcaacctggattttgtctgatgcaaagttagcttctgattcagcggctgacatcattgctgtttgtacctcgttgttggatacgttgccagcagtcacaacacctactgaaagggcagatgacgatgatgagatgcccatggatgtcaatattaaaattaatcttgatgttgatttggaaagacagataactgcagcaattgattcaaagctacttcaacatttggtgaatgccctcttcagaggtacattaagcacaaatgattctgatctgtctggaccatcagatgctgaagttgatgctgtaggatctatttgtgcttttcttcatgttacgttcaatacatttcctctagagcgaattatgactgtcctggcataccggactgaaattgttcctgcactatggaagttcataaaacgttgccatgcaagccgaagatggccattttttttgaagtttgcatcttcattacctgctgattctcctggttggctccttcccatgtctgtattctgtcccatatacaagcacatgttgaagatcattgataccggggagttctatgaacaggagaaacccctttcccttaaagatttgaagtccttggttctcattttaaaacaggcattatggcaacttctgtgggttattccatcctcttctactcagaaagtgtcacccaacccttcaggccttaaaaagttgtcagtggagaatgtcaagactagagctagggttgggttatctgaacttctcacacagttgcaagactggaacagccgactaccattcactgctgcaagtgatttctattctcaagaagctacgagcgaaaattttgtgtctcaagcaatacttggtaatactcgagcatcagagatcataaagcttgctccttttttggctccatttaccagtcgagtcaaaatattcacttcccaattaacgtgttctagacaatcaacatcacattctgcattgacaagacagcggttcaaaataagaagaagtcgacttttggaagatgcttttgatcagctaagtttgctttctgaagaagatctcn

SEQ ID NO: 62407 - DNA, 2265 bp, Zea Mays
  misc_feature (2265)..(2265): n is a, c, g, or t
cttcgccccgtcttccaaatcccaaagcctcgcccccctgccccgcccccaccgtctcgactctcgactcctctttcccctccccgagcgtgcacgtctcgtcatcgccctactcgctcgccccatcccggagtctccccggctcccaaaccctagcgcctcccggacctcgtgagggaggcggcgatgttcttctccggtgacccatcggcgcggcggcgggtcgacctcggcgggcggagcagcaaggagcgggaccgcaaggtgctgctcgagcagacgcgcgaggagcggcgccggcgccagggcctccgcctccagaacacctccgccacgaagatccagagggaagaaggctttggaattggcccgctcagaggttcggaagaatttttgctcaacttttggggagcattgcgagaggatagagtggaacatctttggcactaattctgactttcttcggcaattactgttcttcttcaatgcaaatgaagacaatgacatagctatactttgtcatgtctgcaatttgctgctgcaatatgttaaacaaggcggagatgttgtaactctcttcactggtgtgaatggctcctcgctgcaacctcttgttgctcaccgagtaaaaaaatttgccctcatctgtgtgcaagcagtctatcaaaagaggcatgattggggcagccaacttttaacaacacctggaaccacatcagtgccttctgtgtcattactggaaactgtaggttgcttgataaatccaaaatttctttggaactgcaaagtagttggttatcttcagcagagaaagatctattgcttatttcgtggcattatcgtatctgtaccgcaaaatgtcagaaattctggtcattttgatagtgcatctgtgctggagcaagtgcttatgcttgttgcttcgcatgttggccatcatccctgttgttgtctgaaagtggatccaagatggagtttctcgtctcagcttctgtccatcccttttctatggcatcgtttaccacaactcaagaaggttttctccgttaacgggctcaacaaatattatatccatcaaatagcttgccttttgcccagtcttgttgatgtccttccaaacgatatatcagctaatcatccaggatatgcgtgcgtccttgcaaatgttcttgaagctgcaacctggattttgtctgatgcaaagttagcttctgattcagcggctgacatcattgctgtttgtacctcgttgttggatacgttgccagcagtcacaacacctactgaaagggcagatgacgatgatgagatgcccatggatgtcaatattaaaattaatcttgatgttgatttggaaagacagataactgcagcaattgattcaaagctacttcaacatttggtgaatgccctcttcagaggtacattaagcacaaatgattctgatctgtctggaccatcagatgctgaagttgatgctgtaggatctatttgtgcttttcttcatgttacgttcaatacatttcctctagagcgaattatgactgtcctggcataccggactgaaattgttcctgcactatggaagttcataaaacgttgccatgcaagccgaagatggccattttttttgaagtttgcatcttcattacctgctgattctcctggttggctccttcccatgtctgtattctgtcccatatacaagcacatgttgaagatcattgataccggggagttctatgaacaggagaaacccctttcccttaaagatttgaagtccttggttctcattttaaaacaggcattatggcaacttctgtgggttattccatcctcttctactcagaaagtgtcacccaacccttcaggccttaaaaagttgtcagtggagaatgtcaagactagagctagggttgggttatctgaacttctcacacagttgcaagactggaacagccgactaccattcactgctgcaagtgatttctattctcaagaagctacgagcgaaaattttgtgtctcaagtatggatgcctatgcttttttggattaatagaaatgtctttcatcttctatgactatgcatatgtttttcaggcaatacttggtaatactcgagcatcagagatcataaagcttgctccttttttggctccatttaccagtcgagtcaaaatattcactcggttcaaaataagaagaagtcgacttttggaagatgcttttgatcagctaagtttgctttctgaagaagatctcn

SEQ ID NO: 62408 - DNA, 975 bp, Zea Mays
atgccgttaggtatgttagtatgttcaaacgtggctatagtgactgtggcacttactgcacaatggccttgggcggctgacatcattgctgtttgtacctcgttgttggatacgttgccagcagtcacaacacctactgaaagggcagatgacgatgatgagatgcccatggatgtcaatattaaaattaatcttgatgttgatttggaaagacagataactgcagcaattgattcaaagctacttcaacatttggtgaatgccctcttcagaggtacattaagcacaaatgattctgatctgtctggaccatcagatgctgaagttgatgctgtaggatctatttgtgcttttcttcatgttacgttcaatacatttcctctagagcgaattatgactgtcctggcataccggactgaaattgttcctgcactatggaagttcataaaacgttgccatgcaagccgaagatggccattttttttgaagtttgcatcttcattacctgctgattctcctggttggctccttcccatgtctgtattctgtcccatatacaagcacatgttgaagatcattgataccggggagttctatgaacaggagaaacccctttcccttaaagatttgaagtccttggttctcattttaaaacaggcattatggcaacttctgtgggttattccatcctcttctactcagaaagtgtcacccaacccttcaggccttaaaaagttgtcagtggagaatgtcaagactagagctagggttgggttatctgaacttctcacacagttgcaagactggaacagccgactaccattcactgctgcaagtgatttctattctcaagaagctacgagcgaaaattttgtgtctcaagcaatacttggtaatactcgagcatcagagatcataaagcttgctccttttttggctccatttaccagtcgagtcaaaatattcacttgctga

SEQ ID NO: 62409 - DNA, 1836 bp, Zea Mays
acctttgcttttgtcggttaggtcagagggaagaaggctttggaattggcccgctcagaggttcggaagaatttttgctcaacttttggggagcattgcgagaggatagagtggaacatctttggcactaattctgactttcttcggcaattactgttcttcttcaatgcaaatgaagacaatgacatagctatactttgtcatgtctgcaatttgctgctgcaatatgttaaacaaggcggagatgttgtaactctcttcactggtgtgaatggctcctcgctgcaacctcttgttgctcaccgagtaaaaaaatttgccctcatctgtgtgcaagcagtctatcaaaagaggcatgattggggcagccaacttttaacaacacctggaaccacatcagtgccttctgtgtcattactggaaactgtaggttgcttgataaatccaaaatttctttggaactgcaaagtagttggttatcttcagcagagaaagatctattgcttatttcgtggcattatcgtatctgtaccgcaaaatgtcagaaattctggtcattttgatagtgcatctgtgctggagcaagtgcttatgcttgttgcttcgcatgttggccatcatccctgttgttgtctgaaagtggatccaagatggagtttctcgtctcagcttctgtccatcccttttctatggcatcgtttaccacaactcaagaaggttttctccgttaacgggctcaacaaatattatatccatcaaatagcttgccttttgcccagtcttgttgatgtccttccaaacgatatatcagctaatcatccaggatatgcgtgcgtccttgcaaatgttcttgaagctgcaacctggattttgtctgatgcaaagttagcttctgattcagcggctgacatcattgctgtttgtacctcgttgttggatacgttgccagcagtcacaacacctactgaaagggcagatgacgatgatgagatgcccatggatgtcaatattaaaattaatcttgatgttgatttggaaagacagataactgcagcaattgattcaaagctacttcaacatttggtgaatgccctcttcagaggtacattaagcacaaatgattctgatctgtctggaccatcagatgctgaagttgatgctgtaggatctatttgtgcttttcttcatgttacgttcaatacatttcctctagagcgaattatgactgtcctggcataccggactgaaattgttcctgcactatggaagttcataaaacgttgccatgcaagccgaagatggccattttttttgaagtttgcatcttcattacctgctgattctcctggttggctccttcccatgtctgtattctgtcccatatacaagcacatgttgaagatcattgataccggggagttctatgaacaggagaaacccctttcccttaaagatttgaagtccttggttctcattttaaaacagacgccaggtgaagctctgatattgggtgggtgggcattatggcaacttctgtgggttattccatcctcttctactcagaaagtgtcacccaacccttcaggccttaaaaagttgtcagtggagaatgtcaagactagagctagggttgggttatctgaacttctcacacagttgcaagactggaacagccgactaccattcactgctgcaagtgatttctattctcaagaagctacgagcgaaaattttgtgtctcaagcaatacttggtaatactcgagcatcagagatcataaagcttgctccttttttggctccatttaccagtcgagtcaaaatattcacttgctga

SEQ ID NO: 62410 - DNA, 2068 bp, Zea Mays
gactcctctttcccctccccgagcgtgcacgtctcgtcatcgccctactcgctcgccccatcccggagtctccccggctcccaaaccctagcgcctcccggacctcgtgagggaggcggcgatgttcttctccggtgacccatcggcgcggcggcgggtcgacctcggcgggcggagcagcaaggagcgggaccgcaaggtgctgctcgagcagacgcgcgaggagcggcgccggcgccagggcctccgcctccagaacacctccgccacgaagatccagaaattcttcagagggaagaaggctttggaattggcccgctcagaggttcggaagaatttttgctcaacttttggggagcattgcgagaggatagagtggaacatctttggcactaattctgactttcttcggcaattactgttcttcttcaatgcaaatgaagacaatgacatagctatactttgtcatgtctgcaatttgctgctgcaatatgttaaacaaggcggagatgttgtaactctcttcactggtgtgaatggctcctcgctgcaacctcttgttgctcaccgagtaaaaaaatttgccctcatctgtgtgcaagcagtctatcaaaagaggcatgattggggcagccaacttttaacaacacctggaaccacatcagtgccttctgtgtcattactggaaactgtaggttgcttgataaatccaaaatttctttggaactgcaaagtagttggttatcttcagcagagaaagatctattgcttatttcgtggcattatcgtatctgtaccgcaaaatgtcagaaattctggtcattttgatagtgcatctgtgctggagcaagtgcttatgcttgttgcttcgcatgttggccatcatccctgttgttgtctgaaagtggatccaagatggagtttctcgtctcagcttctgtccatcccttttctatggcatcgtttaccacaactcaagaaggttttctccgttaacgggctcaacaaatattatatccatcaaatagcttgccttttgcccagtcttgttgatgtccttccaaacgatatatcagctaatcatccaggatatgcgtgcgtccttgcaaatgttcttgaagctgcaacctggattttgtctgatgcaaagttagcttctgattcagcggctgacatcattgctgtttgtacctcgttgttggatacgttgccagcagtcacaacacctactgaaagggcagatgacgatgatgagatgcccatggatgtcaatattaaaattaatcttgatgttgatttggaaagacagataactgcagcaattgattcaaagctacttcaacatttggtgaatgccctcttcagaggtacattaagcacaaatgattctgatctgtctggaccatcagatgctgaagttgatgctgtaggatctatttgtgcttttcttcatgttacgttcaatacatttcctctagagcgaattatgactgtcctggcataccggactgaaattgttcctgcactatggaagttcataaaacgttgccatgcaagccgaagatggccattttttttgaagtttgcatcttcattacctgctgattctcctggttggctccttcccatgtctgtattctgtcccatatacaagcacatgttgaagatcattgataccggggagttctatgaacaggagaaacccctttcccttaaagatttgaagtccttggttctcattttaaaacaggcattatggcaacttctgtgggttattccatcctcttctactcagaaagtgtcacccaacccttcaggccttaaaaagttgtcagtggagaatgtcaagactagagctagggttgggttatctgaacttctcacacagttgcaagactggaacagccgactaccattcactgctgcaagtgatttctattctcaagaagctacgagcgaaaattttgtgtctcaagcaatacttggtaatactcgagcatcagagatcataaagcttgctccttttttggctccatttaccagtcgagtcaaaatattcacttgctga

SEQ ID NO: 62411 - DNA, 2110 bp, Zea Mays
ctcgactctcgactcctctttcccctccccgagcgtgcacgtctcgtcatcgccctactcgctcgccccatcccggagtctccccggctcccaaaccctagcgcctcccggacctcgttacgatccgaccgatccaatttcccttttctccacaccattttttgctgggtgattcttatttcggtggtcggtgggggggcgtcgacgcgtggtgcaggcaggtgagggaggcggcgatgttcttctccggtgacccatcggcgcggcggcgggtcgacctcggcgggcggagcagcaaggagcgggaccgcaaggtgctgctcgagcagacgcgcgaggagcggcgccggcgccagggcctccgcctccagaacacctccgccacgaagatccagaaattcttcagagggaagaaggctttggaattggcccgctcagaggttcggaagaatttttgctcaacttttggggagcattgcgagaggatagagtggaacatctttggcactaattctgactttcttcggcaattactgttcttcttcaatgcaaatgaagacaatgacatagctatactttgtcatgtctgcaatttgctgctgcaatatgttaaacaaggcggagatgttgtaactctcttcactggtgtgaatggctcctcgctgcaacctcttgttgctcaccgagtaaaaaaatttgccctcatctgtgtgcaagcagtctatcaaaagaggcatgattggggcagccaacttttaacaacacctggaaccacatcagtgccttctgtgtcattactggaaactgtaggttgcttgataaatccaaaatttctttggaactgcaaagtagttggttatcttcagcagagaaagatctattgcttatttcgtggcattatcgtatctgtaccgtggatccaagatggagtttctcgtctcagcttctgtccatcccttttctatggcatcgtttaccacaactcaagaaggttttctccgttaacgggctcaacaaatattatatccatcaaatagcttgccttttgcccagtcttgttgatgtccttccaaacgatatatcagctaatcatccaggatatgcgtgcgtccttgcaaatgttcttgaagctgcaacctggattttgtctgatgcaaagttagcttctgattcagcggctgacatcattgctgtttgtacctcgttgttggatacgttgccagcagtcacaacacctactgaaagggcagatgacgatgatgagatgcccatggatgtcaatattaaaattaatcttgatgttgatttggaaagacagataactgcagcaattgattcaaagctacttcaacatttggtgaatgccctcttcagaggtacattaagcacaaatgattctgatctgtctggaccatcagatgctgaagttgatgctgtaggatctatttgtgcttttcttcatgttacgttcaatacatttcctctagagcgaattatgactgtcctggcataccggactgaaattgttcctgcactatggaagttcataaaacgttgccatgcaagccgaagatggccattttttttgaagtttgcatcttcattacctgctgattctcctggttggctccttcccatgtctgtattctgtcccatatacaagcacatgttgaagatcattgataccggggagttctatgaacaggagaaacccctttcccttaaagatttgaagtccttggttctcattttaaaacagacgccaggtgaagctctgatattgggtgggtgggcattatggcaacttctgtgggttattccatcctcttctactcagaaagtgtcacccaacccttcaggccttaaaaagttgtcagtggagaatgtcaagactagagctagggttgggttatctgaacttctcacacagttgcaagactggaacagccgactaccattcactgctgcaagtgatttctattctcaagaagctacgagcgaaaattttgtgtctcaagcaatacttggtaatactcgagcatcagagatcataaagcttgctccttttttggctccatttaccagtcgagtcaaaatattcacttgctga

SEQ ID NO: 62412 - DNA, 2116 bp, Zea Mays
ccaaagcctcgcccccctgccccgcccccaccgtctcgactctcgactcctctttcccctccccgagcgtgcacgtctcgtcatcgccctactcgctcgccccatcccggagtctccccggctcccaaaccctagcgcctcccggacctcgcaggtgagggaggcggcgatgttcttctccggtgacccatcggcgcggcggcgggtcgacctcggcgggcggagcagcaaggagcgggaccgcaaggtgctgctcgagcagacgcgcgaggagcggcgccggcgccagggcctccgcctccagaacacctccgccacgaagatccagaaattcttcagagggaagaaggctttggaattggcccgctcagaggttcggaagaatttttgctcaacttttggggagcattgcgagaggatagagtggaacatctttggcactaattctgactttcttcggcaattactgttcttcttcaatgcaaatgaagacaatgacatagctatactttgtcatgtctgcaatttgctgctgcaatatgttaaacaaggcggagatgttgtaactctcttcactggtgtgaatggctcctcgctgcaacctcttgttgctcaccgagtaaaaaaatttgccctcatctgtgtgcaagcagtctatcaaaagaggcatgattggggcagccaacttttaacaacacctggaaccacatcagtgccttctgtgtcattactggaaactgtaggttgcttgataaatccaaaatttctttggaactgcaaagtagttggttatcttcagcagagaaagatctattgcttatttcgtggcattatcgtatctgtaccgcaaaatgtcagaaattctggtcattttgatagtgcatctgtgctggagcaagtgcttatgcttgttgcttcgcatgttggccatcatccctgttgttgtctgaaagtggatccaagatggagtttctcgtctcagcttctgtccatcccttttctatggcatcgtttaccacaactcaagaaggttttctccgttaacgggctcaacaaatattatatccatcaaatagcttgccttttgcccagtcttgttgatgtccttccaaacgatatatcagctaatcatccaggatatgcgtgcgtccttgcaaatgttcttgaagctgcaacctggattttgtctgatgcaaagttagcttctgattcagcggctgacatcattgctgtttgtacctcgttgttggatacgttgccagcagtcacaacacctactgaaagggcagatgacgatgatgagatgcccatggatgtcaatattaaaattaatcttgatgttgatttggaaagacagataactgcagcaattgattcaaagctacttcaacatttggtgaatgccctcttcagaggtacattaagcacaaatgattctgatctgtctggaccatcagatgctgaagttgatgctgtaggatctatttgtgcttttcttcatgttacgttcaatacatttcctctagagcgaattatgactgtcctggcataccggactgaaattgttcctgcactatggaagttcataaaacgttgccatgcaagccgaagatggccattttttttgaagtttgcatcttcattacctgctgattctcctggttggctccttcccatgtctgtattctgtcccatatacaagcacatgttgaagatcattgataccggggagttctatgaacaggagaaacccctttcccttaaagatttgaagtccttggttctcattttaaaacaggcattatggcaacttctgtgggttattccatcctcttctactcagaaagtgtcacccaacccttcaggccttaaaaagttgtcagtggagaatgtcaagactagagctagggttgggttatctgaacttctcacacagttgcaagactggaacagccgactaccattcactgctgcaagtgatttctattctcaagaagctacgagcgaaaattttgtgtctcaagcaatacttggtaatactcgagcatcagagatcataaagcttgctccttttttggctccatttaccagtcgagtcaaaatattcacttgctga

SEQ ID NO: 62413 - DNA, 3097 bp, Zea Mays
ggacgattttctgatgaaagtttggtataattgccttgccaaaagaacattcgaaaggcttgcaatcggctgctatcattttgcattgaaaaatggcttaaacattttgcttgtgatagggaagcccttgtccatgcatgctgggaaaaacattgaaatgcctaacagttcttttttttgtgaccgagtaaattcttaataacaattgactgaacataacagatgagatatctttaacacaccacacaggccacaggcatgcagtggcctaattcaatagagttggctgagagcaaataaaatgaaagggacaagaaaaccctcctctctcgctctaaggtagttagaagaccatctcggtgtcaggtccctctccaacaaactatatatgtgtattttgcatgtcaatcagtctcacatatctgcggtgcagtggtcttcaattaatggccgtacccaaccaccaattgatgcggctagcaacagaacccatggctattggatagctcttacagctttttttcagccaagtacactaagttccatacagaaaacgatgtttttagatggccacacaggatgtacatcacatacatgaacttcgaaatgaactccctttgttctctgtcaactagtcatgaatcattaatatattgccagtgttccaatactcataatgtagcaccaaactaattaagaagtaggaggttgttcattgccttgatcacattaatataattgtaaaatgcttggcaacaagaacaaaaacagaaatggcatcagaatctttgcagtagccattttgccatggaacacacacacacacacaggtataggtaacagcaagtagggtccacagaagtacaaaagcttgataggaaataaaatgctccccagggccccctaaagagcatatccatgctatccatataaagccaagcaattgaaaaggaggcacacatgcaacgggtcctctttatggcaagatgaatgagatgtcccggaggagggaggtgggagtggcagcaggggcagtgatgagtgattccaaacactgatgggtctatccatggagcagtggaaagagcatgcccaatcctgtcgagagaaacccatttgcccgctggaaaatcggtgacaccaagctatccatgcatgcatcacaagaacctatagcatgtgactggattctgcttctgctgcatagcccagcagatgcatcaagcagctaccgtcttttcaatgctgcagcttttgagttatgctgcatattcatatatacgtcaatcagtcaaaaccttctcatctttcttctgtctcctttttttctctgtcatgggctcatggcacacatccaactgcaatgtggtgaacgagtatgtgggagcgatgaggcagctcgcatgtgagatcctggacctgctcggagaggggctagggctcaaggaccccagatccttcagcaggctcatcgctgacacagacagcgactcactcctgcggataaaccactaccctccaccatgcgccattcacaagcttgaccacgacagtcagtgcaggatgaagaacagtttcaggatcgtggcaggcaatggcgcgaaccagtcggcaggtgcacggatcggattcggggagcactcagacccgcagatccttagcttgctccgatcaaacgatgttgacggccttcaggtgcttctgaacagcgacggcagagaggtgtgggttcaggtgccagccgatccatcagcgttctttgtcaatgttggtgatctcctccaggtaaaataaacaggcactgcggctagtagattaggtaaatgagaattgcttctatatatgagctaccaacgactgtgtcttctaaacagacaaccaggttaattagcaattgctcctttttttgtgaaaagatgggtcagcactgatgttttttggacagcatatgcaccaagtacatcgtaccaactgacaaggatttctgtttttgtcttgttagttgttaccacatctgaatctaacaacattaatccattccatggtgcaacaatataatgtaatatcatgtctcttttcctttttcttgtatgtatgttcccaggccttcacaaatgggaaggtgataagcgtccggcacagggtaattgcaagctcgagcagggcgaggctgtcaacgatctacttcgctgcgccgccactgcatgcacgaattttggccctcccagagacagtcacagccaactcacccaggcagtaccggcccttcacctgggccgagtacaagaagacaatgtactccctccgcctcagccacagccgcctcaacctcttccacatcggccatgatgaccacggcaaaggagaacaagaatagggagaaagtggctgaactgcaggcagagagtttatgttggaggcttaggtaggtagaattgtccccaaaattttggctctctggcctccacagccagataatgtctagcagtatgctggttctgccaagtgccaatgggtaatagtatttagcattgtacacaagtccttgttgtatggaactgatgtactattgcctgttttagcagtttgttgtctccacctaacttttatttactctcccccccccctttctagagttgcctttgcttaaagaaacctcttccttgcacaaaagtgagacctaacaaggactccctgctgacaattttgatacatcatccatttttatggaatctaaaattgaagcctaaaaggacttcaaatgtcacatatactataaaaataggtcaaggaagtgatagaatgttcaattaattaattctgcaaacccatcacatcacaaaacaattccccactgtttatcaccttcactgctagttcagaaactcaaattcccttgggatcaatgtctttttctagggtgagcgattaatgggatatcatttaagtaagatatttagttttttagctctccttacttccaaactagtcctcataatgcaaatattgtatcattatatctatgtgaataataagtatattttctctcaaatatgcaggagagttatgtgtcattatattaataagaaaagaaaaa

SEQ ID NO: 62414 - DNA, 2340 bp, Zea Mays
gctcccagcccactatacagtatatacacacatcatcccactccttatcgctatatatagcagtgttgtgtgtccatctctctgctacattgcaccgcatcgtctaagctcgcctgccctttacagcagcttactactacaaagacgacaacacagcgcgcgcgcgccaagctgagctcagctcgtcacgacacgccagcatggtggtgccttccacgacgccggtggtgcgccaagaaacgccaccgccgtcccacgacggcataggcataccgacggtggacctgtcggcgccgggcggccgcggcgcgctgtcgcggcaggtggcgcgcgcgtgcgcgcagcacggcttcttccgggccgtgaaccacggcgtggcgccaggccccgccgcacggctggacgccgccgccaggacgttcttcgcgctggcgccgcacaacaagcagcgcgccggcccgcccagcccactcggatacggctgccgcagcatcggcttcaacggcgacgccggggagctcgagtacctgctgctccacgccaacccggccgccgtcgcgcacagggccagatccatcgacactgatgacccctcgcgcttcagcaatgtggtgaacgagtatgtgggagcgatgaggcagctcgcatgtgagatcctggacctgctcggagaggggctagggctcaaggaccccagatccttcagcaggctcatcgctgacacagacagcgactcactcctgcggataaaccactaccctccaccatgcgccattcacaagcttgaccacgacagtcagtgcaggatgaagaacagtttcaggatcgtggcaggcaatggcgcgaaccagtcggcaggtgcacggatcggattcggggagcactcagacccgcagatccttagcttgctccgatcaaacgatgttgacggccttcaggtgcttctgaacagcgacggcagagaggtgtgggttcaggtgccagccgatccatcagcgttctttgtcaatgttggtgatctcctccaggtaaaataaacaggcactgcggctagtagattaggtaaatgagaattgcttctatatatgagctaccaacgactgtgtcttctaaacagacaaccaggttaattagcaattgctcctttttttgtgaaaagatgggtcagcactgatgttttttggacagcatatgcaccaagtacatcgtaccaactgacaaggatttctgtttttgtcttgttagttgttaccacatctgaatctaacaacattaatccattccatggtgcaacaatataatgtaatatcatgtctcttttcctttttcttgtatgtatgttcccaggccttcacaaatgggaaggtgataagcgtccggcacagggtaattgcaagctcgagcagggcgaggctgtcaacgatctacttcgctgcgccgccactgcatgcacgaattttggccctcccagagacagtcacagccaactcacccaggcagtaccggcccttcacctgggccgagtacaagaagacaatgtactccctccgcctcagccacagccgcctcaacctcttccacatcggccatgatgaccacggcaaaggagaacaagaatagggagaaagtggctgaactgcaggcagagagtttatgttggaggcttaggtaggtagaattgtccccaaaattttggctctctggcctccacagccagataatgtctagcagtatgctggttctgccaagtgccaatgggtaatagtatttagcattgtacacaagtccttgttgtatggaactgatgtactattgcctgttttagcagtttgttgtctccacctaacttttatttactctcccccccccctttctagagttgcctttgcttaaagaaacctcttccttgcacaaaagtgagacctaacaaggactccctgctgacaattttgatacatcatccatttttatggaatctaaaattgaagcctaaaaggacttcaaatgtcacatatactataaaaataggtcaaggaagtgatagaatgttcaattaattaattctgcaaacccatcacatcacaaaacaattccccactgtttatcaccttcactgctagttcagaaactcaaattcccttgggatcaatgtctttttctagggtgagcgattaatgggatatcatttaagtaagatatttagttttttagctctccttacttccaaactagtcctcataatgcaaatattgtatcattatatctatgtgaataataagtatattttctctcaaatatgcaggagagttatgtgtcattatattaataagaaaagaaaaa

SEQ ID NO: 62415 - DNA, 1073 bp, Zea Mays
ccttctctttcaccttcagctggaccccgcccctggcccgctcgtcaggcacccaagcaccccacgcgacgcggcacttccacaaggtggatagcgaacccacagcacgtctccatctctggtttgaccgccgccgccgccgccctacgcggctacgccaggcgccgaggccttcgtcggcattttcgtcggcaagcactcaccaggtactcccatgccttctcttcccttcctgctttgcgagtcccagcgccaaacacccaaaccctaactatttggctattggctatttgatgcctactacgaacattttggcaaaagaaaaaggtattcagccatggtttttcttgaggcagagatgtcatggaatgtgttgatctcacctagccagctggaccgcaagggcctcctgctccgcaaggctatcattgtgcgtcttctggaggatgtcacaaacaggagggcttcgaaagagcatggctactacattgctgttaatcagctgaaggcaatatctgaagggaaagatcctcaagcatggcgtgttcctcaaatccggacccgtggagagcatcttcctggctgagaagtcgatgagtaattacaagtacataggtggggagaatgcgatgttcatgaacgaccactcgaagctggagaaggacaccgccgtgcgcttcaaggtcctagggttccgctggatggaggctgaccgccaattccagctccttgctacgatcgctggtgacttccttgggccgctgtgaactgcttccacaggtcaaacaggttctaatgtacattgctcgttagatggtggatggatggttggatctgatgtgtagaattaaactttgctaccagtggtttggtcttgtagaacctgagacatggtaggttttctagatgctgttgccagtgatatttagctctggtttgaacgtatcagtgtacctgtatgatgaacaagcgttgtcatggatgtaccttttctatgcttgcttggaagttaacgttacatggtgttccctgatctggcatctcggcgataagatcaaccttcggtgcttgtt

SEQ ID NO: 62416 - DNA, 2974 bp, Zea Mays
caagcgtgggagaagggaacgccaacgtcgccaagtgcagctgcaaagcgagagcgaaggagagagagagagcgagcccgtgcgaccttgatttgcttgctcgtgaatggtggcttaggattttgccaccttccatctcccgcttctagccaccgtctcggctccagaagatgtcgaaggatggggcggcgttgggcttggtcatgatggcggggggtgacgccagtgggagtgacccggaggtgcacgcgaatatgcagcgtgtcaaagtataccgtttaaccaatgacgggcagtgggatgatcagggaacgggccacataacaattgactatattgaggggtcaagagaaattgctctggctgtcgtggatgaggtggataatgacacactactacttcaccatcttacttcagataatatctacaagagacaagaacaaacacttatctcattgaaggatcctgaaaaagcactagatttactgctgagctttcaagaagctaaaggatgcttacatatatggcagagcttaacttccttacagcaaaagctacagtctggtgaccctggctatgaattgaaggatcttccttctcttgagctgtccacccttccttcacttttaaagactatattggagtgcggaaagaaggatgggacacgcgttgcaaagttaatatctcgaaatcagcatgaatttttccccaagctagtggaccttttcagaatgtgtgagaattcaagaaacatggatcatctccacatgatctttagactagtcaagggaatcatattgttgaacgatgctggcatatttgacaagattttctctgatgattttatccttgacataattggggcccttgagtatgatccagaggttcccagtgtgcagagtcatcgtgaattcgtgaagaatcaaaccctcaatgaggccatacacattgggaatgtttctgtggtctcaaagattcgtcaaacatacatagtaggttatataaaggatgttatattactgaatgcactggatggtcctactttgtcaagccttaactcaatcattgagaggaacaagccttttgttgtttctgtactaaaggatgatgcttcttttatccatgatctgattgcaaggataacatcttcgaatacctctgctgaatcaaaaagcaaactggtcttgtttttgcgtgagctttgcattatcagcaaaagtttggagccgaaagtacgatcacatatgtctaggtatctcattgatgtaggagcgctaaacataatttctgatgtgttacagagtcaggataaagaactcttttcagctggggcaaacatactcgggtattttgttgatctgcatcctgacttagttagaacatttattgccaatcatgaagagaacctggaaggcagttctcttcttgagtttctggttcaagggatggtagttgactccgccaatgaaatgctctatcagtcttgtctaaaggaactgttaggttcttctgatacaactgtgaatcatcatgatgttgttcttcggcttttctttgacaagcatcttcaaaaattgattgacgcaatagcgtcgtcctgcgctccaaagggcattgccagatcaacgtctggtttagctggtgttcgcacaacggttgaacagcattctgctaagcctgaaacattgttgaaaatttgtgaacttttatccttctgcgcacttcatcatacaaaccggatgaagatatttttctcaaccaatgcaatggagaaaattctgacattaactcataggagagagaaggttttggttctggcaggagtccaattcgtgcggattataattggtagaaaggatgactttcttgttgaccgtgttatcaagttcaacctgttaaagccagttattaaggcttttgatgaaaatgaaggtagagacaacatgctacaatctgtggtccttgaactgttggagtatataagaaaggaaaatatcaagcctcttattgaatatgttgctgagtcttgttggggccaacttgtgaagtttgaacgattgcagagtattatggccttcaaacttaagattgaggagagtgccgaaacaaagcaaagtaccagtgtggttgacatgagaatgaagaaagcagacgaaagaggtgctgataaacgacaggaaggttattttgaggacagtgacagagtagattcttctacacctacaatgcattcacaggagcaatctatcccagcaagaaagcctgaaaatgctgatggttgttcgaaagataaggagggccccccctcgccttctagaagcacgaaaaattctgatggcagtggcgaaggggatggaagccgaggctcttagaatcaacaacgtgccccggaaacttcaggtcctgtgccccggaaacttctagaagcacgaaaaaacttctagaagcacgaaagataaggactgcaacgaagctgcaggggatttgtctcccaagatggtccatacttcctagatacaatgaaacctattgacgtagagcctcggtgaggtgatactattgttttttcaagttacacttcaacatgccgttgcttatgatgaaatcgagagtacacatctcaacttggaacccgagaaatgattggatgtgagacagttttggccacagttgtgttcatctcagacatcaattttggctgagttgtgaacatgtacagataaatccccgagaaaagaattggaaaggcgcttcaacattgtttggtgccgacgcgttgctgggctgtggacctgaatattttatcagactagttaggtttctcttcggcatctaacgtggacctacctgtcaatgttgttgacaatgatgctgctctaaagaaggcgggagaacctgagcgagagccaagagtgttccgatgtgtgagcaatctaaattccagagtaatgagttgtgattaggtcatgtaacg

SEQ ID NO: 62417 - DNA, 2752 bp, Zea Mays
gtgatgtttcaaaacaatgtccagcgtgtcaaagtataccgtttaaccaatgacgggcagtgggatgatcagggaacgggccacataacaattgactatattgaggggtcaagagaaattgctctggctgtcgtggatgaggtggataatgacacactactacttcaccatcttacttcagataatatctacaagagacaagaacaaacacttatctcattgaaggatcctgaaaaagcactagatttactgctgagctttcaagaagctaaaggatgcttacatatatggcagagcttaacttccttacagcaaaagctacagtctggtgaccctggctatgaattgaaggatcttccttctcttgagctgtccacccttccttcacttttaaagactatattggagtgcggaaagaaggatgggacacgcgttgcaaagttaatatctcgaaatcagcatgaatttttccccaagctagtggaccttttcagaatgtgtgagaattcaagaaacatggatcatctccacatgatctttagactagtcaagggaatcatattgttgaacgatgctggcatatttgacaagattttctctgatgattttatccttgacataattggggcccttgagtatgatccagaggttcccagtgtgcagagtcatcgtgaattcgtgaagaatcaaaccctcaatgaggccatacacattgggaatgtttctgtggtctcaaagattcgtcaaacatacatagtaggttatataaaggttgtttctgtactaaaggatgatgcttcttttatccatgatctgattgcaaggataacatcttcgaatacctctgctgaatcaaaaagcaaactggtcttgtttttgcgtgagctttgcattatcagcaaaagtttggagccgaaagtacgatcacatatgtctaggtatctcattgatgtaggagcgctaaacataatttctgatgtgttacagagtcaggataaagaactcttttcagctggggcaaacatactcgggtattttgttgatctgcatcctgacttagttagaacatttattgccaatcatgaagagaacctggaaggcagttctcttcttgagtttctggttcaagggatggtagttgactccgccaatgaaatgctctatcagtcttgtctaaaggaactgttaggttcttctgatacaactgtgaatcatcatgatgttgttcttcggcttttctttgacaagcatcttcaaaaattgattgacgcaatagcgtcgtcctgcgctccaaagggcattgccagatcaacgtctggtttagctggtgttcgcacaacggttgaacagcattctgctaagcctgaaacattgttgaaaatttgtgaacttttatccttctgcgcacttcatcatacaaaccggatgaagatatttttctcaaccaatgcaatggagaaaattctgacattaactcataggagagagaaggttttggttctggcaggagtccaattcgtgcggattataattggtagaaaggatgactttcttgttgaccgtgttatcaagttcaacctgttaaagccagttattaaggcttttgatgaaaatgaaggtagagacaacatgctacaatctgtggtccttgaactgttggagtatataagaaaggaaaatatcaagcctcttattgaatatgttgctgagtcttgttggggccaacttgtgaagtttgaacgattgcagagtattatggccttcaaacttaagattgaggagagtgccgaaacaaagcaaagtaccagtgtggttgacatgagaatgaagaaagcagacgaaagaggtgctgataaacgacaggaaggttattttgaggacagtgacagagtagattcttctacacctacaatgcattcacaggagcaatctatcccagcaagaaagcctgaaaatgctgatggttgttcgaaagataaggagggccccccctcgccttctagaagcacgaaaaattctgatggcagtggcgaaggggatggaagccgaggctcttagaatcaacaacgtgccccggaaacttcaggtcctgtgccccggaaacttctagaagcacgaaaaaacttctagaagcacgaaagataaggactgcaacgaagctgcaggggatttgtctcccaagatggtccatacttcctagatacaatgaaacctattgacgtagagcctcggtgaggtgatactattgttttttcaagttacacttcaacatgccgttgcttatgatgaaatcgagagtacacatctcaacttggaacccgagaaatgattggatgtgagacagttttggccacagttgtgttcatctcagacatcaattttggctgagttgtgaacatgtacagataaatccccgagaaaagaattggaagttgagtatgaattcctttttgtgcagcattatagtaggaaagctaatcctactttttattgaattagtgtagtaagactaacagaacttagggccgaaaaaatgcatgccccgttctcgaaaatcgaaattgtttcctgtgggaccattggctaagctgttactcttgtagaagtggcaggacaggtcattttggcgtcagtagcattgtaatctcatagaactgtgattcgtggataatgcatgatgcaaaatccaactgaggctttgtttagctagactttgctacagcacaatccacataaatctctcttatttaaa

SEQ ID NO: 62418 - DNA, 2696 bp, Zea Mays
gtgatgtttcaaaacaatgtccagcgtgtcaaagtataccgtttaaccaatgacgggcagtgggatgatcagggaacgggccacataacaattgactatattgaggggtcaagagaaattgctctggctgtcgtggatgaggtggataatgacacactactacttcaccatcttacttcagataatatctacaagagacaagaacaaacacttatctcattgaaggatcctgaaaaagcactagatttactgctgagctttcaagaagctaaaggatgcttacatatatggcagagcttaacttccttacagcaaaagctacagtctggtgaccctggctactatattggagtgcggaaagaaggatgggacacgcgttgcaaagttaatatctcgaaatcagcatgaatttttccccaagctagtggaccttttcagaatgtgtgagaattcaagaaacatggatcatctccacatgatctttagactagtcaagggaatcatattgttgaacgatgctggcatatttgacaagattttctctgatgattttatccttgacataattggggcccttgagtatgatccagaggttcccagtgtgcagagtcatcgtgaattcgtgaagaatcaaaccctcaatgaggccatacacattgggaatgtttctgtggtctcaaagattcgtcaaacatacatagtaggttatataaaggttgtttctgtactaaaggatgatgcttcttttatccatgatctgattgcaaggataacatcttcgaatacctctgctgaatcaaaaagcaaactggtcttgtttttgcgtgagctttgcattatcagcaaaagtttggagccgaaagtacgatcacatatgtctaggtatctcattgatgtaggagcgctaaacataatttctgatgtgttacagagtcaggataaagaactcttttcagctggggcaaacatactcgggtattttgttgatctgcatcctgacttagttagaacatttattgccaatcatgaagagaacctggaaggcagttctcttcttgagtttctggttcaagggatggtagttgactccgccaatgaaatgctctatcagtcttgtctaaaggaactgttaggttcttctgatacaactgtgaatcatcatgatgttgttcttcggcttttctttgacaagcatcttcaaaaattgattgacgcaatagcgtcgtcctgcgctccaaagggcattgccagatcaacgtctggtttagctggtgttcgcacaacggttgaacagcattctgctaagcctgaaacattgttgaaaatttgtgaacttttatccttctgcgcacttcatcatacaaaccggatgaagatatttttctcaaccaatgcaatggagaaaattctgacattaactcataggagagagaaggttttggttctggcaggagtccaattcgtgcggattataattggtagaaaggatgactttcttgttgaccgtgttatcaagttcaacctgttaaagccagttattaaggcttttgatgaaaatgaaggtagagacaacatgctacaatctgtggtccttgaactgttggagtatataagaaaggaaaatatcaagcctcttattgaatatgttgctgagtcttgttggggccaacttgtgaagtttgaacgattgcagagtattatggccttcaaacttaagattgaggagagtgccgaaacaaagcaaagtaccagtgtggttgacatgagaatgaagaaagcagacgaaagaggtgctgataaacgacaggaaggttattttgaggacagtgacagagtagattcttctacacctacaatgcattcacaggagcaatctatcccagcaagaaagcctgaaaatgctgatggttgttcgaaagataaggagggccccccctcgccttctagaagcacgaaaaattctgatggcagtggcgaaggggatggaagccgaggctcttagaatcaacaacgtgccccggaaacttcaggtcctgtgccccggaaacttctagaagcacgaaaaaacttctagaagcacgaaagataaggactgcaacgaagctgcaggggatttgtctcccaagatggtccatacttcctagatacaatgaaacctattgacgtagagcctcggtgaggtgatactattgttttttcaagttacacttcaacatgccgttgcttatgatgaaatcgagagtacacatctcaacttggaacccgagaaatgattggatgtgagacagttttggccacagttgtgttcatctcagacatcaattttggctgagttgtgaacatgtacagataaatccccgagaaaagaattggaagttgagtatgaattcctttttgtgcagcattatagtaggaaagctaatcctactttttattgaattagtgtagtaagactaacagaacttagggccgaaaaaatgcatgccccgttctcgaaaatcgaaattgtttcctgtgggaccattggctaagctgttactcttgtagaagtggcaggacaggtcattttggcgtcagtagcattgtaatctcatagaactgtgattcgtggataatgcatgatgcaaaatccaactgaggctttgtttagctagactttgctacagcacaatccacataaatctctcttatttaaa

SEQ ID NO: 62419 - DNA, 2651 bp, Zea Mays
gtgatgtttcaaaacaatgtccagcgtgtcaaagtataccgtttaaccaatgacgggcagtgggatgatcagggaacgggccacataacaattgactatattgaggggtcaagagaaattgctctggctgtcgtggatgaggtggataatgacacactactacttcaccatcttacttcagataatatctacaagagacaagaacaaacacttatctcattgaaggatcctgaaaaagcactagatttactgctgagctttcaagaagctaaaggatgcttacatatatggcagagcttaacttccttacagcaaaagctacagtctggtgaccctggctactatattggagtgcggaaagaaggatgggacacgcgttgcaaagttaatatctcgaaatcagcatgaatttttccccaagctagtggaccttttcagaatgtgtgagaattcaagaaacatggatcatctccacatgatctttagactagtcaagggaatcatattgttgaacgatgctggcatatttgacaagattttctctgatgattttatccttgacataattggggcccttgagtatgatccagaggttcccagtgtgcagagtcatcgtgaattcgtgaagaatcaaaccctcaatgaggccatacacattgggaatgtttctgtggtctcaaagattcgtcaaacatacatagtaggttatataaaggttgtttctgtactaaaggatgatgcttcttttatccatgatctgattgcaaggataacatcttcgaatacctctgctgaatcaaaaagcaaactggtcttgtttttgcgtgagctttgcattatcagcaaaagtttggagccgaaagtacgatcacatatgtctaggtatctcattgatgtaggagcgctaaacataatttctgatgtgttacagagtcaggataaagaactcttttcagctggggcaaacatactcgggtattttgttgatctgcatcctgacttagttagaacatttattgccaatcatgaagagaacctggaaggcagttctcttcttgagtttctggttcaagggatggtagttgactccgccaatgaaatgctctatcagtcttgtctaaaggaactgttaggttcttctgatacaactgtgaatcatcatgatgttgttcttcggcttttctttgacaagcatcttcaaaaattgattgacgcaatagcgtcgtcctgcgctccaaagggcattgccagatcaacgtctggtttagctggtgttcgcacaacggttgaacagcattctgctaagcctgaaacattgttgaaaatttgtgaacttttatccttctgcgcacttcatcatacaaaccggatgaagatatttttctcaaccaatgcaatggagaaaattctgacattaactcataggagagagaaggttttggttctggcaggagtccaattcgtgcggattataattggtagaaaggatgactttcttgttgaccgtgttatcaagttcaacctgttaaagccagttattaaggcttttgatgaaaatgaaggtagagacaacatgctacaatctgtggtccttgaactgttggagtatataagaaaggaaaatatcaagcctcttattgaatatgttgctgagtcttgttggggccaacttattgaggagagtgccgaaacaaagcaaagtaccagtgtggttgacatgagaatgaagaaagcagacgaaagaggtgctgataaacgacaggaaggttattttgaggacagtgacagagtagattcttctacacctacaatgcattcacaggagcaatctatcccagcaagaaagcctgaaaatgctgatggttgttcgaaagataaggagggccccccctcgccttctagaagcacgaaaaattctgatggcagtggcgaaggggatggaagccgaggctcttagaatcaacaacgtgccccggaaacttcaggtcctgtgccccggaaacttctagaagcacgaaaaaacttctagaagcacgaaagataaggactgcaacgaagctgcaggggatttgtctcccaagatggtccatacttcctagatacaatgaaacctattgacgtagagcctcggtgaggtgatactattgttttttcaagttacacttcaacatgccgttgcttatgatgaaatcgagagtacacatctcaacttggaacccgagaaatgattggatgtgagacagttttggccacagttgtgttcatctcagacatcaattttggctgagttgtgaacatgtacagataaatccccgagaaaagaattggaagttgagtatgaattcctttttgtgcagcattatagtaggaaagctaatcctactttttattgaattagtgtagtaagactaacagaacttagggccgaaaaaatgcatgccccgttctcgaaaatcgaaattgtttcctgtgggaccattggctaagctgttactcttgtagaagtggcaggacaggtcattttggcgtcagtagcattgtaatctcatagaactgtgattcgtggataatgcatgatgcaaaatccaactgaggctttgtttagctagactttgctacagcacaatccacataaatctctcttatttaaa

SEQ ID NO: 62420 - DNA, 3021 bp, Zea Mays
caagcgtgggagaagggaacgccaacgtcgccaagtgcagctgcaaagcgagagcgaaggagagagagagagcgagcccgtgcgaccttgatttgcttgctcgtgaatggtggcttaggattttgccaccttccatctcccgcttctagccaccgtctcggctccagaagatgtcgaaggatggggcggcgttgggcttggtcatgatggcggggggtgacgccagtgggagtgacccggaggtgcacgcgaatatgcagcgtgtcaaagtataccgtttaaccaatgacgggcagtgggatgatcagggaacgggccacataacaattgactatattgaggggtcaagagaaattgctctggctgtcgtggatgaggtggataatgacacactactacttcaccatcttacttcagataatatctacaagagacaagaacaaacacttatctcattgaaggatcctgaaaaagcactagatttactgctgagctttcaagaagctaaaggatgcttacatatatggcagagcttaacttccttacagcaaaagctacagtctggtgaccctggctatgaattgaaggatcttccttctcttgagctgtccacccttccttcacttttaaagactatattggagtgcggaaagaaggatgggacacgcgttgcaaagttaatatctcgaaatcagcatgaatttttccccaagctagtggaccttttcagaatgtgtgagaattcaagaaacatggatcatctccacatgatctttagactagtcaagggaatcatattgttgaacgatgctggcatatttgacaagattttctctgatgattttatccttgacataattggggcccttgagtatgatccagaggttcccagtgtgcagagtcatcgtgaattcgtgaagaatcaaaccctcaatgaggccatacacattgggaatgtttctgtggtctcaaagattcgtcaaacatacatagtaggttatataaaggatgttatattactgaatgcactggatggtcctactttgtcaagccttaactcaatcattgagaggaacaagccttttgttgtttctgtactaaaggatgatgcttcttttatccatgatctgattgcaaggataacatcttcgaatacctctgctgaatcaaaaagcaaactggtcttgtttttgcgtgagctttgcattatcagcaaaagtttggagccgaaagtacgatcacatatgtctaggtatctcattgatgtaggagcgctaaacataatttctgatgtgttacagagtcaggataaagaactcttttcagctggggcaaacatactcgggtattttgttgatctgcatcctgacttagttagaacatttattgccaatcatgaagagaacctggaaggcagttctcttcttgagtttctggttcaagggatggtagttgactccgccaatgaaatgctctatcagtcttgtctaaaggaactgttaggttcttctgatacaactgtgaatcatcatgatgttgttcttcggcttttctttgacaagcatcttcaaaaattgattgacgcaatagcgtcgtcctgcgctccaaagggcattgccagatcaacgtctggtttagctggtgttcgcacaacggttgaacagcattctgctaagcctgaaacattgttgaaaatttgtgaacttttatccttctgcgcacttcatcatacaaaccggatgaagatatttttctcaaccaatgcaatggagaaaattctgacattaactcataggagagagaaggttttggttctggcaggagtccaattcgtgcggattataattggtagaaaggatgactttcttgttgaccgtgttatcaagttcaacctgttaaagccagttattaaggcttttgatgaaaatgaaggtagagacaacatgctacaatctgtggtccttgaactgttggagtatataagaaaggaaaatatcaagcctcttattgaatatgttgctgagtcttgttggggccaacttattgaggagagtgccgaaacaaagcaaagtaccagtgtggttgacatgagaatgaagaaagcagacgaaagaggtgctgataaacgacaggaaggttattttgaggacagtgacagagtagattcttctacacctacaatgcattcacaggagcaatctatcccagcaagaaagcctgaaaatgctgatggttgttcgaaagataaggagggccccccctcgccttctagaagcacgaaaaattctgatggcagtggcgaaggggatggaagccgaggctcttagaatcaacaacgtgccccggaaacttcaggtcctgtgccccggaaacttctagaagcacgaaaaaacttctagaagcacgaaagataaggactgcaacgaagctgcaggggatttgtctcccaagatggtccatacttcctagatacaatgaaacctattgacgtagagcctcggtgaggtgatactattgttttttcaagttacacttcaacatgccgttgcttatgatgaaatcgagagtacacatctcaacttggaacccgagaaatgattggatgtgagacagttttggccacagttgtgttcatctcagacatcaattttggctgagttgtgaacatgtacagataaatccccgagaaaagaattggaagttgagtatgaattcctttttgtgcagcattatagtaggaaagctaatcctactttttattgaattagtgtagtaagactaacagaacttagggccgaaaaaatgcatgccccgttctcgaaaatcgaaattgtttcctgtgggaccattggctaagctgttactcttgtagaagtggcaggacaggtcattttggcgtcagtagcattgtaatctcatagaactgtgattcgtggataatgcatgatgcaaaatccaactgaggctttgtttagctagactttgctacagcacaatccacataaatctctcttatttaaa

SEQ ID NO: 62421 - DNA, 3066 bp, Zea Mays
caagcgtgggagaagggaacgccaacgtcgccaagtgcagctgcaaagcgagagcgaaggagagagagagagcgagcccgtgcgaccttgatttgcttgctcgtgaatggtggcttaggattttgccaccttccatctcccgcttctagccaccgtctcggctccagaagatgtcgaaggatggggcggcgttgggcttggtcatgatggcggggggtgacgccagtgggagtgacccggaggtgcacgcgaatatgcagcgtgtcaaagtataccgtttaaccaatgacgggcagtgggatgatcagggaacgggccacataacaattgactatattgaggggtcaagagaaattgctctggctgtcgtggatgaggtggataatgacacactactacttcaccatcttacttcagataatatctacaagagacaagaacaaacacttatctcattgaaggatcctgaaaaagcactagatttactgctgagctttcaagaagctaaaggatgcttacatatatggcagagcttaacttccttacagcaaaagctacagtctggtgaccctggctatgaattgaaggatcttccttctcttgagctgtccacccttccttcacttttaaagactatattggagtgcggaaagaaggatgggacacgcgttgcaaagttaatatctcgaaatcagcatgaatttttccccaagctagtggaccttttcagaatgtgtgagaattcaagaaacatggatcatctccacatgatctttagactagtcaagggaatcatattgttgaacgatgctggcatatttgacaagattttctctgatgattttatccttgacataattggggcccttgagtatgatccagaggttcccagtgtgcagagtcatcgtgaattcgtgaagaatcaaaccctcaatgaggccatacacattgggaatgtttctgtggtctcaaagattcgtcaaacatacatagtaggttatataaaggatgttatattactgaatgcactggatggtcctactttgtcaagccttaactcaatcattgagaggaacaagccttttgttgtttctgtactaaaggatgatgcttcttttatccatgatctgattgcaaggataacatcttcgaatacctctgctgaatcaaaaagcaaactggtcttgtttttgcgtgagctttgcattatcagcaaaagtttggagccgaaagtacgatcacatatgtctaggtatctcattgatgtaggagcgctaaacataatttctgatgtgttacagagtcaggataaagaactcttttcagctggggcaaacatactcgggtattttgttgatctgcatcctgacttagttagaacatttattgccaatcatgaagagaacctggaaggcagttctcttcttgagtttctggttcaagggatggtagttgactccgccaatgaaatgctctatcagtcttgtctaaaggaactgttaggttcttctgatacaactgtgaatcatcatgatgttgttcttcggcttttctttgacaagcatcttcaaaaattgattgacgcaatagcgtcgtcctgcgctccaaagggcattgccagatcaacgtctggtttagctggtgttcgcacaacggttgaacagcattctgctaagcctgaaacattgttgaaaatttgtgaacttttatccttctgcgcacttcatcatacaaaccggatgaagatatttttctcaaccaatgcaatggagaaaattctgacattaactcataggagagagaaggttttggttctggcaggagtccaattcgtgcggattataattggtagaaaggatgactttcttgttgaccgtgttatcaagttcaacctgttaaagccagttattaaggcttttgatgaaaatgaaggtagagacaacatgctacaatctgtggtccttgaactgttggagtatataagaaaggaaaatatcaagcctcttattgaatatgttgctgagtcttgttggggccaacttgtgaagtttgaacgattgcagagtattatggccttcaaacttaagattgaggagagtgccgaaacaaagcaaagtaccagtgtggttgacatgagaatgaagaaagcagacgaaagaggtgctgataaacgacaggaaggttattttgaggacagtgacagagtagattcttctacacctacaatgcattcacaggagcaatctatcccagcaagaaagcctgaaaatgctgatggttgttcgaaagataaggagggccccccctcgccttctagaagcacgaaaaattctgatggcagtggcgaaggggatggaagccgaggctcttagaatcaacaacgtgccccggaaacttcaggtcctgtgccccggaaacttctagaagcacgaaaaaacttctagaagcacgaaagataaggactgcaacgaagctgcaggggatttgtctcccaagatggtccatacttcctagatacaatgaaacctattgacgtagagcctcggtgaggtgatactattgttttttcaagttacacttcaacatgccgttgcttatgatgaaatcgagagtacacatctcaacttggaacccgagaaatgattggatgtgagacagttttggccacagttgtgttcatctcagacatcaattttggctgagttgtgaacatgtacagataaatccccgagaaaagaattggaagttgagtatgaattcctttttgtgcagcattatagtaggaaagctaatcctactttttattgaattagtgtagtaagactaacagaacttagggccgaaaaaatgcatgccccgttctcgaaaatcgaaattgtttcctgtgggaccattggctaagctgttactcttgtagaagtggcaggacaggtcattttggcgtcagtagcattgtaatctcatagaactgtgattcgtggataatgcatgatgcaaaatccaactgaggctttgtttagctagactttgctacagcacaatccacataaatctctcttatttaaa

SEQ ID NO: 62422 - DNA, 1840 bp, Zea Mays
gtgatgtttcaaaacaatgtccagcgtgtcaaagtataccgtttaaccaatgacgggcagtgggatgatcagggaacgggccacataacaattgactatattgaggggtcaagagaaattgctctggctgtcgtggatgaggtggataatgacacactactacttcaccatcttacttcagataatatctacaagagacaagaacaaacacttatctcattgaaggatcctgaaaaagcactagatttactgctgagctttcaagaagctaaaggatgcttacatatatggcagagcttaacttccttacagcaaaagctacagtctggtgaccctggctactatattggagtgcggaaagaaggatgggacacgcgttgcaaagttaatatctcgaaatcatgaatttttccccaagctagtggaccttttcagaatgtgtgagaattcaagaaacatggatcatctccacatgatctttagactagtcaagggaatcatattgttgaacgatgctggcatatttgacaagattttctctgatgattttatccttgacataattggggcccttgagtatgatccagaggttcccagtgtgcagagtcatcgtgaattcgtgaagaatcaaaccctcaatgaggccatacacattgggaatgtttctgtggtctcaaagattcgtcaaacatacatagtaggttatataaaggttgtttctgtactaaaggatgatgcttcttttatccatgatctgattgcaaggataacatcttcgaatacctctgctgaatcaaaaagcaaactggtcttgtttttgcgtgagctttgcattatcagcaaaagtttggagccgaaagtacgatcacatatgtctaggtatctcattgatgtaggagcgctaaacataatttctgatgtgttacagagtcaggataaagaactcttttcagctggggcaaacatactcgggtattttgttgatctgcatcctgacttagttagaacatttattgccaatcatgaagagaacctggaaggcagttctcttcttgagtttctggttcaagggatggtagttgactccgccaatgaaatgctctatcagtcttgtctaaaggaactgttaggttcttctgatacaactgtgaatcatcatgatgttgttcttcggcttttctttgacaagcatcttcaaaaattgattgacgcaatagcgtcgtcctgcgctccaaagggcattgccagatcaacgtctggtttagctggtgttcgcacaacggttgaacagcattctgctaagcctgaaacattgttgaaaatttgtgaacttttatccttctgcgcacttcatcatacaaaccggatgaagatatttttctcaaccaatgcaatggagaaaattctgacattaactcataggagagagaaggttttggttctggcaggagtccaattcgtgcggattataattggtagaaaggatgactttcttgttgaccgtgttatcaagttcaacctgttaaagccagttattaaggcttttgatgaaaatgaaggtagagacaacatgctacaatctgtggtccttgaactgttggagtatataagaaaggaaaatatcaagcctcttattgaatatgttgctgagtcttgttggggccaacttattgaggagagtgccgaaacaaagcaaagtaccagtgtggttgacatgagaatgaagaaagcagacgaaagaggtgctgataaacgacaggaaggttattttgaggacagtgacagagtagattcttctacacctacaatgcattcacaggagcaatctatcccagcaagg

SEQ ID NO: 62423 - DNA, 3013 bp, Zea Mays
cgtcatggtttcatccctaactatagggggcggtgttttaggctccaacggtttggttaaccttggttgagtgttcgtgcattgtaacacaacaatcatatatgcataacaaatgtgaagaattagctggaccagtacaattcattccacgagttcaatttagtgatgctccttttgagtagagcgggcttgtgaattgaaagaaaacatgatcgacatgaaagtacatagattgtagccacccaaggagacatgcatagaatggaaaggcacttcgatgaagaggacattgatcagttttacaaatccctatcaaaaacaagtctgtaactgaacgggtttacaaattaaatccgatataacaaagatggcattgggtttacaaagaaaggtttacaaattaaatccaaaacttaaaactaaaacttggaacaataaataaaaagaaatgcttcaatctatttattaacccctctacaaaaaaatattaattcgtagcaaatatattagcttgtcctaaataaataagtaatgaaatttagagtatacattcaaaggagtatctatggaaataaaatatgtgtggttcatgttttgaagcatttttacttatttatacactttgtatttcatgctgaatacttttggttgttgcatccaaacaaaatttgaattttgaaatacaaactgatttgaaaatatgaaattagaagccagaaatagaaaataaaatgcaaacagaaaattgaaaagagaaaaagagaaaagaccccacctaatcacgacttaggaggaagcaccggtaacaaccgtttttttattttctcttgcgcggacatcgtgcaagcaaattctgggtgttgtgccgtagagagcagtagcttttcttcaacagctagaattatgttggggcctataaataccacctcaaccgaccatttcaaggtgtgggagtccaagaaacataacaaggcatagtatagacattttcaagtgctcatacacccaagtgcataatagaatcactcggtgattagcgtaggtgctttgcgaagtgcttaggttagttagaccgcattagcgcttgctctaggtgaatcctagttagttaagtgagtttagaaaaaccacacaacccatcgactcttgcatgagccgttgtaattgtaccgagtggggcaagagtcttgcgagaccgtgacaagcgagtttgtgtcacggccgccaccgtgtaccggagggaacgaggcccacggcgttttggacgaaagctcgttagtggagatggcggggagcgtccgagaggagacggaagtggagcaccacttgcgcgtggagaaggctcacggctctctacggagtaactcgaccgaggtgcttggccctcgtgtgggcttccctttgcgtaggggcaccaacgaggattagtcgggatcttgtgtggttccggataccttggtaaaaataccgacgtcatccacgagagtttgcatctctaccttgctctttagcttctgcatctatattaagcatttaagtttcaatctagtctttatacttagattgtttaggattgaaacttaggcattgcggtagagatagcaacacttagacaaaacatagtttgctcattctagattgtttatttacatagattttgctctaggcatttatttatggcctagtttagagaaagttttagaaatcctaattcacccctcaggcgtcacacgtttccttcaatgatgccacatgttttaattaattaattaattaattgtttaattaatgttaattagataggcaatctagttaatctaatttatagttttaacatacgttttttataaataattgttaaagtaattaatatcaactcaaatatttcgatttaatacattcttaatttaaatgcaacatctacgcctaaaaaattgttttacccacaacttctttgttttaactccgattttaatgtttctcgaacctacgatctcgtagtgatgcatagaatattactgtgtggtttattttcatctttggtgtagtgttaccatatctattatttgattgtttgtatgtattgctacacatagaagcaaggtgacgagaaatctgaagcccaactcagctaaagttgtacctgtaaaattatgccacaagtaaggttgagcatattaatactcagctagacttacctggtgtgaggggtctgctcctctacctctagaccatgaagttgtttggctcaggggtttggtttgctaaaagcactagccgagtcgaagtcaagttttagcttttcaggttctagaataatactttagactaggtgagcacctagctattcatacatggtatcaaacattaagtcaatcaacatatttttacaagtaacatcatttccactttttactcaatgcagtataatggatcaagcagtctcattagctgcgagaagcagacaattcgaatcgagttttaaccttgctaggtaaacgtggacacacgacatgcaggggcactccattcccacacacatcagtcatcccatcgattctttagcaacagaacagggcccaccgccttggcatgcaatgccccactgaccctgactgacgccgtgcagtaactgcccttgcaccccactattgctagcatgggagaccacatttcgcgacgagtgaggagagaagtccacgggcaggttcactaaggtactaggcttaccgatttatcatatttcttggtatgtgtttagtacgttcaaacgctttccacaagtatccacacgttaatccttattccgattatgtcttatagacagggcttccaccagggacccgtgtccacaagccatcataatcccatttatcaaaaatggatacaaccaattcatggcctcgtgtgagtgctagaaaaataacttgacttctaccaagatccttgattagcatagcagctactcgacctagcatactagtattcatctcataaaggaacttgagttcat

SEQ ID NO: 62424 - DNA, 1898 bp, Zea Mays
caggcagctttaaacgcaggaaccaaaaggccacggcgggagacggagaacggcgacgccggcggcgaggaggaggagggatacaacggcgagggagaagctgtctctctccacgcgtgggagcgctaaccctagctgccaacctcgcggaaacaccgggttgtgagcgtcgaagagagaggtgcaacgaggcttctcgaggaggctgggacgggatgacggcgctggggaagggaggggtggcgcggtttgcggccgcgctctttgtcctactgaatctctccgcggcgatcgccggagctactacgacgtgctgcaagtgcccaagggcgcgtccgaggatcagattaagaggtcgtaccgcaagctcgcgctgaagtaccaccccgacaagaaccccgacaacgaggaggccaacaagcgcttcgccgagatcaataacgcttatgaggtgctgacggaccaggagaagaggaagatctatgaccagtatggcgaggagggcttgaagcagttccaaggcgggggaggcggtggcggtggaatgaacattcaggacatctttaggaacttttttggtggtggtggtggtgggatggaagaggaggaagaacaaattttgaaaggtgatgaggtgattgttgaactcgatgcttcattagaggacttgtacatgggcggttcagtaaaggtttggagagagaaaaacgtcataaagccagcaccaggaaagaggcgctgcaactgtaggaacgaagtttaccatcgacaaataggtcctggaatgtatcaacagatgactgagcaggtctgtgaccaatgtccaaatgtgaaattcgtacgagaaggtgaattcttgactgttgatattgagaagggaatgaaagatgcacaggaggttttgtttttcgaggaaggagagcctaagattgatggtgaacctggcgatttgaagttcaggatccgaacagcaccacacgaccgcttcaggcgagatggcaatgacctgcatgcaacagttacaataaccctgctgcaagctctggttggtttcgagaagaccattaaccatcttgataaccatctggtagaaattggcaccaagggcattaccaaacccaaggagatcaggaagttcaaaggtgaaggcatgccactataccaaagcaacaagaaaggtgacctgtatgtgacattcgaggtgttattcccaaaaaccctaaccgatgagcagaagggcaagcttaaggatgttctcgtgtagaccattgtttctcacatctatgctgctgataatttgaggcgagagcgcctcgaggaaatttttctcagtagcttgcataggaagaagctactgctgcgtttcatgtatgtgattttgcattgcaaatactagcagcctgcctggtcttctttttctttcccttttggttttgtcatgcgcccttaacagctcagtgtagttttagaaagcacaacaaaattgtaccagaatatttgtacttacggaattctgaatacatagattgtagaacagctcggttgcttgcatgttctatgcccaatggccgctgctaccggtgtagggatggcaacagggaattccccgccggggaatagctccccgtccccgcgacgaaaaaacttccccgcggggatccccacgaacgcttgcggggagcatttttttcccatccccgttccccgcggggataaatccccaacggggatccccatccccatttaaattacaattaatacatacatactttgctattaatgttaaatattgtcacttatacacattatcagatataagaaatcattatgcatacatcaaaatgaacacatttgtacaattagtggtctcttgataaggtaattatttatttttgtcg

SEQ ID NO: 62425 - DNA, 1942 bp, Zea Mays
ctccgctccacgtcccccgcgcgcttcgctcgcgaataggcagacacccgattccttccaggcagctttaaacgcaggaaccaaaaggccacggcgggagacggagaacggcgacgccggcggcgaggaggaggagggatacaacggcgagggagaagctgtctctctccacgcgtgggagcgctaaccctagctgccaacctcgcggaaacaccgggttgtgagcgtcgaagagagaggtgcaacgaggcttctcgaggaggctgggacgggatgacggcgctggggaagggaggggtggcgcggtttgcggccgcgctctttgtcctactgaatctctccgcggcgatcgccgggaagagctactacgacgtgctgcaagtgcccaagggcgcgtccgaggatcagattaagaggtcgtaccgcaagctcgcgctgaagtaccaccccgacaagaaccccgacaacgaggaggccaacaagcgcttcgccgagatcaataacgcttatgaggtgctgacggaccaggagaagaggaagatctatgaccagtatggcgaggagggcttgaagcagttccaaggcgggggaggcggtggcggtggaatgaacattcaggacatctttaggaacttttttggtggtggtggtggtgggatggaagaggaggaagaacaaattttgaaaggtgatgaggtgattgttgaactcgatgcttcattagaggacttgtacatgggcggttcagtaaaggtttggagagagaaaaacgtcataaagccagcaccaggaaagaggcgctgcaactgtaggaacgaagtttaccatcgacaaataggtcctggaatgtatcaacagatgactgagcaggtctgtgaccaatgtccaaatgtgaaattcgtacgagaaggtgaattcttgactgttgatattgagaagggaatgaaagatgcacaggaggttttgtttttcgaggaaggagagcctaagattgatggtgaacctggcgatttgaagttcaggatccgaacagcaccacacgaccgcttcaggcgagatggcaatgacctgcatgcaacagttacaataaccctgctgcaagctctggttggtttcgagaagaccattaaccatcttgataaccatctggtagaaattggcaccaaggagatcaggaagttcaaaggtgaaggcatgccactataccaaagcaacaagaaaggtgacctgtatgtgacattcgaggtgttattcccaaaaaccctaaccgatgagcagaagggcaagcttaaggatgttctcgtgtagaccattgtttctcacatctatgctgctgataatttgaggcgagagcgcctcgaggaaatttttctcagtagcttgcataggaagaagctactgctgcgtttcatgtatgtgattttgcattgcaaatactagcagcctgcctggtcttctttttctttcccttttggttttgtcatgcgcccttaacagctcagtgtagttttagaaagcacaacaaaattgtaccagaatatttgtacttacggaattctgaatacatagattgtagaacagctcggttgcttgcatgttctatgcccaatggccgctgctaccggtgtagggatggcaacagggaattccccgccggggaatagctccccgtccccgcgacgaaaaaacttccccgcggggatccccacgaacgcttgcggggagcatttttttcccatccccgttccccgcggggataaatccccaacggggatccccatccccatttaaattacaattaatacatacatactttgctattaatgttaaatattgtcacttatacacattatcagatataagaaatcattatgcatacatcaaaatgaacacatttgtacaattagtggtctcttgataaggtaattatttatttttgtcg

SEQ ID NO: 62426 - DNA, 1414 bp, Zea Mays
cagagagccggttaagaaacccagcagcaccaaccagcgacctgacgactttaaggctgcactgaagactatcggtgaggaagacaagtactttaccagagtctcattaaggatgctatcatatggtatgaaaagtagcacgtctcagaaagatctccaaaagcctaatgcttcagagcttccttcacaaggaaaagctgcatcagaattgacacttgatgggtgggatagtattgctctggaatattctattgactggcctctgcagctcttcttcactcctgatgttctgtccaagtatcgcaaggtttttcagtatctcatccgattgaagaggacacaaatggaacttgagaaatcctgggcagctgtaatgcataaagaccatgctgatttttctgattattgcaaggatcggaaaaataactctgcaacacaactgcgtcgacaacggtctaagcctttgtggcgagtaagggagcatatggcattcttgatcagaaacctacaattttacatccaggttgatgtaattgagtcacagtggaatgttttacaatctcacgtgcaagattcacatgattttacagagctagtgagctttcatcaagaatatttgtcagcgctggtttcccaatccttcttggacatcggatcagtctctaggatactggatagcataatgaagctttgcttgcagttctgctggagcatagagcaatatgaaactcggccaaatatttctgagattgatcacataactgaggagttcaacaagaagtccaattcgctgtacactatcttgaggagtagtcgcctcgcgggtagtcagagagcacctttcctgaggcaatttctgatgaggctaaattttaactctttctttgagaccaccgcaaggggagtgatgaattcaggaaggctgcgaccaatcactgcaggtgctcagctgtaacggtgatggtatgtttgggggtagtgctgcagcaagagacaagggaggagtttctgtagtttatgtaaattatgatcggatggtggttgtctgtcatggaaaaatcgattgcaggtgattcatgcttgtgccgttggtattgtgtttttctgtgcttccgtttgttaatgctatccagttcctgtggcctgaactgtaccttcgcaaattatacgctcgttcaccgtggggatctggctgacagatagtgaactgctgccactctttttttttttactaaggccgctgccacttctgagctgtgagatgccatgtctatcaataataacggtaaggagtattctaaaagattttgagctgtgggcagatgaatgtttaggacatatggattggaggggattgaagattaaatcctctcctatttaattttaactagtaaaggattttatccatttaaaa

SEQ ID NO: 62427 - DNA, 2619 bp, Zea Mays
cttctcttctcccactctcactatacccatttctcgagatctcggcgaaaccctagtgaaacccccgccgtgggggcaccaagacgccgcaatgctgcacgagctcctcctcgcgctgctcggcttcaccggcgacttcgtcctcgacgtctctctgccgcggcgccgcgccgcctcccaggacgccggcgaggatggaaacggagacggtgaggtgggcccctccttccgcctcgcgccggacctcaccttcctccagccatcagagaggactgctattgagaggctcatatctctgggattttactacagagaactgaatcgctttgcaaccgagtcccgcgacctgagctggattcagtcttctatagatgtttcatcacctcattctgataatacccagaaggggaaagtgagaaaagggagtgtgtacaggagggcaattgccaatggtatcactgagattctgtcagtatacagatcagctgttctgcaggttgagcaaaaccttttatcagatccgttgcctatcctcgcgacagtaactcacgggttgaacaagtttgaagtccttctgcctccactgtatgagcttgttatggaaatccagcataaagacatcaagggtggccagcttcttaatcttttgcacaaacggtgccattgtggggttccagaactgcaaagctgcattcagaggctactttggcatggacaccaggtcatgttcaaccagctgacatcttggatggtttatgggattcttcaagatcagtacagcgagtttttcattagaaggcaagatgacagggatgtggagaatgaatcatctcagcgtgatgtttctgataagttaaagcagaaattagctaaagacacatccctggctagttggcatacgggatttcatgtatcattggacatgttgcctgagtatatccacatgcgaattgcagagtccattctcttcgctggcaaagcaataagggtgcttcgaaatccaagtcctagtgctacattgcaggatcctgtaatcagaactgtaggatctcatggaatgcaaagctctgtaggaggttctggtgtaccaaaagaactggcaaacttctctaacatcagagcagaagaactactgccacaagcagaagctgataaaattgattctatgctcaaggagctaaagcattcttctgaatttcacaaacgaccttttgagtctgctgtcggctcaatacgtacaattgcagctaatcatctctggctgcactgaagactatcggtgaggaagacaagtactttaccagagtctcattaaggatgctatcatatggtatgaaaagtagcacgtctcagaaagatctccaaaagcctaatgcttcagagcttccttcacaaggaaaagctgcatcagaattgacacttgatgggtgggatagtattgctctggaatattctattgactggcctctgcagctcttcttcactcctgatgttctgtccaagtatcgcaaggtttttcagtatctcatccgattgaagaggacacaaatggaacttgagaaatcctgggcagctgtaatgcataaagaccatgctgatttttctgattattgcaaggatcggaaaaataactctgcaacacaactgcgtcgacaacggtctaagcctttgtggcgagtaagggagcatatggcattcttgatcagaaacctacaattttacatccaggttgatgtaattgagtcacagtggaatgttttacaatctcacgtgcaagattcacatgattttacagagctagtgagctttcatcaagaatatttgtcagcgctggtttcccaatccttcttggacatcggatcagtctctaggatactggatagcataatgaagctttgcttgcagttctgctggagcatagagcaatatgaaactcggccaaatatttctgagattgatcacataactgaggagttcaacaagaagtccaattcgctgtacactatcttgaggagtagtcgcctcgcgggtagtcagagagcacctttcctgaggcaatttctgatgaggctaaattttaactctttctttgagaccaccgcaaggggagtgatgaattcaggaaggctgcgaccaatcactgcaggtgctcagctgtaacggtgatggtatgtttgggggtagtgctgcagcaagagacaagggaggagtttctgtagtttatgtaaattatgatcggatggtggttgtctgtcatggaaaaatcgattgcaggtgattcatgcttgtgccgttggtattgtgtttttctgtgcttccgtttgttaatgctatccagttcctgtggcctgaactgtaccttcgcaaattatacgctcgttcaccgtggggatctggctgacagatagtgaactgctgccactctttttttttttactaaggccgctgccacttctgagctgtgagatgccatgtctatcaataataacggtaaggagtattctaaaagattttgagctgtgggcagatgaatgtttaggacatatggattggaggggattgaagattaaatcctctcctatttaattttaactagtaaaggattttatccatttaaaa

SEQ ID NO: 62428 - DNA, 2691 bp, Zea Mays
cttctcttctcccactctcactatacccatttctcgagatctcggcgaaaccctagtgaaacccccgccgtgggggcaccaagacgccgcaatgctgcacgagctcctcctcgcgctgctcggcttcaccggcgacttcgtcctcgacgtctctctgccgcggcgccgcgccgcctcccaggacgccggcgaggatggaaacggagacggtgaggtgggcccctccttccgcctcgcgccggacctcaccttcctccagccatcagagaggactgctattgagaggctcatatctctgggattttactacagagaactgaatcgctttgcaaccgagtcccgcgacctgagctggattcagtcttctatagatgtttcatcacctcattctgataatacccagaaggggaaagtgagaaaagggagtgtgtacaggagggcaattgccaatggtatcactgagattctgtcagtatacagatcagctgttctgcaggttgagcaaaaccttttatcagatccgttgcctatcctcgcgacagtaactcacgggttgaacaagtttgaagtccttctgcctccactgtatgagcttgttatggaaatccagcataaagacatcaagggtggccagcttcttaatcttttgcacaaacggtgccattgtggggttccagaactgcaaagctgcattcagaggcaagatgacagggatgtggagaatgaatcatctcagcgtgatgtttctgataagttaaagcagaaattagctaaagacacatccctggctagttggcatacgggatttcatgtatcattggacatgttgcctgagtatatccacatgcgaattgcagagtccattctcttcgctggcaaagcaataagggtgcttcgaaatccaagtcctagtgctacattgcaggatcctgtaatcagaactgtaggatctcatggaatgcaaagctctgtaggaggttctggtgtaccaaaagaactggcaaacttctctaacatcagagcagaagaactactgccacaagcagaagctgataaaattgattctatgctcaaggagctaaagcattcttctgaatttcacaaacgaccttttgagtctgctgtcggctcaatacgtacaattgcagctaatcatctctggcagtggtggtacgtgctgatctcaacggtcatttgaaggcattgaaagattattttcttttagcaaaaggtgactttttccagtgttttcttgaggaaagccgccaattaatgcggttaccacctcgtcaatctacagccgaagcagatctcatgattccatttcagctggctgcactgaagactatcggtgaggaagacaagtactttaccagagtctcattaaggatgctatcatatggtatgaaaagtagcacgtctcagaaagatctccaaaagcctaatgcttcagagcttccttcacaaggaaaagctgcatcagaattgacacttgatgggtgggatagtattgctctggaatattctattgactggcctctgcagctcttcttcactcctgatgttctgtccaagtatcgcaaggtttttcagtatctcatccgattgaagaggacacaaatggaacttgagaaatcctgggcagctgtaatgcataaagaccatgctgatttttctgattattgcaaggatcggaaaaataactctgcaacacaactgcgtcgacaacggtctaagcctttgtggcgagtaagggagcatatggcattcttgatcagaaacctacaattttacatccaggttgatgtaattgagtcacagtggaatgttttacaatctcacgtgcaagattcacatgattttacagagctagtgagctttcatcaagaatatttgtcagcgctggtttcccaatccttcttggacatcggatcagtctctaggatactggatagcataatgaagctttgcttgcagttctgctggagcatagagcaatatgaaactcggccaaatatttctgagattgatcacataactgaggagttcaacaagaagtccaattcgctgtacactatcttgaggagtagtcgcctcgcgggtagtcagagagcacctttcctgaggcaatttctgatgaggctaaattttaactctttctttgagaccaccgcaaggggagtgatgaattcaggaaggctgcgaccaatcactgcaggtgctcagctgtaacggtgatggtatgtttgggggtagtgctgcagcaagagacaagggaggagtttctgtagtttatgtaaattatgatcggatggtggttgtctgtcatggaaaaatcgattgcaggtgattcatgcttgtgccgttggtattgtgtttttctgtgcttccgtttgttaatgctatccagttcctgtggcctgaactgtaccttcgcaaattatacgctcgttcaccgtggggatctggctgacagatagtgaactgctgccactctttttttttttactaaggccgctgccacttctgagctgtgagatgccatgtctatcaataataacggtaaggagtattctaaaagattttgagctgtgggcagatgaatgtttaggacatatggattggaggggattgaagattaaatcctctcctatttaattttaactagtaaaggattttatccatttaaaa

SEQ ID NO: 62429 - DNA, 2799 bp, Zea Mays
cttctcttctcccactctcactatacccatttctcgagatctcggcgaaaccctagtgaaacccccgccgtgggggcaccaagacgccgcaatgctgcacgagctcctcctcgcgctgctcggcttcaccggcgacttcgtcctcgacgtctctctgccgcggcgccgcgccgcctcccaggacgccggcgaggatggaaacggagacggtgaggtgggcccctccttccgcctcgcgccggacctcaccttcctccagccatcagagaggactgctattgagaggctcatatctctgggattttactacagagaactgaatcgctttgcaaccgagtcccgcgacctgagctggattcagtcttctatagatgtttcatcacctcattctgataatacccagaaggggaaagtgagaaaagggagtgtgtacaggagggcaattgccaatggtatcactgagattctgtcagtatacagatcagctgttctgcaggttgagcaaaaccttttatcagatccgttgcctatcctcgcgacagtaactcacgggttgaacaagtttgaagtccttctgcctccactgtatgagcttgttatggaaatccagcataaagacatcaagggtggccagcttcttaatcttttgcacaaacggtgccattgtggggttccagaactgcaaagctgcattcagaggataggctactttggcatggacaccaggtcatgttcaaccagctgacatcttggatggtttatgggattcttcaagatcagtacagcgagtttttcattagaaggcaagatgacagggatgtggagaatgaatcatctcagcgtgatgtttctgataagttaaagcagaaattagctaaagacacatccctggctagttggcatacgggatttcatgtatcattggacatgttgcctgagtatatccacatgcgaattgcagagtccattctcttcgctggcaaagcaataagggtgcttcgaaatccaagtcctagtgctacattgcaggatcctgtaatcagaactgtaggatctcatggaatgcaaagctctgtaggaggttctggtgtaccaaaagaactggcaaacttctctaacatcagagcagaagaactactgccacaagcagaagctgataaaattgattctatgctcaaggagctaaagcattcttctgaatttcacaaacgaccttttgagtctgctgtcggctcaatacgtacaattgcagctaatcatctctggcagctagtggtggtacgtgctgatctcaacggtcatttgaaggcattgaaagattattttcttttagcaaaaggtgactttttccagtgttttcttgaggaaagccgccaattaatgcggttaccacctcgtcaatctacagccgaagcagatctcatgattccatttcagctggctgcactgaagactatcggtgaggaagacaagtactttaccagagtctcattaaggatgctatcatatggtatgaaaagtagcacgtctcagaaagatctccaaaagcctaatgcttcagagcttccttcacaaggaaaagctgcatcagaattgacacttgatgggtgggatagtattgctctggaatattctattgactggcctctgcagctcttcttcactcctgatgttctgtccaagtatcgcaaggtttttcagtatctcatccgattgaagaggacacaaatggaacttgagaaatcctgggcagctgtaatgcataaagaccatgctgatttttctgattattgcaaggatcggaaaaataactctgcaacacaactgcgtcgacaacggtctaagcctttgtggcgagtaagggagcatatggcattcttgatcagaaacctacaattttacatccaggttgatgtaattgagtcacagtggaatgttttacaatctcacgtgcaagattcacatgattttacagagctagtgagctttcatcaagaatatttgtcagcgctggtttcccaatccttcttggacatcggatcagtctctaggatactggatagcataatgaagctttgcttgcagttctgctggagcatagagcaatatgaaactcggccaaatatttctgagattgatcacataactgaggagttcaacaagaagtccaattcgctgtacactatcttgaggagtagtcgcctcgcgggtagtcagagagcacctttcctgaggcaatttctgatgaggctaaattttaactctttctttgagaccaccgcaaggggagtgatgaattcaggaaggctgcgaccaatcactgcaggtgctcagctgtaacggtgatggtatgtttgggggtagtgctgcagcaagagacaagggaggagtttctgtagtttatgtaaattatgatcggatggtggttgtctgtcatggaaaaatcgattgcaggtgattcatgcttgtgccgttggtattgtgtttttctgtgcttccgtttgttaatgctatccagttcctgtggcctgaactgtaccttcgcaaattatacgctcgttcaccgtggggatctggctgacagatagtgaactgctgccactctttttttttttactaaggccgctgccacttctgagctgtgagatgccatgtctatcaataataacggtaaggagtattctaaaagattttgagctgtgggcagatgaatgtttaggacatatggattggaggggattgaagattaaatcctctcctatttaattttaactagtaaaggattttatccatttaaaa

SEQ ID NO: 62430 - DNA, 2752 bp, Zea Mays
cttctcttctcccactctcactatacccatttctcgagatctcggcgaaaccctagtgaaacccccgccgtgggggcaccaagacgccgcaatgctgcacgagctcctcctcgcgctgctcggcttcaccggcgacttcgtcctcgacgtctctctgccgcggcgccgcgccgcctcccaggacgccggcgaggatggaaacggagacggtgaggtgggcccctccttccgcctcgcgccggacctcaccttcctccagccatcagagagagaactgaatcgctttgcaaccgagtcccgcgacctgagctggattcagtcttctatagatgtttcatcacctcattctgataatacccagaaggggaaagtgagaaaagggagtgtgtacaggagggcaattgccaatggtatcactgagattctgtcagtatacagatcagctgttctgcaggttgagcaaaaccttttatcagatccgttgcctatcctcgcgacagtaactcacgggttgaacaagtttgaagtccttctgcctccactgtatgagcttgttatggaaatccagcataaagacatcaagggtggccagcttcttaatcttttgcacaaacggtgccattgtggggttccagaactgcaaagctgcattcagaggctactttggcatggacaccaggtcatgttcaaccagctgacatcttggatggtttatgggattcttcaagatcagtacagcgagtttttcattagaaggcaagatgacagggatgtggagaatgaatcatctcagcgtgatgtttctgataagttaaagcagaaattagctaaagacacatccctggctagttggcatacgggatttcatgtatcattggacatgttgcctgagtatatccacatgcgaattgcagagtccattctcttcgctggcaaagcaataagggtgcttcgaaatccaagtcctagtgctacattgcaggatcctgtaatcagaactgtaggatctcatggaatgcaaagctctgtaggaggttctggtgtaccaaaagaactggcaaacttctctaacatcagagcagaagaactactgccacaagcagaagctgataaaattgattctatgctcaaggagctaaagcattcttctgaatttcacaaacgaccttttgagtctgctgtcggctcaatacgtacaattgcagctaatcatctctggcagctagtggtggtacgtgctgatctcaacggtcatttgaaggcattgaaagattattttcttttagcaaaaggtgactttttccagtgttttcttgaggaaagccgccaattaatgcggttaccacctcgtcaatctacagccgaagcagatctcatgattccatttcagctggctgcactgaagactatcggtgaggaagacaagtactttaccagagtctcattaaggatgctatcatatggtatgaaaagtagcacgtctcagaaagatctccaaaagcctaatgcttcagagcttccttcacaaggaaaagctgcatcagaattgacacttgatgggtgggatagtattgctctggaatattctattgactggcctctgcagctcttcttcactcctgatgttctgtccaagtatcgcaaggtttttcagtatctcatccgattgaagaggacacaaatggaacttgagaaatcctgggcagctgtaatgcataaagaccatgctgatttttctgattattgcaaggatcggaaaaataactctgcaacacaactgcgtcgacaacggtctaagcctttgtggcgagtaagggagcatatggcattcttgatcagaaacctacaattttacatccaggttgatgtaattgagtcacagtggaatgttttacaatctcacgtgcaagattcacatgattttacagagctagtgagctttcatcaagaatatttgtcagcgctggtttcccaatccttcttggacatcggatcagtctctaggatactggatagcataatgaagctttgcttgcagttctgctggagcatagagcaatatgaaactcggccaaatatttctgagattgatcacataactgaggagttcaacaagaagtccaattcgctgtacactatcttgaggagtagtcgcctcgcgggtagtcagagagcacctttcctgaggcaatttctgatgaggctaaattttaactctttctttgagaccaccgcaaggggagtgatgaattcaggaaggctgcgaccaatcactgcaggtgctcagctgtaacggtgatggtatgtttgggggtagtgctgcagcaagagacaagggaggagtttctgtagtttatgtaaattatgatcggatggtggttgtctgtcatggaaaaatcgattgcaggtgattcatgcttgtgccgttggtattgtgtttttctgtgcttccgtttgttaatgctatccagttcctgtggcctgaactgtaccttcgcaaattatacgctcgttcaccgtggggatctggctgacagatagtgaactgctgccactctttttttttttactaaggccgctgccacttctgagctgtgagatgccatgtctatcaataataacggtaaggagtattctaaaagattttgagctgtgggcagatgaatgtttaggacatatggattggaggggattgaagattaaatcctctcctatttaattttaactagtaaaggattttatccatttaaaa

SEQ ID NO: 62431 - DNA, 2777 bp, Zea Mays
cttctcttctcccactctcactatacccatttctcgagatctcggcgaaaccctagtgaaacccccgccgtgggggcaccaagacgccgcaatgctgcacgagctcctcctcgcgctgctcggcttcaccggcgacttcgtcctcgacgtctctctgccgcggcgccgcgccgcctcccaggacgccggcgaggatggaaacggagacggtgaggtgggcccctccttccgcctcgcgccggacctcaccttcctccagccatcagagaggactgctattgagaggctcatatctctgggattttactacagagaactgaatcgctttgcaaccgagtcccgcgacctgagctggattcagtcttctatagatgtttcatcacctcattctgataatacccagaaggggaaagtgagaaaagggagtgtgtacaggagggcaattgccaatggtatcactgagattctgtcagtatacagatcagctgttctgcaggttgagcaaaaccttttatcagatccgttgcctatcctcgcgacagtaactcacgggttgaacaagtttgaagtccttctgcctccactgtatgagcttgttatggaaatccagcataaagacatcaagggtggccagcttcttaatcttttgcacaaacggtgccattgtggggttccagaactgcaaagctgcattcagaggctactttggcatggacaccaggtcatgttcaaccagctgacatcttggatggtttatgggattcttcaagatcagtacagcgagtttttcattagaaggcaagatgacagggatgtggagaatgaatcatctcagcgtgatgtttctgataagttaaagcagaaattagctaaagacacatccctggctagttggcatacgggatttcatgtatcattggacatgttgcctgagtatatccacatgcgaattgcagagtccattctcttcgctggcaaagcaataagggtgcttcgaaatccaagtcctagtgctacattgcaggatcctgtaatcagaactgtaggatctcatggaatgcaaagctctgtaggaggttctggtgtaccaaaagaactggcaaacttctctaacatcagagcagaagaactactgccacaagcagaagctgataaaattgattctatgctcaaggagctaaagcattcttctgaatttcacaaacgaccttttgagtctgctgtcggctcaatacgtacaattgcagctaatcatctctggcagctagtggtggtacgtgctgatctcaacggtcatttgaaggcattgaaagattattttcttttagcaaaaggtgactttttccagccgccaattaatgcggttaccacctcgtcaatctacagccgaagcagatctcatgattccatttcagctggctgcactgaagactatcggtgaggaagacaagtactttaccagagtctcattaaggatgctatcatatggtatgaaaagtagcacgtctcagaaagatctccaaaagcctaatgcttcagagcttccttcacaaggaaaagctgcatcagaattgacacttgatgggtgggatagtattgctctggaatattctattgactggcctctgcagctcttcttcactcctgatgttctgtccaagtatcgcaaggtttttcagtatctcatccgattgaagaggacacaaatggaacttgagaaatcctgggcagctgtaatgcataaagaccatgctgatttttctgattattgcaaggatcggaaaaataactctgcaacacaactgcgtcgacaacggtctaagcctttgtggcgagtaagggagcatatggcattcttgatcagaaacctacaattttacatccaggttgatgtaattgagtcacagtggaatgttttacaatctcacgtgcaagattcacatgattttacagagctagtgagctttcatcaagaatatttgtcagcgctggtttcccaatccttcttggacatcggatcagtctctaggatactggatagcataatgaagctttgcttgcagttctgctggagcatagagcaatatgaaactcggccaaatatttctgagattgatcacataactgaggagttcaacaagaagtccaattcgctgtacactatcttgaggagtagtcgcctcgcgggtagtcagagagcacctttcctgaggcaatttctgatgaggctaaattttaactctttctttgagaccaccgcaaggggagtgatgaattcaggaaggctgcgaccaatcactgcaggtgctcagctgtaacggtgatggtatgtttgggggtagtgctgcagcaagagacaagggaggagtttctgtagtttatgtaaattatgatcggatggtggttgtctgtcatggaaaaatcgattgcaggtgattcatgcttgtgccgttggtattgtgtttttctgtgcttccgtttgttaatgctatccagttcctgtggcctgaactgtaccttcgcaaattatacgctcgttcaccgtggggatctggctgacagatagtgaactgctgccactctttttttttttactaaggccgctgccacttctgagctgtgagatgccatgtctatcaataataacggtaaggagtattctaaaagattttgagctgtgggcagatgaatgtttaggacatatggattggaggggattgaagattaaatcctctcctatttaattttaactagtaaaggattttatccatttaaaa

SEQ ID NO: 62432 - DNA, 2741 bp, Zea Mays
ccttctcttctcccactctcactatacccatttctcgagatctcggcgaaaccctagtgaaacccccgccgtgggggcaccaagacgccgcaatgctgcacgagctcctcctcgcgctgctcggcttcaccggcgacttcgtcctcgacgtctctctgccgcggcgccgcgccgcctcccaggacgccggcgaggatggaaacggagacggtgaggtgggcccctccttccgcctcgcgccggacctcaccttcctccagccatcagagaggactgctattgagaggctcatatctctgggattttactacagagaactgaatcgctttgcaaccgagtcccgcgacctgagctggattcagtcttctatagatgtttcatcacctcattctgataatacccagaaggggaaagtgagaaaagggagtgtgtacaggagggcaattgccaatggtatcactgagattctgtcagtatacagatcagctgttctgcaggttgagcaaaaccttttatcagatccgttgcctatcctcgcgacagtaactcacgggttgaacaagtttgaagtccttctgcctccactgtatgagcttgttatggaaatccagcataaagacatcaagggtggccagcttcttaatcttttgcacaaacggtgccattgtggggttccagaactgcaaagctgcattcagaggctactttggcatggacaccaggtcatgttcaaccagctgacatcttggatggtttatgggattcttcaagatcagtacagcgagtttttcattagaaggcaagatgacagggatgtggagaatgaatcatctcagcgtgatgtttctgataagttaaagcagaaattagctaaagacacatccctggctagttggcatacgggatttcatgtatcattgagtccattctcttcgctggcaaagcaataagggtgcttcgaaatccaagtcctagtgctacattgcaggatcctgtaatcagaactgtaggatctcatggaatgcaaagctctgtaggaggttctggtgtaccaaaagaactggcaaacttctctaacatcagagcagaagaactactgccacaagcagaagctgataaaattgattctatgctcaaggagctaaagcattcttctgaatttcacaaacgaccttttgagtctgctgtcggctcaatacgtacaattgcagctaatcatctctggcagctagtggtggtacgtgctgatctcaacggtcatttgaaggcattgaaagattattttcttttagcaaaaggtgactttttccagccgccaattaatgcggttaccacctcgtcaatctacagccgaagcagatctcatgattccatttcagctggctgcactgaagactatcggtgaggaagacaagtactttaccagagtctcattaaggatgctatcatatggtatgaaaagtagcacgtctcagaaagatctccaaaagcctaatgcttcagagcttccttcacaaggaaaagctgcatcagaattgacacttgatgggtgggatagtattgctctggaatattctattgactggcctctgcagctcttcttcactcctgatgttctgtccaagtatcgcaaggtttttcagtatctcatccgattgaagaggacacaaatggaacttgagaaatcctgggcagctgtaatgcataaagaccatgctgatttttctgattattgcaaggatcggaaaaataactctgcaacacaactgcgtcgacaacggtctaagcctttgtggcgagtaagggagcatatggcattcttgatcagaaacctacaattttacatccaggttgatgtaattgagtcacagtggaatgttttacaatctcacgtgcaagattcacatgattttacagagctagtgagctttcatcaagaatatttgtcagcgctggtttcccaatccttcttggacatcggatcagtctctaggatactggatagcataatgaagctttgcttgcagttctgctggagcatagagcaatatgaaactcggccaaatatttctgagattgatcacataactgaggagttcaacaagaagtccaattcgctgtacactatcttgaggagtagtcgcctcgcgggtagtcagagagcacctttcctgaggcaatttctgatgaggctaaattttaactctttctttgagaccaccgcaaggggagtgatgaattcaggaaggctgcgaccaatcactgcaggtgctcagctgtaacggtgatggtatgtttgggggtagtgctgcagcaagagacaagggaggagtttctgtagtttatgtaaattatgatcggatggtggttgtctgtcatggaaaaatcgattgcaggtgattcatgcttgtgccgttggtattgtgtttttctgtgcttccgtttgttaatgctatccagttcctgtggcctgaactgtaccttcgcaaattatacgctcgttcaccgtggggatctggctgacagatagtgaactgctgccactctttttttttttactaaggccgctgccacttctgagctgtgagatgccatgtctatcaataataacggtaaggagtattctaaaagattttgagctgtgggcagatgaatgtttaggacatatggattggaggggattgaagattaaatcctctcctatttaattttaactagtaaaggattttatccatttaaaa

SEQ ID NO: 62433 - DNA, 3152 bp, Zea Mays
cgcccttttccttctcttctcccactctcactatacccatttctcgagatctcggcgaaaccctagtgaaacccccgccgtgggggcaccaagacgccgcaatgctgcacgagctcctcctcgcgctgctcggcttcaccggcgacttcgtcctcgacgtctctctgccgcggcgccgcgccgcctcccaggacgccggcgaggatggaaacggagacggtgaggtgggcccctccttccgcctcgcgccggacctcaccttcctccagccatcagagaggactgctattgagaggctcatatctctgggattttactacagagaactgaatcgctttgcaaccgagtcccgcgacctgagctggattcagtcttctatagatgtttcatcacctcattctgataatacccagaaggggaaagtgagaaaagggagtgtgtacaggagggcaattgccaatggtatcactgagattctgtcagtatacagatcagctgttctgcaggttgagcaaaaccttttatcagatccgttgcctatcctcgcgacagtaactcacgggttgaacaagtttgaagtccttctgcctccactgtatgagcttgttatggaaatccagcataaagacatcaagggtggccagcttcttaatcttttgcacaaacggtgccattgtggggttccagaactgcaaagctgcattcagaggctactttggcatggacaccaggtcatgttcaaccagctgacatcttggatggtttatgggattcttcaagatcagtacagcgagtttttcattagaaggtcaacgtgcctacagggctcctcatgctattttgttcctgtttttgatgtctcatttttgtcagctgtaatctggtagacctaattgctccaaattgagctccccaagttcacattagttgcaataatgatagattcccgcacattgcaagtatctgtagtgtttttaatacatatcatttgcagtctaatgttgttgatgagggatacgacaaaatgggttgtaaatataaaatttacaattggagtggaatctgatacctatcggatgacaagtagtcctaaatgttgagtgttaacccatgttattttcctaatatataaagcttgagtttctcatcttcattttcaggcaagatgacagggatgtggagaatgaatcatctcagcgtgatgtttctgataagttaaagcagaaattagctaaagacacatccctggctagttggcatacgggatttcatgtatcattggacatgttgcctgagtatatccacatgcgaattgcagagtccattctcttcgctggcaaagcaataagggtgcttcgaaatccaagtcctagtgctacattgcaggatcctgtaatcagaactgtaggatctcatggaatgcaaagctctgtaggaggttctggtgtaccaaaagaactggcaaacttctctaacatcagagcagaagaactactgccacaagcagaagctgataaaattgattctatgctcaaggagctaaagcattcttctgaatttcacaaacgaccttttgagtctgctgtcggctcaatacgtacaattgcagctaatcatctctggcagtggtggtacgtgctgatctcaacggtcatttgaaggcattgaaagattattttcttttagcaaaaggtgactttttccagtgttttcttgaggaaagccgccaattaatgcggttaccacctcgtcaatctacagccgaagcagatctcatgattccatttcagctggctgcactgaagactatcggtgaggaagacaagtactttaccagagtctcattaaggatgctatcatatggtatgaaaagtagcacgtctcagaaagatctccaaaagcctaatgcttcagagcttccttcacaaggaaaagctgcatcagaattgacacttgatgggtgggatagtattgctctggaatattctattgactggcctctgcagctcttcttcactcctgatgttctgtccaagtatcgcaaggtttttcagtatctcatccgattgaagaggacacaaatggaacttgagaaatcctgggcagctgtaatgcataaagaccatgctgatttttctgattattgcaaggatcggaaaaataactctgcaacacaactgcgtcgacaacggtctaagcctttgtggcgagtaagggagcatatggcattcttgatcagaaacctacaattttacatccaggttgatgtaattgagtcacagtggaatgttttacaatctcacgtgcaagattcacatgattttacagagctagtgagctttcatcaagaatatttgtcagcgctggtttcccaatccttcttggacatcggatcagtctctaggatactggatagcataatgaagctttgcttgcagttctgctggagcatagagcaatatgaaactcggccaaatatttctgagattgatcacataactgaggagttcaacaagaagtccaattcgctgtacactatcttgaggagtagtcgcctcgcgggtagtcagagagcacctttcctgaggcaatttctgatgaggctaaattttaactctttctttgagaccaccgcaaggggagtgatgaattcaggaaggctgcgaccaatcactgcaggtgctcagctgtaacggtgatggtatgtttgggggtagtgctgcagcaagagacaagggaggagtttctgtagtttatgtaaattatgatcggatggtggttgtctgtcatggaaaaatcgattgcaggtgattcatgcttgtgccgttggtattgtgtttttctgtgcttccgtttgttaatgctatccagttcctgtggcctgaactgtaccttcgcaaattatacgctcgttcaccgtggggatctggctgacagatagtgaactgctgccactctttttttttttactaaggccgctgccacttctgagctgtgagatgccatgtctatcaataataacggtaaggagtattctaaaagattttgagctgtgggcagatgaatgtttaggacatatggattggaggggattgaagattaaatcctctcctatttaattttaactagtaaaggattttatccatttaaaa

SEQ ID NO: 62434 - DNA, 2767 bp, Zea Mays
cgcccttttccttctcttctcccactctcactatacccatttctcgagatctcggcgaaaccctagtgaaacccccgccgtgggggcaccaagacgccgcaatgctgcacgagctcctcctcgcgctgctcggcttcaccggcgacttcgtcctcgacgtctctctgccgcggcgccgcgccgcctcccaggacgccggcgaggatggaaacggagacggtgaggtgggcccctccttccgcctcgcgccggacctcaccttcctccagccatcagagaggactgctattgagaggctcatatctctgggattttactacagagaactgaatcgctttgcaaccgagtcccgcgacctgagctggattcagtcttctatagatgtttcatcacctcattctgataatacccagaaggggaaagtgagaaaagggagtgtgtacaggagggcaattgccaatggtatcactgagattctgtcagtatacagatcagctgttctgcaggttgagcaaaaccttttatcagatccgttgcctatcctcgcgacagtaactcacgggttgaacaagtttgaagtccttctgcctccactgtatgagcttgttatggaaatccagcataaagacatcaagggtggccagcttcttaatcttttgcacaaacggtgccattgtggggttccagaactgcaaagctgcattcagaggctactttggcatggacaccaggtcatgttcaaccagctgacatcttggatggtttatgggattcttcaagatcagtacagcgagtttttcattagaaggcaagatgacagggatgtggagaatgaatcatctcagcgtgatgtttctgataagttaaagcagaaattagctaaagacacatccctggctagttggcatacgggatttcatgtatcattgagtccattctcttcgctggcaaagcaataagggtgcttcgaaatccaagtcctagtgctacattgcaggatcctgtaatcagaactgtaggatctcatggaatgcaaagctctgtaggaggttctggtgtaccaaaagaactggcaaacttctctaacatcagagcagaagaactactgccacaagcagaagctgataaaattgattctatgctcaaggagctaaagcattcttctgaatttcacaaacgaccttttgagtctgctgtcggctcaatacgtacaattgcagctaatcatctctggcagctagtggtggtacgtgctgatctcaacggtcatttgaaggcattgaaagattattttcttttagcaaaaggtgactttttccagtgttttcttgaggaaagccgccaattaatgcggttaccacctcgtcaatctacagccgaagcagatctcatgattccatttcagctggctgcactgaagactatcggtgaggaagacaagtactttaccagagtctcattaaggatgctatcatatggtatgaaaagtagcacgtctcagaaagatctccaaaagcctaatgcttcagagcttccttcacaaggaaaagctgcatcagaattgacacttgatgggtgggatagtattgctctggaatattctattgactggcctctgcagctcttcttcactcctgatgttctgtccaagtatcgcaaggtttttcagtatctcatccgattgaagaggacacaaatggaacttgagaaatcctgggcagctgtaatgcataaagaccatgctgatttttctgattattgcaaggatcggaaaaataactctgcaacacaactgcgtcgacaacggtctaagcctttgtggcgagtaagggagcatatggcattcttgatcagaaacctacaattttacatccaggttgatgtaattgagtcacagtggaatgttttacaatctcacgtgcaagattcacatgattttacagagctagtgagctttcatcaagaatatttgtcagcgctggtttcccaatccttcttggacatcggatcagtctctaggatactggatagcataatgaagctttgcttgcagttctgctggagcatagagcaatatgaaactcggccaaatatttctgagattgatcacataactgaggagttcaacaagaagtccaattcgctgtacactatcttgaggagtagtcgcctcgcgggtagtcagagagcacctttcctgaggcaatttctgatgaggctaaattttaactctttctttgagaccaccgcaaggggagtgatgaattcaggaaggctgcgaccaatcactgcaggtgctcagctgtaacggtgatggtatgtttgggggtagtgctgcagcaagagacaagggaggagtttctgtagtttatgtaaattatgatcggatggtggttgtctgtcatggaaaaatcgattgcaggtgattcatgcttgtgccgttggtattgtgtttttctgtgcttccgtttgttaatgctatccagttcctgtggcctgaactgtaccttcgcaaattatacgctcgttcaccgtggggatctggctgacagatagtgaactgctgccactctttttttttttactaaggccgctgccacttctgagctgtgagatgccatgtctatcaataataacggtaaggagtattctaaaagattttgagctgtgggcagatgaatgtttaggacatatggattggaggggattgaagattaaatcctctcctatttaattttaactagtaaaggattttatccatttaaaa

SEQ ID NO: 62435 - DNA, 2818 bp, Zea Mays
gtccccgcccttttccttctcttctcccactctcactatacccatttctcgagatctcggcgaaaccctagtgaaacccccgccgtgggggcaccaagacgccgcaatgctgcacgagctcctcctcgcgctgctcggcttcaccggcgacttcgtcctcgacgtctctctgccgcggcgccgcgccgcctcccaggacgccggcgaggatggaaacggagacggtgaggtgggcccctccttccgcctcgcgccggacctcaccttcctccagccatcagagaggactgctattgagaggctcatatctctgggattttactacagagaactgaatcgctttgcaaccgagtcccgcgacctgagctggattcagtcttctatagatgtttcatcacctcattctgataatacccagaaggggaaagtgagaaaagggagtgtgtacaggagggcaattgccaatggtatcactgagattctgtcagtatacagatcagctgttctgcaggttgagcaaaaccttttatcagatccgttgcctatcctcgcgacagtaactcacgggttgaacaagtttgaagtccttctgcctccactgtatgagcttgttatggaaatccagcataaagacatcaagggtggccagcttcttaatcttttgcacaaacggtgccattgtggggttccagaactgcaaagctgcattcagaggctactttggcatggacaccaggtcatgttcaaccagctgacatcttggatggtttatgggattcttcaagatcagtacagcgagtttttcattagaaggcaagatgacagggatgtggagaatgaatcatctcagcgtgatgtttctgataagttaaagcagaaattagctaaagacacatccctggctagttggcatacgggatttcatgtatcattgagtccattctcttcgctggcaaagcaataagggtgcttcgaaatccaagtcctagtgctacattgcaggatcctgtaatcagaactgtaggatctcatggaatgcaaagctctgtaggaggttctggtgtaccaaaagaactggcaaacttctctaacatcagagcagaagaactactgccacaagcagaagctgataaaattgattctatgctcaaggagctaaagcattcttctgaatttcacaaacgaccttttgagtctgctgtcggctcaatacgtacaattgcagctaatcatctctggcagctagtggtggtacgtgctgatctcaacggtcatttgaaggcattgaaagattattttcttttagcaaaaggtgactttttccagtgttttcttgaggaaagccgccaattaatgcggttaccacctcgtcaatctacagccgaagcagatctcatgattccatttcagctggagatctgcatatcatttcattaaaagtaggagggaaaaaactaaggctgcactgaagactatcggtgaggaagacaagtactttaccagagtctcattaaggatgctatcatatggtatgaaaagtagcacgtctcagaaagatctccaaaagcctaatgcttcagagcttccttcacaaggaaaagctgcatcagaattgacacttgatgggtgggatagtattgctctggaatattctattgactggcctctgcagctcttcttcactcctgatgttctgtccaagtatcgcaaggtttttcagtatctcatccgattgaagaggacacaaatggaacttgagaaatcctgggcagctgtaatgcataaagaccatgctgatttttctgattattgcaaggatcggaaaaataactctgcaacacaactgcgtcgacaacggtctaagcctttgtggcgagtaagggagcatatggcattcttgatcagaaacctacaattttacatccaggttgatgtaattgagtcacagtggaatgttttacaatctcacgtgcaagattcacatgattttacagagctagtgagctttcatcaagaatatttgtcagcgctggtttcccaatccttcttggacatcggatcagtctctaggatactggatagcataatgaagctttgcttgcagttctgctggagcatagagcaatatgaaactcggccaaatatttctgagattgatcacataactgaggagttcaacaagaagtccaattcgctgtacactatcttgaggagtagtcgcctcgcgggtagtcagagagcacctttcctgaggcaatttctgatgaggctaaattttaactctttctttgagaccaccgcaaggggagtgatgaattcaggaaggctgcgaccaatcactgcaggtgctcagctgtaacggtgatggtatgtttgggggtagtgctgcagcaagagacaagggaggagtttctgtagtttatgtaaattatgatcggatggtggttgtctgtcatggaaaaatcgattgcaggtgattcatgcttgtgccgttggtattgtgtttttctgtgcttccgtttgttaatgctatccagttcctgtggcctgaactgtaccttcgcaaattatacgctcgttcaccgtggggatctggctgacagatagtgaactgctgccactctttttttttttactaaggccgctgccacttctgagctgtgagatgccatgtctatcaataataacggtaaggagtattctaaaagattttgagctgtgggcagatgaatgtttaggacatatggattggaggggattgaagattaaatcctctcctatttaattttaactagtaaaggattttatccatttaaaa

SEQ ID NO: 62436 - DNA, 2773 bp, Zea Mays
cccgtccccgcccttttccttctcttctcccactctcactatacccatttctcgagatctcggcgaaaccctagtgaaacccccgccgtgggggcaccaagacgccgcaatgctgcacgagctcctcctcgcgctgctcggcttcaccggcgacttcgtcctcgacgtctctctgccgcggcgccgcgccgcctcccaggacgccggcgaggatggaaacggagacggtgaggtgggcccctccttccgcctcgcgccggacctcaccttcctccagccatcagagaggactgctattgagaggctcatatctctgggattttactacagagaactgaatcgctttgcaaccgagtcccgcgacctgagctggattcagtcttctatagatgtttcatcacctcattctgataatacccagaaggggaaagtgagaaaagggagtgtgtacaggagggcaattgccaatggtatcactgagattctgtcagtatacagatcagctgttctgcaggttgagcaaaaccttttatcagatccgttgcctatcctcgcgacagtaactcacgggttgaacaagtttgaagtccttctgcctccactgtatgagcttgttatggaaatccagcataaagacatcaagggtggccagcttcttaatcttttgcacaaacggtgccattgtggggttccagaactgcaaagctgcattcagaggctactttggcatggacaccaggtcatgttcaaccagctgacatcttggatggtttatgggattcttcaagatcagtacagcgagtttttcattagaaggcaagatgacagggatgtggagaatgaatcatctcagcgtgatgtttctgataagttaaagcagaaattagctaaagacacatccctggctagttggcatacgggatttcatgtatcattggacatgttgcctgagtatatccacatgcgaattgcagagtccattctcttcgctggcaaagcaataagggtgcttcgaaatccaagtcctagtgctacattgcaggatcctgtaatcagaactgtaggatctcatggaatgcaaagctctgtaggaggttctggtgtaccaaaagaactggcaaacttctctaacatcagagcagaagaactactgccacaagcagaagctgataaaattgattctatgctcaaggagctaaagcattcttctgaatttcacaaacgaccttttgagtctgctgtcggctcaatacgtacaattgcagctaatcatctctggcaggcattgaaagattattttcttttagcaaaaggtgactttttccagtgttttcttgaggaaagccgccaattaatgcggttaccacctcgtcaatctacagccgaagcagatctcatgattccatttcagctggctgcactgaagactatcggtgaggaagacaagtactttaccagagtctcattaaggatgctatcatatggtatgaaaagtagcacgtctcagaaagatctccaaaagcctaatgcttcagagcttccttcacaaggaaaagctgcatcagaattgacacttgatgggtgggatagtattgctctggaatattctattgactggcctctgcagctcttcttcactcctgatgttctgtccaagtatcgcaaggtttttcagtatctcatccgattgaagaggacacaaatggaacttgagaaatcctgggcagctgtaatgcataaagaccatgctgatttttctgattattgcaaggatcggaaaaataactctgcaacacaactgcgtcgacaacggtctaagcctttgtggcgagtaagggagcatatggcattcttgatcagaaacctacaattttacatccaggttgatgtaattgagtcacagtggaatgttttacaatctcacgtgcaagattcacatgattttacagagctagtgagctttcatcaagaatatttgtcagcgctggtttcccaatccttcttggacatcggatcagtctctaggatactggatagcataatgaagctttgcttgcagttctgctggagcatagagcaatatgaaactcggccaaatatttctgagattgatcacataactgaggagttcaacaagaagtccaattcgctgtacactatcttgaggagtagtcgcctcgcgggtagtcagagagcacctttcctgaggcaatttctgatgaggctaaattttaactctttctttgagaccaccgcaaggggagtgatgaattcaggaaggctgcgaccaatcactgcaggtgctcagctgtaacggtgatggtatgtttgggggtagtgctgcagcaagagacaagggaggagtttctgtagtttatgtaaattatgatcggatggtggttgtctgtcatggaaaaatcgattgcaggtgattcatgcttgtgccgttggtattgtgtttttctgtgcttccgtttgttaatgctatccagttcctgtggcctgaactgtaccttcgcaaattatacgctcgttcaccgtggggatctggctgacagatagtgaactgctgccactctttttttttttactaaggccgctgccacttctgagctgtgagatgccatgtctatcaataataacggtaaggagtattctaaaagattttgagctgtgggcagatgaatgtttaggacatatggattggaggggattgaagattaaatcctctcctatttaattttaactagtaaaggattttatccatttaaaa

SEQ ID NO: 62437 - DNA, 2839 bp, Zea Mays
aaaactccgccgttcgcccgtccccgcccttttccttctcttctcccactctcactatacccatttctcgagatctcggcgaaaccctagtgaaacccccgccgtgggggcaccaagacgccgcaatgctgcacgagctcctcctcgcgctgctcggcttcaccggcgacttcgtcctcgacgtctctctgccgcggcgccgcgccgcctcccaggacgccggcgaggatggaaacggagacggtgaggtgggcccctccttccgcctcgcgccggacctcaccttcctccagccatcagagaggactgctattgagaggctcatatctctgggattttactacagagaactgaatcgctttgcaaccgagtcccgcgacctgagctggattcagtcttctatagatgtttcatcacctcattctgataatacccagaaggggaaagtgagaaaagggagtgtgtacaggagggcaattgccaatggtatcactgagattctgtcagtatacagatcagctgttctgcaggttgagcaaaaccttttatcagatccgttgcctatcctcgcgacagtaactcacgggttgaacaagtttgaagtccttctgcctccactgtatgagcttgttatggaaatccagcataaagacatcaagggtggccagcttcttaatcttttgcacaaacggtgccattgtggggttccagaactgcaaagctgcattcagaggctactttggcatggacaccaggtcatgttcaaccagctgacatcttggatggtttatgggattcttcaagatcagtacagcgagtttttcattagaaggcaagatgacagggatgtggagaatgaatcatctcagcgtgatgtttctgataagttaaagcagaaattagctaaagacacatccctggctagttggcatacgggatttcatgtatcattggacatgttgcctgagtatatccacatgcgaattgcagagtccattctcttcgctggcaaagcaataagggtgcttcgaaatccaagtcctagtgctacattgcaggatcctgtaatcagaactgtaggatctcatggaatgcaaagctctgtaggaggttctggtgtaccaaaagaactggcaaacttctctaacatcagagcagaagaactactgccacaagcagaagctgataaaattgattctatgctcaaggagctaaagcattcttctgaatttcacaaacgaccttttgagtctgctgtcggctcaatacgtacaattgcagctaatcatctctggcagctagtggtggtacgtgctgatctcaacggtcatttgaaggcattgaaagattattttcttttagcaaaaggtgactttttccagtgttttcttgaggaaagccgccaattaatgcggttaccacctcgtcaatctacagccgaagcagatctcatgattccatttcagctggctgcactgaagactatcggtgaggaagacaagtactttaccagagtctcattaaggatgctatcatatggtatgaaaagtagcacgtctcagaaagatctccaaaagcctaatgcttcagagcttccttcacaaggaaaagctgcatcagaattgacacttgatgggtgggatagtattgctctggaatattctattgactggcctctgcagctcttcttcactcctgatgttctgtccaagtatcgcaaggtttttcagtatctcatccgattgaagaggacacaaatggaacttgagaaatcctgggcagctgtaatgcataaagaccatgctgatttttctgattattgcaaggatcggaaaaataactctgcaacacaactgcgtcgacaacggtctaagcctttgtggcgagtaagggagcatatggcattcttgatcagaaacctacaattttacatccaggttgatgtaattgagtcacagtggaatgttttacaatctcacgtgcaagattcacatgattttacagagctagtgagctttcatcaagagtaagcaacaaatatttgtcagcgctggtttcccaatccttcttggacatcggatcagtctctaggatactggatagcataatgaagctttgcttgcagttctgctggagcatagagcaatatgaaactcggccaaatatttctgagattgatcacataactgaggagttcaacaagaagtccaattcgctgtacactatcttgaggagtagtcgcctcgcgggtagtcagagagcacctttcctgaggcaatttctgatgaggctaaattttaactctttctttgagaccaccgcaaggggagtgatgaattcaggaaggctgcgaccaatcactgcaggtgctcagctgtaacggtgatggtatgtttgggggtagtgctgcagcaagagacaagggaggagtttctgtagtttatgtaaattatgatcggatggtggttgtctgtcatggaaaaatcgattgcaggtgattcatgcttgtgccgttggtattgtgtttttctgtgcttccgtttgttaatgctatccagttcctgtggcctgaactgtaccttcgcaaattatacgctcgttcaccgtggggatctggctgacagatagtgaactgctgccactctttttttttttactaaggccgctgccacttctgagctgtgagatgccatgtctatcaataataacggtaaggagtattctaaaagattttgagctgtgggcagatgaatgtttaggacatatggattggaggggattgaagattaaatcctctcctatttaattttaactagtaaaggattttatccatttaaaa

SEQ ID NO: 62438 - DNA, 2731 bp, Zea Mays
ctaaaactccgccgttcgcccgtccccgcccttttccttctcttctcccactctcactatacccatttctcgagatctcggcgaaaccctagtgaaacccccgccgtgggggcaccaagacgccgcaatgctgcacgagctcctcctcgcgctgctcggcttcaccggcgacttcgtcctcgacgtctctctgccgcggcgccgcgccgcctcccaggacgccggcgaggatggaaacggagacggtgaggtgggcccctccttccgcctcgcgccggacctcaccttcctccagccatcagagaggactgctattgagaggctcatatctctgggattttactacagagaactgaatcgctttgcaaccgagtcccgcgacctgagctggattcagtcttctatagatgtttcatcacctcattctgataatacccagaaggggaaagtgagaaaagggagtgtgtacaggagggcaattgccaatggtatcactgagattctgtcagtatacagatcagctgttctgcaggttgagcaaaaccttttatcagatccgttgcctatcctcgcgacagtaactcacgggttgaacaagtttgaagtccttctgcctccactgtatgagcttgttatggaaatccagcataaagacatcaagggtggccagcttcttaatcttttgcacaaacggtgccattgtggggttccagaactgcaaagctgcattcagaggcaagatgacagggatgtggagaatgaatcatctcagcgtgatgtttctgataagttaaagcagaaattagctaaagacacatccctggctagttggcatacgggatttcatgtatcattggacatgttgcctgagtatatccacatgcgaattgcagagtccattctcttcgctggcaaagcaataagggtgcttcgaaatccaagtcctagtgctacattgcaggatcctgtaatcagaactgtaggatctcatggaatgcaaagctctgtaggaggttctggtgtaccaaaagaactggcaaacttctctaacatcagagcagaagaactactgccacaagcagaagctgataaaattgattctatgctcaaggagctaaagcattcttctgaatttcacaaacgaccttttgagtctgctgtcggctcaatacgtacaattgcagctaatcatctctggcagctagtggtggtacgtgctgatctcaacggtcatttgaaggcattgaaagattattttcttttagcaaaaggtgactttttccagtgttttcttgaggaaagccgccaattaatgcggttaccacctcgtcaatctacagccgaagcagatctcatgattccatttcagctggctgcactgaagactatcggtgaggaagacaagtactttaccagagtctcattaaggatgctatcatatggtatgaaaagtagcacgtctcagaaagatctccaaaagcctaatgcttcagagcttccttcacaaggaaaagctgcatcagaattgacacttgatgggtgggatagtattgctctggaatattctattgactggcctctgcagctcttcttcactcctgatgttctgtccaagtatcgcaaggtttttcagtatctcatccgattgaagaggacacaaatggaacttgagaaatcctgggcagctgtaatgcataaagaccatgctgatttttctgattattgcaaggatcggaaaaataactctgcaacacaactgcgtcgacaacggtctaagcctttgtggcgagtaagggagcatatggcattcttgatcagaaacctacaattttacatccaggttgatgtaattgagtcacagtggaatgttttacaatctcacgtgcaagattcacatgattttacagagctagtgagctttcatcaagaatatttgtcagcgctggtttcccaatccttcttggacatcggatcagtctctaggatactggatagcataatgaagctttgcttgcagttctgctggagcatagagcaatatgaaactcggccaaatatttctgagattgatcacataactgaggagttcaacaagaagtccaattcgctgtacactatcttgaggagtagtcgcctcgcgggtagtcagagagcacctttcctgaggcaatttctgatgaggctaaattttaactctttctttgagaccaccgcaaggggagtgatgaattcaggaaggctgcgaccaatcactgcaggtgctcagctgtaacggtgatggtatgtttgggggtagtgctgcagcaagagacaagggaggagtttctgtagtttatgtaaattatgatcggatggtggttgtctgtcatggaaaaatcgattgcaggtgattcatgcttgtgccgttggtattgtgtttttctgtgcttccgtttgttaatgctatccagttcctgtggcctgaactgtaccttcgcaaattatacgctcgttcaccgtggggatctggctgacagatagtgaactgctgccactctttttttttttactaaggccgctgccacttctgagctgtgagatgccatgtctatcaataataacggtaaggagtattctaaaagattttgagctgtgggcagatgaatgtttaggacatatggattggaggggattgaagattaaatcctctcctatttaattttaactagtaaaggattttatccatttaaaa

SEQ ID NO: 62439 - DNA, 2833 bp, Zea Mays
aaacgaactaaaactccgccgttcgcccgtccccgcccttttccttctcttctcccactctcactatacccatttctcgagatctcggcgaaaccctagtgaaacccccgccgtgggggcaccaagacgccgcaatgctgcacgagctcctcctcgcgctgctcggcttcaccggcgacttcgtcctcgacgtctctctgccgcggcgccgcgccgcctcccaggacgccggcgaggatggaaacggagacggtgaggtgggcccctccttccgcctcgcgccggacctcaccttcctccagccatcagagaggactgctattgagaggctcatatctctgggattttactacagagaactgaatcgctttgcaaccgagtcccgcgacctgagctggattcagtcttctatagatgtttcatcacctcattctgataatacccagaaggggaaagtgagaaaagggagtgtgtacaggagggcaattgccaatggtatcactgagattctgtcagtatacagatcagctgttctgcaggttgagcaaaaccttttatcagatccgttgcctatcctcgcgacagtaactcacgggttgaacaagtttgaagtccttctgcctccactgtatgagcttgttatggaaatccagcataaagacatcaagggtggccagcttcttaatcttttgcacaaacggtgccattgtggggttccagaactgcaaagctgcattcagaggctactttggcatggacaccaggtcatgttcaaccagctgacatcttggatggtttatgggattcttcaagatcagtacagcgagtttttcattagaaggcaagatgacagggatgtggagaatgaatcatctcagcgtgatgtttctgataagttaaagcagaaattagctaaagacacatccctggctagttggcatacgggatttcatgtatcattggacatgttgcctgagtatatccacatgcgaattgcagagtccattctcttcgctggcaaagcaataagggtgcttcgaaatccaagtcctagtgctacattgcaggatcctgtaatcagaactgtaggatctcatggaatgcaaagctctgtaggaggttctggtgtaccaaaagaactggcaaacttctctaacatcagagcagaagaactactgccacaagcagaagctgataaaattgattctatgctcaaggagctaaagcattcttctgaatttcacaaacgaccttttgagtctgctgtcggctcaatacgtacaattgcagctaatcatctctggcagtggtggtacgtgctgatctcaacggtcatttgaaggcattgaaagattattttcttttagcaaaaggtgactttttccagtgttttcttgaggaaagccgccaattaatgcggttaccacctcgtcaatctacagccgaagcagatctcatgattccatttcagctggctgcactgaagactatcggtgaggaagacaagtactttaccagagtctcattaaggatgctatcatatggtatgaaaagtagcacgtctcagaaagatctccaaaagcctaatgcttcagagcttccttcacaaggaaaagctgcatcagaattgacacttgatgggtgggatagtattgctctggaatattctattgactggcctctgcagctcttcttcactcctgatgttctgtccaagtatcgcaaggtttttcagtatctcatccgattgaagaggacacaaatggaacttgagaaatcctgggcagctgtaatgcataaagaccatgctgatttttctgattattgcaaggatcggaaaaataactctgcaacacaactgcgtcgacaacggtctaagcctttgtggcgagtaagggagcatatggcattcttgatcagaaacctacaattttacatccaggttgatgtaattgagtcacagtggaatgttttacaatctcacgtgcaagattcacatgattttacagagctagtgagctttcatcaagaatatttgtcagcgctggtttcccaatccttcttggacatcggatcagtctctaggatactggatagcataatgaagctttgcttgcagttctgctggagcatagagcaatatgaaactcggccaaatatttctgagattgatcacataactgaggagttcaacaagaagtccaattcgctgtacactatcttgaggagtagtcgcctcgcgggtagtcagagagcacctttcctgaggcaatttctgatgaggctaaattttaactctttctttgagaccaccgcaaggggagtgatgaattcaggaaggctgcgaccaatcactgcaggtgctcagctgtaacggtgatggtatgtttgggggtagtgctgcagcaagagacaagggaggagtttctgtagtttatgtaaattatgatcggatggtggttgtctgtcatggaaaaatcgattgcaggtgattcatgcttgtgccgttggtattgtgtttttctgtgcttccgtttgttaatgctatccagttcctgtggcctgaactgtaccttcgcaaattatacgctcgttcaccgtggggatctggctgacagatagtgaactgctgccactctttttttttttactaaggccgctgccacttctgagctgtgagatgccatgtctatcaataataacggtaaggagtattctaaaagattttgagctgtgggcagatgaatgtttaggacatatggattggaggggattgaagattaaatcctctcctatttaattttaactagtaaaggattttatccatttaaaa

SEQ ID NO: 62440 - DNA, 1421 bp, Zea Mays
ccacctagccgtgtccttgaggtcaccatacaccagattgcattggatcagcatttaatgccaaaggggttatgcaatgccccaactgccgcaaaatcgagaaagggaattggctttatgcaaatggttctcgatctgcccatgatgttagcatggatgaatgggcccatgatgaagacctttatgatgttagctactcagatatgccatttcgcttccattggtgtccgtttgggcgcttaacccaacttccatctttatttgaggaaggagaatcatcacctccagttacatttcatgacttcatgggacaacatgtgtttacggagcaagtagctgtatctgctgcagcagggacaactaatccttgcccctatgtggcatacttgcatcctcttacaccattgacgtcattgtcaagctcccatgtccctgacagaactatggatcgtcctgcataccatgatcattggaaccccatggctgggccatcagatgttaggtccatgcaaacaatgcaacctgctgattttcatcatagccattgggcacatgtgccccattcttatggtcaacccaacagcaataacgagcagccaggaatcccttttggagcaagggctgtacgggtcgatggtgatagccaacgccgagcatctgttgtctctccatcttacttcagtaatggatctggttccagatctagacctcccaatgttcctcctctgatgcctcagttcatgagggctcatggcagcatcagcgaacagtaccaacagaattcatcatctagcttatttgctggggcccataggtcaggaggcatgcgacctgccccaacacctctaccagagaaccccacctttaccttgttcccgccaggttcatctggccatagctcgatggagactgatgatgctgggggaagccggttctacgcctgggagggtgaccggtttgccccatacccgttgatgccggtagactgcgagacaagctggcggacctcacagcagcagtcccaccagagcacatcagagcctacatctgctccaaggaggctgtttgggcaatggctcgctgtcggcaggccatccccatcacccgaggggtcttcgtatcgtcaattgcactcaccgcggatgtagaccctcgccgctgaaagaaacgatgggaagcccattgtattaagttaagccgggctgtgccgtgaaactttgggacgatgctcgaggggacagaaactggaaacgatccggctgaggatatttcgatttggtttatgtgaattccatctcgtacatatttgaaatcaagttgggatgctgggagcttcgaatgtaacgtgatttcttatgctgcaattctgttgattgacggattttcaaacgcgattgaatttccgttgcaatggtacctgt

SEQ ID NO: 62441 - DNA, 1424 bp, Zea Mays
gtggattgttgcttgcgaagtttgtggttcaatcgcgtgattgcattggatcagcatttaatgccaaaggggttatgcaatgccccaactgccgcaaaatcgagaaagggaattggctttatgcaaatggttctcgatctgcccatgatgttagcatggatgaatgggcccatgatgaagacctttatgatgttagctactcagatatgccatttcgcttccattggtgtccgtttgggcgcttaacccaacttccatctttatttgaggaaggagaatcatcacctccagttacatttcatgacttcatgggacaacatgtgtttacggagcaagtagctgtatctgctgcagcagggacaactaatccttgcccctatgtggcatacttgcatcctcttacaccattgacgtcattgtcaagctcccatgtccctgacagaactatggatcgtcctgcataccatgatcattggaaccccatggctgggccatcagatgttaggtccatgcaaacaatgcaacctgctgattttcatcatagccattgggcacatgtgccccattcttatggtcaacccaacagcaataacgagcagccaggaatcccttttggagcaagggctgtacgggtcgatggtgatagccaacgccgagcatctgttgtctctccatcttacttcagtaatggatctggttccagatctagacctcccaatgttcctcctctgatgcctcagttcatgagggctcatggcagcatcagcgaacagtaccaacagaattcatcatctagcttatttgctggggcccataggtcaggaggcatgcgacctgccccaacacctctaccagagaaccccacctttaccttgttcccgccaggttcatctggccatagctcgatggagactgatgatgctgggggaagccggttctacgcctgggagggtgaccggtttgccccatacccgttgatgccggtagactgcgagacaagctggcggacctcacagcagcagtcccaccagagcacatcagagcctacatctgctccaaggaggctgtttgggcaatggctcgctgtcggcaggccatccccatcacccgaggggtcttcgtatcgtcaattgcactcaccgcggatgtagaccctcgccgctgaaagaaacgatgggaagcccattgtattaagttaagccgggctgtgccgtgaaactttgggacgatgctcgaggggacagaaactggaaacgatccggctgaggatatttcgatttggtttatgtgaattccatctcgtacatatttgaaatcaagttgggatgctgggagcttcgaatgtaacgtgatttcttatgctgcaattctgttgattgacggattttcaaacgcgattgaatttccgttgcaatggtacctgt

SEQ ID NO: 62442 - DNA, 2970 bp, Zea Mays
cacttataaagatgtagtacaatttataaaacgagagatgaatttagcatttaaccaattagctaatgagttgtgtttaggctgattatgttcaatgtgttgttcatgatgtttgcgttaggttcgtttaatctagaaaaaaaaccgtgattattgctcttagtcgtacgttgataactagtgttttctgtaggaaatagtacaacgcctcaccggtaggtgtttaattcaccgtcgtgtagccttatttaggtttgtgatattcttgtttatatgcattcatgtgcattatgcaaatcatttaggtacgttgattaaccacgagatgcggagagttgagtcaagtcgaccccaagcgtggactactccgcatggtgaagctgatggaccaacctgaagatggttaaatcaagcgaatgttcggttgagggatactcgtcaagcggatgtcatctaacaaacactaacatagtgtttattccaggcaagccccggtgcatgcaacccctttccttgtgttttaaatacttttcgcacacttaagtctagtgaaatgtgcattaggttcataggagttacttgaaaccctttgatgcattactttccttgatatccatacctttatagatacttctgtgaagtatcaaaatatgatttacaaaaatgcttagccttgcttagatcttgtggatagaggttgtccttaatttaactcgagaaaggatggcttctacctgcaagaatattttcatttggagcaatagtgggatcttactgcaaagttccctgtgatgctctttcatcctaaggaacagacacaatcctaaggatggaaatacttaaatcgagacttgggctaggaacaggtgatgctccgcccgggtcaattaaggattggatgcgtatgtaggcctgttgatcaaggactatcttatctagccacatgccctgagaatgggacagggtaagcttgaacccggctattccatacatgaaaagacaatcgcgcactgggcgtggagagatggcgagagtggcacgtaccctcctggcaacggatcgcctaaaaggggtggtgtactctcgggtggtgcggacctgttcatgcagtggaggatccgtgggaatagtagacatcaaggtttacgagaaacatatgtcgtgtggttagaaatcctcagctgagtaaatcgattcggatcgccgttatatccccggacagtggagacttgagctccgacctacaacctaagtcaggatgtgaacacgatggataaaaataatgttgtcttgatgtgatgtgaaattagactagatgcaaatagagtctattaatacttaatatggcgttaaaagattgaaagtaaggactcactttagtaagctatttctgcaaaagtatctaagttgattcttgctaaagcctctccttgactcctatttatccagcatacccttgagagtcttttccttagtcgggtaagtcttgctgagtaattccatactgagggttttattccctgttgtttttcaggttatagtttttgtgctgctgttgatggtgttaagtgccggtggggctcggccttcttatataagtataccccgtctttaccttcttattgaggatggtcacttgagttagcatatatttcaaacttataaataatttataacagtttaaagttatttctttgaatcacctttgtaatcactccgatcatacaaagtaaaattttgtaacttgtaaaatttggtaataagatttccgctgcaaagatattgatgtgtgtgatttgtgtttacttaatcccgcggttctggttgtaagtggtttatccgatgtccttgggtcaatcggacggatcctgttaagttatttagtgcacatgcatagctgtctgaggtctttgagacaaggacaggtgcatgtgggcccaataacttgggaggttctgccacaagctctccccgggtagaaagggaatcatgactcatgggtaaagtgtgcaacctctgcagagggtagtgaaactgatatatcagccgtgctcatggttaagagcagccttgggatcctctttgattagagatacagatggttcgagatacaaggattatgttgtggttttggttcgactatgatggtgttgttcctcaatgaggaaatggttcacgggttggttaatgctaaaatctggcttctactaatgataaatacttgaccaactaaaagcaactgcttgagcctaaccccacataaagctagtccacttcagccaaacgggacatttgctgagtacgttgatgtgtactcatccttgctttaccacaaaacaccaggttgtccgcattgtaaccacttctcaggagaaggcgaagccgtggaaggagacttccaggagttccaagattacgatgaattctaggtgtgggttggcggcaacccccagtcagctgcctgtgaaggccttatctttactgtgtttcgctagcactttgatttacttgttaagacaatgactatgtggatgtctatgactctatgatgtaataagtactcttttatgttattactcgagcattgtgtgatgatgttcatttatgtaatcgctgtgtacgtgagttctgatcctggcacgtacatagttcgcattcggtttgccttccaagaccgggtgtgacatccacctttttccctttcaatccatcttcgagactaaatcatcaaactcaagcacatggttagtcttcaaagggtcaagttgtaacacatctccccctaaacatgtgcatcactttgcaacggacttgtgaggtccagggagtgtttgtacaacttgagcaccacaataaacaacaaaatgcagaatgaacatgatcaaaagcataaacatatgtatgctacatttcaatccaagttccgcgaatctaagatattgagctcactacgcagcctgcaaaaggtct

SEQ ID NO: 62443 - DNA, 2760 bp, Zea Mays
aagctaacaacacgatattccccaagcgctcgacaaaattgactgaatcggaaaatcgctaccgatctcggagattcgtgttagctgtggaaacggtacgttgattaaccacgagatgcggagagttgagtcaagtcgaccccaagcgtggactactccgcatggtgaagctgatggaccaacctgaagatggttaaatcaagcgaatgttcggttgagggatactcgtcaagcggatgtcatctaacaaacactaacatagtgtttattccaggcaagccccggtgcatgcaacccctttccttgtgttttaaatacttttcgcacacttaagtctagtgaaatgtgcattaggttcataggagttacttgaaaccctttgatgcattactttccttgatatccatacctttatagatacttctgtgaagtatcaaaatatgatttacaaaaatgcttagccttgcttagatcttgtggatagaggttgtccttaatttaactcgagaaaggatggcttctacctgcaagaatattttcatttggagcaatagtgggatcttactgcaaagttccctgtgatgctctttcatcctaaggaacagacacaatcctaaggatggaaatacttaaatcgagacttgggctaggaacaggtgatgctccgcccgggtcaattaaggattggatgcgtatgtaggcctgttgatcaaggactatcttatctagccacatgccctgagaatgggacagggtaagcttgaacccggctattccatacatgaaaagacaatcgcgcactgggcgtggagagatggcgagagtggcacgtaccctcctggcaacggatcgcctaaaaggggtggtgtactctcgggtggtgcggacctgttcatgcagtggaggatccgtgggaatagtagacatcaaggtttacgagaaacatatgtcgtgtggttagaaatcctcagctgagtaaatcgattcggatcgccgttatatccccggacagtggagacttgagctccgacctacaacctaagtcaggatgtgaacacgatggataaaaataatgttgtcttgatgtgatgtgaaattagactagatgcaaatagagtctattaatacttaatatggcgttaaaagattgaaagtaaggactcactttagtaagctatttctgcaaaagtatctaagttgattcttgctaaagcctctccttgactcctatttatccagcatacccttgagagtcttttccttagtcgggtaagtcttgctgagtaattccatactgagggttttattccctgttgtttttcaggttatagtttttgtgctgctgttgatggtgttaagtgccggtggggctcggccttcttatataagtataccccgtctttaccttcttattgaggatggtcacttgagttagcatatatttcaaacttataaataatttataacagtttaaagttatttctttgaatcacctttgtaatcactccgatcatacaaagtaaaattttgtaacttgtaaaatttggtaataagatttccgctgcaaagatattgatgtgtgtgatttgtgtttacttaatcccgcggttctggttgtaagtggtttatccgatgtccttgggtcaatcggacggatcctgttaagttatttagtgcacatgcatagctgtctgaggtctttgagacaaggacaggtgcatgtgggcccaataacttgggaggttctgccacaagctctccccgggtagaaagggaatcatgactcatgggtaaagtgtgcaacctctgcagagggtagtgaaactgatatatcagccgtgctcatggttaagagcagccttgggatcctctttgattagagatacagatggttcgagatacaaggattatgttgtggttttggttcgactatgatggtgttgttcctcaatgaggaaatggttcacgggttggttaatgctaaaatctggcttctactaatgataaatacttgaccaactaaaagcaactgcttgagcctaaccccacataaagctagtccacttcagccaaacgggacatttgctgagtacgttgatgtgtactcatccttgctttaccacaaaacaccaggttgtccgcattgtaaccacttctcaggagaaggcgaagccgtggaaggagacttccaggagttccaagattacgatgaattctaggtgtgggttggcggcaacccccagtcagctgcctgtgaaggccttatctttactgtgtttcgctagcactttgatttacttgttaagacaatgactatgtggatgtctatgactctatgatgtaataagtactcttttatgttattactcgagcattgtgtgatgatgttcatttatgtaatcgctgtgtacgtgagttctgatcctggcacgtacatagttcgcattcggtttgccttccaagaccgggtgtgacatccacctttttccctttcaatccatcttcgagactaaatcatcaaactcaagcacatggttagtcttcaaagggtcaagttgtaacacatctccccctaaacatgtgcatcactttgcaacggacttgtgaggtccagggagtgtttgtacaacttgagcaccacaataaacaacaaaatgcagaatgaacatgatcaaaagcataaacatatgtatgctacatttcaatccaagttccgcgaatctaagatattgagctcactacgcagcctgcaaaaggtct

SEQ ID NO: 62444 - DNA, 2253 bp, Zea Mays
cttgaaacaatttctatgttgtttgtcaagtgatcaagcaacatctatcatctctgttggatcaaaagggcatacccctttaatgtgtggtctcttgtccctttactttgatggtgactactcatacaagttccctttacatcctttgtgtaaaggtgaagccttggagctttttagtgtcgagagacaactgattagctctcaaaatgaagattgatttttccctgctgttgtgatgcaggagtttgttcattcgctctcttatttaatccaagtattccctaaccaagtggataattcatctcacatgaagaaacggatgaacaacctgaccaaatggatttctgcccaagtgcatgatcaactgttagtatgagtgaactctcaacccttggcttaccaatggtactgagaggattttcttaatgtcaaaagtagttcaacaagttggttttgactaacttgtaactgctcaatgaacgaaggctgagtttagagatcattttatcgagttgtctaaactcactttggttcaacacaccctaaagaaagtacttaacaaaatcaaattaagtcgaccagtaaccatctaattatctctctagttatgcctcgatcgcctcacgtgtgttttcccagcatatgcgatcaagtcgagccatgcctagtgcttgataaaatggactggtcgtaaagtccgtatctacagatctcttcactggtgattctctagaatctataccatctttcgtggacttgaattctcgggtaagccacatgttaaccgcgacagtattcgacatccacacccgtctcctgtgctatcaatttcctgtaaccacttgttggtaaacttctttctgtgttttacccaagacggtgcatgtgattctgtttggggaaaatcacgtatttaccgctcacccaatagactcggatagtacaatgtcatcagaaaaagcaaactgcacacatgaaaccttatgtgttcttgtggcaggtagcgtctctactatgggacatctctaaattagcttaaggcgatatatgatatgcccactagagaaactacatcctgaggcactcacctttacttggactatcttagggttatcgctgatatggatatgggttacatacttctctacccttagaagtctttcgctctgaatctcgggacgagattcttttaaggggggagggctgtaacaccccaggtgtttatattccgctcgacaaagagtatgagtttaagcacgtaatatcagtggataaaacagatgctaaatttcaattagcttcgtctatcgcgattttaatatcgcatctgttttatttgtcgcgagtgcgacattctttttattttatttatccgggctcttcctaaattttcgtgatgttcggaacatcgttgttccgaaaatcggtgcgtccggtgattatttaaaattcatcgctcgcgcaaatacgaatttaggaaattcagtacggtcctccgatttcatctcaaacaaatttattttgaactcgacgactaagatactcggggtaaaataattcgaatcgcgcgaaatcgtgcgagaggttatgatctaatttgttctttagcccacactgtagaataatcaaattaactgtgttttggtgatggatacatttttttatctgatttcgaccaaaccagtgttgtcttaaatattgaatctgcctgtttacgtgccgttcgagaaaaacgatgcgccagctcattgtcgaattattctctagtcgaatattcggatagcgggcaaaattcgtctaaatataacggaaacgaatgcaaattaaaattaattgaattgtttctctaacaaattgaccaagacggataaatcaaatattcgggtcgaaagcagatgagtttatctgatcccgagaatatccaccatagtaagcgcagtccaaaaatattaaagttgatattgttttgtttgatttgtttgcatctatatcagacccaaattttagagcatcagatatttctgtactcgtttgtttcagaacaaaggaaagtcttctacaaccttatccttgccatcgcttgggattttttttcagcaaacaacgctagcgctcatattcttatcttgagtcattgtcaccattcttatcctctcgtatgatttcctcctcatccagaaatcagcaattgaaatgtcactcacgcattcttctcacatacggctccttgggatatttctcggtgcacatgcc

SEQ ID NO: 62445 - DNA, 1846 bp, Zea Mays
aaatattcgggtcgaaagcagatgagtttatctgatcccgagaatatccaccatagtaagcgcagtccaaaaatattaaagttgatattgttttgtttgatttgtttgcatctatatcagacccaaattttagagcatcagatatttctgtactcgtttgtttcagaacaaaggaaagtcttctacaaccttatccttgccatcgcttgggattttttttcagcaaacaacgctagcgctcatattcttatcttgagtcattgtcaccattcttatcctctcgtatgatttcctcctcatccagaaatcagcaattgaaatgtcactcacgcattcttctcacatacggctccttgggatatttctcggtgcacatgcccagctgttcatatccctgaacatgcacaacatcctggaggctctatcacgtcatcttctagcttccatatgattcctctccactagtcattcctctgaaaaatctccagccgccgccctccatctgatatttctcatccgtcgtatatctcctggcgcgcgcgttccttgtcttgtcccagcgcccggcagctgcgccctgctccagctcatggcgcgtccctgcccctcccatggcagctccccagctcgatttccctccctagccatggccgcgcccaaatcctctccctccctgttcggattccgccagacctgcgtagctccctggtgtgtcttcctccctgcgcgctcagccagcgtccctgcgcgctccgcggtgctcagctctccagctccggtgcccagctcgccagggccgcgtgtgctccagtgtcgcgctctgctcgcggagttccttcgcggcgttcatctccctgctcagctcgccgcgccgaactgtccagcacctctctgctcctttcgttcctagcgcgtcgagttgagcttgccgatgatgctttggctggtcagcctctgctctagctcgcagttgctgcgttgccgagtccctggccgccgtgccctgtgcgctgtcctccgctcgccgggctgtacgttgctaggatcggaagcaccgtccttcgtttggacagcaacggcgtgcacaaaagctttgttgctgctgttggaggcttctcgacgaaatatctaacaaagggttgaagctccagtgcatcgccgtcgtttcgctatgtccggcgtcgtgctttttttttgccggtcattggtttcctattcaacacaacaccgtcgtccccgcgtcgcacccggaatttcgccgcgcgtcctgtttcctgctcgccagcgtgccctctcggctcgctcggctttaattcccaatcgcgtcgttgattccgccggttagcgtcgttcgacgtcgcgtcgcgggtgcagctctatatacgtcaccccctgtgtcgtcatcgttccacgcgtcagcaagaaattccaagagtcgggtgaagacgaagctaacaacacgatattccccaagcgctcgacaaaattgcctgaatcggaaaatcgctaccgatctcggagattcgtgttagctgtggaaacggtacgttgattaaccacgagatgcggagagttgagtcaagtcgaccccaagcgtggactactccgcatggtgaagctgatggaccaacctgaagatggttaaatcaagcgaatgttcggttgagggatactcgtcaagcggacgtcatctaacaaacactaacatagtgtttattccaggcaagccccggtgcatgcaactcctttccttgtgttttaaatacttttcgcacacttaagtctagtgaaatgtgcattaggttcataggagttacttgaaaccctttgatgcattactttcctt

SEQ ID NO: 62446 - DNA, 2316 bp, Zea Mays
ccaagttgtcgcatttcttcccactccggttctcatctgctgctccacgccgatccaactcggagtccccactccctcgaatcgcagctgctgcagcggagcaccagggtcttgcctcgatttgcggcgaaagcacgccgtttttctggtggtttgtagcgccgagcggttcttgattccggcgctggttttggtgctattgaggaggaggtggcattttagtgcttgcttctttcaagaactgcagcgtcttgattactgctttacctctttgcggatggatggatgcgattgtattgagccactttggcaggccgatgatctcttaatgaagtaccagtacatatctgacttctttatcgcacttgcatacttctcgatccctttggagctgatatactttgttcagaagtcagctttcttcccctaccgatgggtactcatacagtttggtgcgttcatcgttctgtgtggggcaacccaccttataaacatgtggactttcactacgcataccaagaccatagctgtggtgctgacagtggcaaaagtggcgacagccgttgtgtcatgcataacagctctgatgcttgttcatataatccctgatctgctgagcgtgaaattgagggagaggttcctgaaagcgaaggccgaggagcttgatagggagatggggataataaggacacaagaggagacgggaagacatgtgcacatgctcacgcacgagataagaagcacacttgacaggcatactattctgagaactacacttgttgaaatgagaagaactcttggtttagcagagtgtgctgtgtggatgccatcacgctctggaacaacccttcagctctcacatgcactccataccaatgctccgcttggatcagttgttcctatcaatcttccgattgtagctaccatttttaatagtaatcgtgctgagagaataccacatacttccccattagcttcagtaaaggctcagaaaagcaagtacgtcccaccagaggttgttgctgtccgtgttccgctgctgcagcttacaaattttcaaataaatggttggcccgagctatctgcaaaagcctttgcagtgttggttttgatgcttcctccagacagtgcacgaaaatggcgaccccatgaactggagcttgttgaagttgttgctgaccaggtggcagttgcactgtcccatgctgccattttggaagagtccatgcaagcccgtgatctgctattggagcagaatattgctctggacgcagcacgccgagaggcagaaatggctatatgtgctcggaatgattttcttgctgtcatgaatcatgaaatgcggactcctatgcgggcaatcatttctttatcatccctcctgttagaaacaaaacttactgcagaacagcgggtgatgattgagactatactgaagagtagcgatcttctagaaactctttcaaatgatgttttggatatatccaagcttggagacggcagccttgagctggaaattgcaccttttaatctacatgccacctttacagatgtggttgatttaattaaaccagtagctgcattaaaaaggctatcggtaatggttcatttggctccagaattgcccacctgcgcaattggtgatcggaagaggttgatgcagataatactaaatgttgctgggaactccgttaagtttacaaaggagggtcatatttcagtttcagcatctatcgctaggccggattctctgagggacccatacgctcttgacttgcatccagttctctccgatgggtctttttacttggctgtgcaggtaaaagacaccggctgtggaatcagcccacaagatatgcctcacaccttcacaagatttgcacaccagcaaaatgctacaaacaaattgcgtagtggcaacggattgggtctggccctttccagaagagccgtcgcgctctaggcaagcaggtgcgagtgcgatcgggcgaatccaaaatagcgggacgcctctactagggaattaacagcgcagggagagcggtgcggtgttttaagaaattataagttgtgagatgagtggcgtgtttgttagacgtcatttagggttttctagtgttgtactagtatagtcttggtagagagaagcagaaagaagctgatctgtacacgaggcaaatgaaatgctgatgactacttataaggcttctactgtttgtacagtattttttttgtctacataaattgcaacagtatagtatttttgtctctatgaattgaattgcaggtgtaacagttctttaatttaattcgaaa

SEQ ID NO: 62447 - DNA, 2677 bp, Zea Mays
agtcatttgacttgcagccaccaagttgtcgcatttcttcccactccggttctcatctgctgctccacgccgatccaactcggagtccccactccctcgaatcgcagctgctgcagcggagcaccagggtcttgcctcgatttgcggcgaaagcacgccgtttttctggtggtttgtagcgccgagcggttcttgattccggcgctggttttggtgctattgaggaggaggtggcattttagtgcttgcttctttcaagaactgcagcgtcttgattactgctttacctctttgcggatggatggatgcgattgtattgagccactttggcaggccgatgatctcttaatgaagtaccagtacatatctgacttctttatcgcacttgcatacttctcgatccctttggagctgatatactttgttcagaagtcagctttcttcccctaccgatgggtactcatacagtttggtgcgttcatcgttctgtgtggggcaacccaccttataaacatgtggactttcactacgcataccaagaccatagctgtggtgctgacagtggcaaaagtggcgacagccgttgtgtcatgcataacagctctgatgcttgttcatataatccctgatctgctgagcgtgaaattgagggagaggttcctgaaagcgaaggccgaggagcttgatagggagatggggataataaggacacaagaggagacgggaagacatgtgcacatgctcacgcacgagataagaagcacacttgacaggcatactattctgagaactacacttgttgaaatgagaagaactcttggtttagcagagtgtgctgtgtggatgccatcacgctctggaacaacccttcagctctcacatgcactccataccaatgctccgcttggatcagttgttcctatcaatcttccgattgtagctaccatttttaatagtaatcgtgctgagagaataccacatacttccccattagcttcagtaaaggctcagaaaagcaagtacgtcccaccagaggttgttgctgtccgtgttccgctgctgcagcttacaaattttcaaataaatggttggcccgagctatctgcaaaagcctttgcagtgttggttttgatgcttcctccagacagtgcacgaaaatggcgaccccatgaactggagcttgttgaagttgttgctgaccaggtggcagttgcactgtcccatgctgccattttggaagagtccatgcaagcccgtgatctgctattggagcagaatattgctctggacgcagcacgccgagaggcagaaatggctatatgtgctcggaatgattttcttgctgtcatgaatcatgaaatgcggactcctatgcgggcaatcatttctttatcatccctcctgttagaaacaaaacttactgcagaacagcgggtgatgattgagactatactgaagagtagcgatcttctagaaactctttcaaatgatgttttggatatatccaagcttggagacggcagccttgagctggaaattgcaccttttaatctacatgccacctttacagatgtggttgatttaattaaaccagtagctgcattaaaaaggctatcggtaatggttcatttggctccagaattgcccacctgcgcaattggtgatcggaagaggttgatgcagataatactaaatgttgctgggaactccgttaagtttacaaaggagggtcatatttcagtttcagcatctatcgctaggccggattctctgagggacccatacgctcttgacttgcatccagttctctccgatgggtctttttacttggctgtgcaggtaaaagacaccggctgtggaatcagcccacaagatatgcctcacaccttcacaagatttgcacaccagcaaaatgctacaaacaaattgcgtagtggcaacggattgggtctggccctttccagaagatttgttgcccttatgcaagggaacatctggctggaaagcgaaggcgtagggaagggctgtaccgcaacgttctttgtgaagctaggactatctgatgcaaatctccggaggatggtgcctcctgtccagccaaaacatggaaatgcagatccagatgtatcatcaataatcaacggcgacatggcgattcttccgcgttgttaccagtcgatgatatgacaaggaactgcaggaggagcctgatcttgtgatatcatgatttgaaggtggattcacggggttaaggatgctgtgtgtagagattgctctccccgttttttttttttttttttttttgcagagccgtcgcgctctaggcaagcaggtgcgagtgcgatcgggcgaatccaaaatagcgggacgcctctactagggaattaacagcgcagggagagcggtgcggtgttttaagaaattataagttgtgagatgagtggcgtgtttgttagacgtcatttagggttttctagtgttgtactagtatagtcttggtagagagaagcagaaagaagctgatctgtacacgaggcaaatgaaatgctgatgactacttataaggcttctactgtttgtacagtattttttttgtctacataaattgcaacagtatagtatttttgtctctatgaattgaattgcaggtgtaacagttctttaatttaattcgaaa

SEQ ID NO: 62448 - DNA, 2850 bp, Zea Mays
cttttttcttagtcatttgacttgcagccaccaagttgtcgcatttcttcccactccggttctcatctgctgctccacgccgatccaactcggagtccccactccctcgaatcgcagctgctgcagcggagcaccagggtcttgcctcgatttgcggcgaaagcacgccgtttttctggtggtttgtagcgccgagcggttcttgattccggcgctggttttggtgctattgaggaggaggtgggggttttctttcgattggaggggtaaaagttgccgcctttcttgcattccactctgttcttggaccggatttcttctccctgcacgaactcgagctcgagctcggctcgggcttctccaacctccaacgcgtagtcccgtctagttttcttacatacaggtggcattttagtgcttgcttctttcaagaactgcagcgtcttgattactgctttacctctttgcggatggatggatgcgattgtattgagccactttggcaggccgatgatctcttaatgaagtaccagtacatatctgacttctttatcgcacttgcatacttctcgatccctttggagctgatatactttgttcagaagtcagctttcttcccctaccgatgggtactcatacagtttggtgcgttcatcgttctgtgtggggcaacccaccttataaacatgtggactttcactacgcataccaagaccatagctgtggtgctgacagtggcaaaagtggcgacagccgttgtgtcatgcataacagctctgatgcttgttcatataatccctgatctgctgagcgtgaaattgagggagaggttcctgaaagcgaaggccgaggagcttgatagggagatggggataataaggacacaagaggagacgggaagacatgtgcacatgctcacgcacgagataagaagcacacttgacaggcatactattctgagaactacacttgttgaaatgagaagaactcttggtttagcagagtgtgctgtgtggatgccatcacgctctggaacaacccttcagctctcacatgcactccataccaatgctccgcttggatcagttgttcctatcaatcttccgattgtagctaccatttttaatagtaatcgtgctgagagaataccacatacttccccattagcttcagtaaaggctcagaaaagcaagtacgtcccaccagaggttgttgctgtccgtgttccgctgctgcagcttacaaattttcaaataaatggttggcccgagctatctgcaaaagcctttgcagtgttggttttgatgcttcctccagacagtgcacgaaaatggcgaccccatgaactggagcttgttgaagttgttgctgaccaggtggcagttgcactgtcccatgctgccattttggaagagtccatgcaagcccgtgatctgctattggagcagaatattgctctggacgcagcacgccgagaggcagaaatggctatatgtgctcggaatgattttcttgctgtcatgaatcatgaaatgcggactcctatgcgggcaatcatttctttatcatccctcctgttagaaacaaaacttactgcagaacagcgggtgatgattgagactatactgaagagtagcgatcttctagaaactctttcaaatgatgttttggatatatccaagcttggagacggcagccttgagctggaaattgcaccttttaatctacatgccacctttacagatgtggttgatttaattaaaccagtagctgcattaaaaaggctatcggtaatggttcatttggctccagaattgcccacctgcgcaattggtgatcggaagaggttgatgcagataatactaaatgttgctgggaactccgttaagtttacaaaggagggtcatatttcagtttcagcatctatcgctaggccggattctctgagggacccatacgctcttgacttgcatccagttctctccgatgggtctttttacttggctgtgcaggtaaaagacaccggctgtggaatcagcccacaagatatgcctcacaccttcacaagatttgcacaccagcaaaatgctacaaacaaattgcgtagtggcaacggattgggtctggccctttccagaagatttgttgcccttatgcaagggaacatctggctggaaagcgaaggcgtagggaagggctgtaccgcaacgttctttgtgaagctaggactatctgatgcaaatctccggaggatggtgcctcctgtccagccaaaacatggaaatgcagatccagatgtatcatcaataatcaacggcgacatggcgattcttccgcgttgttaccagtcgatgatatgacaaggaactgcaggaggagcctgatcttgtgatatcatgatttgaaggtggattcacggggttaaggatgctgtgtgtagagattgctctccccgttttttttttttttttttttttgcagagccgtcgcgctctaggcaagcaggtgcgagtgcgatcgggcgaatccaaaatagcgggacgcctctactagggaattaacagcgcagggagagcggtgcggtgttttaagaaattataagttgtgagatgagtggcgtgtttgttagacgtcatttagggttttctagtgttgtactagtatagtcttggtagagagaagcagaaagaagctgatctgtacacgaggcaaatgaaatgctgatgactacttataaggcttctactgtttgtacagtattttttttgtctacataaattgcaacagtatagtatttttgtctctatgaattgaattgcaggtgtaacagttctttaatttaattcgaaa

SEQ ID NO: 62449 - DNA, 2830 bp, Zea Mays
cttttttcttagtcatttgacttgcagccaccaagttgtcgcatttcttcccactccggttctcatctgctgctccacgccgatccaactcggagtccccactccctcgaatcgcagctgctgcagcggagcaccagggtcttgcctcgatttgcggcgaaagcacgccgtttttctggtggtttgtagcgccgagcggttcttgattccggcgctggttttggtgctattgaggaggaggtgggggttttctttcgattggaggggtaaaagttgccgcctttcttgcattccactctgttcttggaccggatttcttctccctgcacgaactcgagctcgagctcggctcgggcttctccaacctccaacgcgtagtcccgtctagttttcttacatacaggtggcattttagtgcttgcttctttcaagaactgcagcgtcttgattactgctttacctctttgcggatggatggatgcgattgtattgagccactttggcaggccgatgatctcttaatgaagtaccagtacatatctgacttctttatcgcacttgcatacttctcgatccctttggagctgatatactttgttcagaagtcagctttcttcccctaccgatgggtactcatacagtttggtgcgttcatcgttctgtgtggggcaacccaccttataaacatgtggactttcactacgcataccaagaccatagctgtggtgctgacagtggcaaaagtggcgacagccgttgtgtcatgcataacagctctgatgcttgttcatataatccctgatctgctgagcgtgaaattgagggagaggttcctgaaagcgaaggccgaggagcttgatagggagatggggataataaggacacaagaggagacgggaagacatgtgcacatgctcacgcacgagataagaagcacacttgacaggcatactattctgagaactacacttgttgaaatgagaagaactcttggtttagcagagtgtgctgtgtggatgccatcacgctctggaacaacccttcagctctcacatgcactccataccaatgctccgcttggatcagttgttcctatcaatcttccgattgtagctaccatttttaatagtaatcgtgctgagagaataccacatacttccccattagcttcagtaaaggctcagaaaagcaagtacgtcccaccagaggttgttgctgtccgtgttccgctgctgcagcttacaaattttcaaataaatggttggcccgagctatctgcaaaagcctttgcagtgttggttttgatgcttcctccagacagtgcacgaaaatggcgaccccatgaactggagcttgttgaagttgttgctgaccaggtggcagttgcactgtcccatgctgccattttggaagagtccatgcaagcccgtgatctgctattggagcagaatattgctctggacgcagcacgccgagaggcagaaatggctatatgtgctcggaatgattttcttgctgtcatgaatcatgaaatgcggactcctatgcgggcaatcatttctttatcatccctcctgttagaaacaaaacttactgcagaacagcgggtgatgattgagactatactgaagagtagcgatcttctagaaactctttcaaatgatgttttggatatatccaagcttggagacggcagccttgagctggaaattgcaccttttaatctacatgccacctttacagatgtggttgatttaattaaaccagtagctgcattaaaaaggctatcggtaatggttcatttggctccagaattgcccacctgcgcaattggtgatcggaagaggttgatgcagataatactaaatgttgctgggaactccgttaagtttacaaaggagggtcatatttcagtttcagcatctatcgctaggccggattctctgagggacccatacgctcttgacttgcatccagttctctccgatgggtctttttacttggctgtgcaggtaaaagacaccggctgtggaatcagcccacaagatatgcctcacaccttcacaagatttgcacaccagcaaaatgctacaaacaaattgcgtagtggcaacggattgggtctggccctttccagaagggaacatctggctggaaagcgaaggcgtagggaagggctgtaccgcaacgttctttgtgaagctaggactatctgatgcaaatctccggaggatggtgcctcctgtccagccaaaacatggaaatgcagatccagatgtatcatcaataatcaacggcgacatggcgattcttccgcgttgttaccagtcgatgatatgacaaggaactgcaggaggagcctgatcttgtgatatcatgatttgaaggtggattcacggggttaaggatgctgtgtgtagagattgctctccccgttttttttttttttttttttttgcagagccgtcgcgctctaggcaagcaggtgcgagtgcgatcgggcgaatccaaaatagcgggacgcctctactagggaattaacagcgcagggagagcggtgcggtgttttaagaaattataagttgtgagatgagtggcgtgtttgttagacgtcatttagggttttctagtgttgtactagtatagtcttggtagagagaagcagaaagaagctgatctgtacacgaggcaaatgaaatgctgatgactacttataaggcttctactgtttgtacagtattttttttgtctacataaattgcaacagtatagtatttttgtctctatgaattgaattgcaggtgtaacagttctttaatttaattcgaaa

SEQ ID NO: 62450 - DNA, 2509 bp, Zea Mays
cttttttcttagtcatttgacttgcagccaccaagttgtcgcatttcttcccactccggttctcatctgctgctccacgccgatccaactcggagtccccactccctcgaatcgcagctgctgcagcggagcaccagggtcttgcctcgatttgcggcgaaagcacgccgtttttctggtggtttgtagcgccgagcggttcttgattccggcgctggttttggtgctattgaggaggaggtgggggttttctttcgattggaggggtaaaagttgccgcctttcttgcattccactctgttcttggaccggatttcttctccctgcacgaactcgagctcgagctcggctcgggcttctccaacctccaacgcgtagtcccgtctagttttcttacatacaggtggcattttagtgcttgcttctttcaagaactgcagcgtcttgattactgctttacctctttgcggatggatggatgcgattgtattgagccactttggcaggccgatgatctcttaatgaagtaccagtacatatctgacttctttatcgcacttgcatacttctcgatccctttggagctgatatactttgttcagaagtcagctttcttcccctaccgatgggtactcatacagtttggtgcgttcatcgttctgtgtggggcaacccaccttataaacatgtggactttcactacgcataccaagaccatagctgtggtgctgacagtggcaaaagtggcgacagccgttgtgtcatgcataacagctctgatgcttgttcatataatccctgatctgctgagcgtgaaattgagggagaggttcctgaaagcgaaggccgaggagcttgatagggagatggggataataaggacacaagaggagacgggaagacatgtgcacatgctcacgcacgagataagaagcacacttgacaggcatactattctgagaactacacttgttgaaatgagaagaactcttggtttagcagagtgtgctgtgtggatgccatcacgctctggaacaacccttcagctctcacatgcactccataccaatgctccgcttggatcagttgttcctatcaatcttccgattgtagctaccatttttaatagtaatcgtgctgagagaataccacatacttccccattagcttcagtaaaggctcagaaaagcaagtacgtcccaccagaggttgttgctgtccgtgttccgctgctgcagcttacaaattttcaaataaatggttggcccgagctatctgcaaaagcctttgcagtgttggttttgatgcttcctccagacagtgcacgaaaatggcgaccccatgaactggagcttgttgaagttgttgctgaccaggtggcagttgcactgtcccatgctgccattttggaagagtccatgcaagcccgtgatctgctattggagcagaatattgctctggacgcagcacgccgagaggcagaaatggctatatgtgctcggaatgattttcttgctgtcatgaatcatgaaatgcggactcctatgcgggcaatcatttctttatcatccctcctgttagaaacaaaacttactgcagaacagcgggtgatgattgagactatactgaagagtagcgatcttctagaaactctttcaaatgatgttttggatatatccaagcttggagacggcagccttgagctggaaattgcaccttttaatctacatgccacctttacagatgtggttgatttaattaaaccagtagctgcattaaaaaggctatcggtaatggttcatttggctccagaattgcccacctgcgcaattggtgatcggaagaggttgatgcagataatactaaatgttgctgggaactccgttaagtttacaaaggagggtcatatttcagtttcagcatctatcgctaggccggattctctgagggacccatacgctcttgacttgcatccagttctctccgatgggtctttttacttggctgtgcaggtaaaagacaccggctgtggaatcagcccacaagatatgcctcacaccttcacaagatttgcacaccagcaaaatgctacaaacaaattgcgtagtggcaacggattgggtctggccctttccagaagagccgtcgcgctctaggcaagcaggtgcgagtgcgatcgggcgaatccaaaatagcgggacgcctctactagggaattaacagcgcagggagagcggtgcggtgttttaagaaattataagttgtgagatgagtggcgtgtttgttagacgtcatttagggttttctagtgttgtactagtatagtcttggtagagagaagcagaaagaagctgatctgtacacgaggcaaatgaaatgctgatgactacttataaggcttctactgtttgtacagtattttttttgtctacataaattgcaacagtatagtatttttgtctctatgaattgaattgcaggtgtaacagttctttaatttaattcgaaa

SEQ ID NO: 62451 - DNA, 1789 bp, Zea Mays
cagcgcagttcctttattatcgttgtggcgcgcggcttgcttccacactcctgccgctgcagctggactcgtctccgatcctccaccaccaacttccattttccccaaccctccacgcccttctccaagaaacagagcgacgatagccgtgtcgacgagatcgacccagcagcaggatcgatcggtcagagacgatgatgatggattccgcggagcatcagaaggtgatggggatcgcgccggcggcggcgcccgcagcggaggcggggagaccgtgctgcgtcgagtgccgcaccaccgcgacgcccatgtggcgcggcgggccgacagggcccagggtgagccctcgctgttctctcgctctcgctctctccctccctccgcttctttctctctgttcctagcttgtcgtgctgcctggagccctggaggccgtcggactctcgatcataagcatggcgtgatcagagcagttgatcgccgccgatcacctcttcattcttggtgtggattaactgcagttcggattcatgtggtagtttggatttaggagacgggtgcggcgatgacggtgacatgcccggtgaatgattgggtattccaatccaatcataggctgggctccatcgattggccgccgccgccgtcgcatgcggagaaagctcgatcgagccgctttgagctgattggttccgctttgggtggttaggtgagctgttctaagcaaggcaagggaagggtgctaacctcccctcccacccgcggccagttccccgcccctagctgtgaacgcttttaaaaaaatgggttcctaatctccttttgtttatatatatcttattattgctccagcctattgtttagggacatccatgcatacatgtctccatcacagctgtttgttcctatccagtattaggatcaacagagcaagcaatcaaccagaaactaacttagaaaaaccagcgttttggatgagcaatcttgttaatttggtttggttgcagtcgctctgcaacgcgtgtgggatccggtacaggaagaagcggaggcaagagctaggtctcgatagcgccaagaaaccacaacaaaaccagcggccgccgccgccacagcagcagcagcagcaagaggatcactgtccggcaacaagtgcagtcgctgtcagagacaacaccaaaagcagcaggctccaagtggtgaagaaacggagggtcctgatgggagtggaggaggccgcagtcctgctcatggccttgtcctcctcatccagatccacgctgctacatggctaggaactcggcacatcacccaaaaaagggctgctcgttgtgtacatacatatacaggacgcacaaacacaaacaggccacccaggggttccaagccagcgatgtatctgttgggtctatgcttcgtcgccgaaggtcttcaagggagaagcggcttaaaatgtgtgagcaggtatcttcggactcgtatcagaaagggaaaagctacaaaggttgacacagcgccgaagctgtgaagcaggaaagcttcgacatgttcgcagaaaagggaaccgacttaaagatgaaaaggccatttagacctcgatagagtgctatagaattatcaccaaatgtaaaggacatgtatgtaattttgtatgggttgtaccccgtgcctataaataggtgaacagtacccccgtactgttcacgtgaacttggcatttgcttttgcgtcacacttgtattttcatctccttccaagccgaaggtacatttataattcgatattgtct

SEQ ID NO: 62452 - DNA, 1121 bp, Zea Mays
cacagcgcagttcctttattatcgttgtggcgcgcggcttgcttccacactcctgccgctgcagctggactcgtctccgatcctccaccaccaacttccattttccccaaccctccacgcccttctccaagaaacagagcgacgatagccgtgtcgacgagatcgacccagcagcaggatcgatcggtcagagacgatgatgatggattccgcggagcatcagaaggtgatggggatcgcgccggcggcggcgcccgcagcggaggcggggagaccgtgctgcgtcgagtgccgcaccaccgcgacgcccatgtggcgcggcgggccgacagggcccagtcgctctgcaacgcgtgtgggatccggtacaggaagaagcggaggcaagagctaggtctcgatagcgccaagaaaccacaacaaaaccagcggccgccgccgccacagcagcagcagcagcaagaggatcactgtccggcaacaagtgcagtcgctgtcagagacaacaccaaaagcagcaggctccaagtggtgaagaaacggagggtcctgatgggagtggaggaggccgcagtcctgctcatggccttgtcctcctcatccagatccacgctgctacatggctaggaactcggcacatcacccaaaaaagggctgctcgttgtgtacatacatatacaggacgcacaaacacaaacaggccacccaggggttccaagccagcgatgtatctgttgggtctatgcttcgtcgccgaaggtcttcaagggagaagcggcttaaaatgtgtgagcaggtatcttcggactcgtatcagaaagggaaaagctacaaaggttgacacagcgccgaagctgtgaagcaggaaagcttcgacatgttcgcagaaaagggaaccgacttaaagatgaaaaggccatttagacctcgatagagtgctatagaattatcaccaaatgtaaaggacatgtatgtaattttgtatgggttgtaccccgtgcctataaataggtgaacagtacccccgtactgttcacgtgaacttggcatttgcttttgcgtcacacttgtattttcatctccttccaagccgaaggtacatttataattcgatattgtct

SEQ ID NO: 62453 - DNA, 236 bp, Zea Mays
cacagcgcagttcctttattatcgttgtggcgcgcggcttgcttccacactcctgccgctgcagctggactcgtctccgatcctccaccaccaacttccattttccccaaccctccacgcccttctccaagaaacagagcgacgatagccgtgtcgacgagatcgacccagcagcaggatcgatcggtcagagacgatgatgatggattccgcggagcatcagaagtctcgctcct

SEQ ID NO: 62454 - DNA, 2112 bp, Zea Mays
cccggttggaacaccgcctccgcctatatagagctccccatctccgactccctcttacccttcccgttccccaattcgaaatcgagtcgggtactcgggtcggtcttgccgtgcgtgcgtggctgcgcgaaccagcccacgctcccactccccgcccgccaccgccgggtccctctagggttttgccgcgatgtcgctccggccgagcgagcgggagcagatgcggaagggcaactacaagcagacggtggacgccgaggagagccgccgccgccgcgagggccagatggtcgacatccgcaaggccaagcgagaggaaagcctccagaagaagcgccgcgatgggttccccgccgccggcgccgtgccgccgatgggccactccaccgcactccagcagaagctcgatggcttgccggcgatggtacaggccgttcactccaacgaccccactgtgcagcttgaggccaccacgcagttcaggaagctgctctccatagagcgtagtcccccaattgaagaggtgatcagcacaggagtcgtgccccgattcattgagttccttacacgtgaggaccatccacaactccagtttgaggctgcatgggcgctcaccaacattgcatcaggcacatcagagaacactaaggtggtggttgagagtggtgctgtgcccatctttgttaagctcctcaactccaatagcgaggatgttcgtgaacaggctgtatgggctttaggtaatgttgctggtgactccccaaagtgccgtgatctggtgctaggccatggtgggctattccccttgctgcaacagcttaatgagcatgctaagctctcgatgctgaggaatgccacatggacactatcaaacttctgccgtgggaagccacaaccgaactttgatcaggtcaaaccagcattgccagcacttcagcaacttatccactctcaggatgaggaggtcctaactgatgcctgttgggctctatcatacctatctgatgggactaatgacaaaatccaagctgttattgaatctggcgtgttccctcgccttgtggaacttctgatgcatccttcagcctctgtactgattccagctctgcgcacggtgggtaacatcgtaactggggacgacatgcagactcagtgtgtcattgacaatcaagcacttccatgccttttgaacctactgaccaccaaccacaagaaaagcatcaagaaagaagcatgctggacaatctcaaacatcacagctggtaacagggaacagattcaggccgtgattaatgcaaacataattgcacctctggtgcaacttctgcaaactgctgaatttgacatcaagaaagaagcagcctgggcaatttcaaatgccacttctggtggcacacatgatcagatcaagtaccttgttgcccagggttgcattaagccactctgtgatctgcttgtttgcccggatcccagaattgtaacagtttgcttggagggtcttgagaacatcctgaaagttggcgaggcagagaaaaatcttggtgcaggcgatgtcaatgtttacgcacagatgattgatgatgctgagggcctggacaagattgagaacctacagagccatgacaacactgagatatatgagaaggctgtcaagatgctcgaatcttactggctagaggaggaagatgatgccatgccctctggcgacaatccccagaatggcttcaactttgggaaccagccctctgttccatcaggtggattcaacttcggctgaagttcatggcctgatgattggttatgcattgatggtggctctgtagatttttgaaaatctgattctagctgtgagctaaaatatgctgcaagccgacggttgtggagaagttaaaatatgttggttgaaataattgtagattatgtaaagcatgatgtctagataatatggatgacatgaacatgcaaaaattggggtacaatgtgattctaaattgaactattgtaatatgtatatttttagcaatctattctgttgttgtatctattttagttgagatttagatttttttggtaaatgtagttcagaaagctaaaccaaacacatatttagat

SEQ ID NO: 62455 - DNA, 1930 bp, Zea Mays
gctacctcattgcttcgaagttcgaaaaacgattgctagaaacatggttttttcaatgatagacgcagatcgagcgctatttaatttgggacctaacaacgtacggcagagctactatagctccctgtgaaacacatgggaatttagaagcacacgattaagatctctcggagaactctagctagctagctaccattctaatctctactgctaattaagtacctattgtaggcgttcacagccaaccgtggtgcacgttctgccacatccaaaccgtccaacccgcatccaacgccgctgccgcatcccgcgtcgctcccccactcgtccctgccgcagcccccgcgatccccttcccacgcatggcgttcctgccgcagcccccgcggtcctttcggtgttctcgcttctagcgacgacggcggcggcccagggaaggtaccgcgcggtgttcagtttcggggactcgctggtggacgccggcaacctggtcacggagggcatcccggactacctcgccaccgcgcgcccgccctacggccagacctacttcggctaccccaccggcaggtgctccgacggccgcctcgtcgtcgatttcatcgcgcaggagttgggcctcccgctgccgccgccgtccaaggccaagaacgccagcttcgcacagggcgccaacttcgccatcaccggcgccaccgcgctcgacaccgacttcttccggaagcgagggctcggcagcaccgtgtggaactccggctccctccgcacgcaaatccagtggctgcgagacctcaagccatcgctctgcagctccgcgcaaggatgcaaggagttcttcgctgagtgcctgttcgtcgtaggcgaattcggtgggaacgactacaacgccccgctgttcgccggcaaggacctcagggaggcatacaagctgacgccccacgtgatccgagccatctccgatggagtcgaacaactgattgccgagggggcaaaggatttgatcgtgcccggagtgatgccatcagggtgctttccggtctacctgaccatgtacgttgaccccaaggaagggcatggctcgcgcaccagctgcctcaagcggttcaacacttgaattgaagtgcatcgaggttcctcaggcatggctcgcgcacagctcacatgaaacgtttggtcggggagcacgacagctacttacgtggcacgacagggggcgcctgcgtgccaatcgccctcagcggctcgaggttcctcgcacttcaattcacaggtttgggcggattggcaggttggtcttgcgaattgcaaccagcagagatgatattgaagtcgtggctgtgaatgaccctttcattgatgctaagtacatggtgaagacaattacctatcctctgcaatccaactatatgtagagatcgtcatcaaaagaaacctcaggctttgtattcaacaggacctttacaaacgactaacttagatcggcgagagtagagaataaggcaaggatctttgagcagaatgccactgatagtgagtgcaaggtcgatcctaaagtgctctccaagctatatgatccgtgagtgatgccacagaccaaggatgtcgaagttgagtacctcctgcgctgccttgactaatcaccgattagctatagctgtaaattttatgtatgcatggtttcagttgcgctcgaaccaattgtcttgaccttgaatggacattttgatgtttatttcatctgatgtgtcatgtttcatgacgtagactttcgtttcttgtgattgatttatagtgaacctgtaagatgtaaaataacctttatgacagaaccagctgcaagaatagagtattttgaggaacctttgttgaagtaaatgtaatcgagtttcctagcaatcttattcttgctggtatcatatttttttgagct

SEQ ID NO: 62456 - DNA, 1823 bp, Zea Mays
gctacctcattgcttcgaagttcgaaaaacgattgctagaaacatggttttttcaatgatagacgcagatcgagcgctatttaatttgggacctaacaacgtacggcagagctactatagctccctgtgaaacacatgggaatttagaagcacacgattaagatctctcggagaactctagctagctagctaccattctaatctctactgctaattaagtacctattgtaggcgttcacagccaaccgtggtgcacgttctgccacatccaaaccgtccaacccgcatccaacgccgctgccgcatcccgcgtcgctcccccactcgtccctgccgcagcccccgcgatccccttcccacgcatggcgttcctgccgcagcccccgcggtcctttcggtgttctcgcttctagcgacgacggcggcggcccagggaaggtaccgcgcggtgttcagtttcggggactcgctggtggacgccggcaacctggtcacggagggcatcccggactacctcgccaccgcgcgcccgccctacggccagacctacttcggctaccccaccggcaggtgctccgacggccgcctcgtcgtcgatttcatcgcgcaggagttgggcctcccgctgccgccgccgtccaaggccaagaacgccagcttcgcacagggcgccaacttcgccatcaccggcgccaccgcgctcgacaccgacttcttccggaagcgagggctcggcagcaccgtgtggaactccggctccctccgcacgcaaatccagtggctgcgagacctcaagccatcgctctgcagctccgcgcaaggcgaattcggtgggaacgactacaacgccccgctgttcgccggcaaggacctcagggaggcatacaagctgacgccccacgtgatccgagccatctccgatggagtcgaacaactgattgccgagggggcaaaggatttgatcgtgcccggagtgatgccatcagggtgctttccggtctacctgaccatgtacgttgaccccaaggaagggcatggctcgcgcaccactcacatgaaacgtttggtcggggagcacgacagctacttacgtggcacgacagggggcgcctgcgtgccaatcgccctcagcggctcgaggttcctcgcacttcaattcacaggtttgggcggattggcaggttggtcttgcgaattgcaaccagcagagatgatattgaagtcgtggctgtgaatgaccctttcattgatgctaagtacatggtgaagacaattacctatcctctgcaatccaactatatgtagagatcgtcatcaaaagaaacctcaggctttgtattcaacaggacctttacaaacgactaacttagatcggcgagagtagagaataaggcaaggatctttgagcagaatgccactgatagtgagtgcaaggtcgatcctaaagtgctctccaagctatatgatccgtgagtgatgccacagaccaaggatgtcgaagttgagtacctcctgcgctgccttgactaatcaccgattagctatagctgtaaattttatgtatgcatggtttcagttgcgctcgaaccaattgtcttgaccttgaatggacattttgatgtttatttcatctgatgtgtcatgtttcatgacgtagactttcgtttcttgtgattgatttatagtgaacctgtaagatgtaaaataacctttatgacagaaccagctgcaagaatagagtattttgaggaacctttgttgaagtaaatgtaatcgagtttcctagcaatcttattcttgctggtatcatatttttttgagct

SEQ ID NO: 62457 - DNA, 1454 bp, Zea Mays
gctacctcattgcttcgaagttcgaaaaacgattgctagaaacatggttttttcaatgatagacgcagatcgagcgctatttaatttgggacctaacaacgtacggcagagctactatagctccctgtgaaacacatgggaatttagaagcacacgattaagatctctcggagaactctagctagctagctaccattctaatctctactgctaattaagtacctattgtaggcgttcacagccaaccgtggtgcacgttctgccacatccaaaccgtccaacccgcatccaacgccgctgccgcatcccgcgtcgctcccccactcgtccctgccgcagcccccgcgatccccttcccacgcatggcgttcctgccgcagcccccgcggtcctttcggtgttctcgcttctagcgacgacggcggcggcccagggaaggtaccgcgcggtgttcagtttcggggactcgctggtggacgccggcaacctggtcacggagggcatcccggactacctcgccaccgcgcgcccgccctacggccagacctacttcggctaccccaccggcaggtgctccgacggccgcctcgtcgtcgatttcatcgcgcaggagttgggcctcccgctgccgccgccgtccaaggccaagaacgccagcttcgcacagggcgccaacttcgccatcaccggcgccaccgcgctcgacaccgacttcttccggaagcgagggctcggcagcaccgtgtggaactccggctccctccgcacgcaaatccagtggctgcgagacctcaagccatcgctctgcagctccgcgcaaggcacacgcgaattcggtgggaacgactacaacgccccgctgttcgccggcaaggacctcagggaggcatacaagctgacgccccacgtgatccgagccatctccgatggagtcgaacaactgattgccgagggggcaaaggatttgatcgtgcccggagtgatgccatcagggtgctttccggtctacctgaccatgtacgttgaccccaaggaagggcatggctcgcgcaccagctgcctcaagcggttcaacacttgaattgaagtgcatcgaggttcctcaggcatggctcgcgcacagctcacatgaaacgtttggtcggggagcacgacagctacttacgtggcacgacagggggcgcctgcgtgccaatcgccctcagcggctcgaggttcctcgcacttcaattcacaggtttgggcggattggcaggttggtcttgcgaattgcaaccagcagagatgatattgaagtcgtggctgtgaatgaccctttcattgatgctaagtacatggcctatatgttcaagtatgattccactcatggcccgtttaaaggttctattcgtgtcgtggatgattcaaccctcgagatcaatggatgattcaaccctaaaccctcgagactattt

SEQ ID NO: 62458 - DNA, 1890 bp, Zea Mays
catccctgcggcagcccacctgtcaggcgagcccctctctcgggaatcctcccaaaattccccaattcacaggctgcctcgcagccgcaggccaccttcgcgcgcccacgtcgccgccataccatacccgccggcagccgccccgtcttaagatttccctcctctcgtctcatcgctcgctgtccctcagagacccgacagccagcatactcctccctcccgcaactgctacctttgcaccgtgggagcttcccgtttcttggatctctggacggccggcgctgggcatgatggatggaggccaagatggcccggaaagctcagtcgacataagcatggaaagaatccagattaaataagcaaggcctctaggtgtttaaaagaaatctatgtatggactatggagtcatttttcctgaagcaatgacagatcacacaaaccgagctgatcttgtttgaacacaagttcaacttctaaaggatgccctaagctaaaagcaaaactgtttacagattcctgaaggatgaaacccagtatttgaagtatcacaacatggacctagaagaaggcaatgtcaccattagggtcaaaagggcaaaagcaacaaattggcccagggtgatgtcaaagtttttgcttgattggtaccttgagaagaagaagggaatgccacccaagaccaagttcaagaagatccaccacgtttggtgcacatctgctgtaaatactaaattcagaacaacttactctgttgatcaggtgcatcgccattttagacgtttcaaggagatctggatcattgtgactcggtatgtcaatgagactgggagcaggtttaacaataaacacaaaatgcttatacttcctcctgccactatggctagtttaccagtagctgagcgtgctattcttgttaaacccattccattcttcgaccatctgctacatctcttcaatgatggccagctggatgcagagtgcatgagagaccctatcatgactgacgattctaatgaggaattggaggcccagattgcgttgaacattattgcctcaggtgcagatacaagggaccaagatggggaagacctagataatataggattggagggtgaagataaccatcatgaggttgcagcaagtagtggtgaggtgccttgtgaagtgatgtctgatactagtccaccatccgcgcagccatccgggtcctttgctgagagcacaatggctgctctgaagcctagagcaaagaagatgaagatcatcagcaaaacgaaactaagtccaaaggcgcaggctgctctgccacgtgatggaagaaggaacgtggatgcattgaacagcaccttagtagggatccatgacagtgctcgaaaacctattcgggcagcgccaacatcagacccgaatgctcctctgtggaacatgctaaaagagattccactgactcaacctgataggctatctgtagggatgtatctttgtaagccagagtctgaagtgcatcgaagctttttcatgaacatgggcaaggagtaccttgaagcatgggcccgtaagttcttggctggagaggagcatggaaccgtatagtttgatagctgaatccagattgagcttattccctgaagcggcgcatagactgtcgtttgtcaggccttgttattgctgccagtttatgttctataattgatgcatatatatatgttgtgcttgaacagttggtaaataccatttttgttagctgttatgtaacttaaaatgtgtggccaagttagttcgcctttcggccttgtaagcttttcaatgtatatttatttaggtctgatcctcccccaggttgtagatgataacaatgtcatatatttgtggagatctagttctgtttt

SEQ ID NO: 62459 - DNA, 704 bp, Zea Mays
cttttctgctgggaactttacaaaaggacttctcatgtgctggtgtgatgtacctctgccaattcatggagcaaaatggtggaaagcttccggatcgcctggaaggctccaaaatgacgacaaaacgttttggaggccaaaagttcttacagggattgcaactggcaatagaatcagggaattgtggcaaggacaccattgatatgctgttgaaagatgctgattcctctgataaaataaacaggacgtcctccatcaaatctgccagctaattattatctggtcgatactgattcgatgcccagtcggaatatttatagggttttcattacaagtaaatatgtaaatagctgcagccttttgcttgcaggaagtgcattttgtttaatttgtaagcttcgcaaaatgctagtagttgctactacgtaggaacctagtcatgctttaattttgtggtttcgctttgtgaaacgagaatgcaacacgtaataaacgaaaaacaccggttggctttacaatgtggacttgtaacttaaggccgtttggatcttgtcatttttagaggaattggaatctactgtgtagattatttggcttgaaatttgatgttccaccactttgtaaaattcaaatacaagtctatctcattcctcataggatagagggatggaaatgatttttatgtatcacttgactgtttctac

SEQ ID NO: 62460 - DNA, 1188 bp, Zea Mays
aaagaattagttgccataaaacaacctgatcaacagacaagaacgccctgctcagagatggtgcgccgccttgccatggagatccggcaacttgctaattcacaaccaataactgttctcaatggaggttctggacaatcaggagtatcaggcctgatagtacctgcagcaactgttggagcactaggttatggttatatgtggtggaaagggatctcgttctcagacctaatgtatgtcaccaagcgcaacatggcaaatgctgtttcaagcatgactaaacatttggagcaagtgcaaagttctcttgctgctgctaaaaggcatttgacacagcgcattgaaaagttggacgataaattggatcagcagaaggctctatctggacaaataagagatgatgtcactgatgcacgtctgaagcttgagaatattggttcagaaatcaagaacatcaaagaattggtttggggtctggatgggaaaattgattcaatggaagctaaacaggacttctcatgtgctggtgtgatgtacctctgccaattcatggagcaaaatggtggaaagcttccggatcgcctggaaggctccaaaatgacgacaaaacgttttggaggccaaaagttcttacagggattgcaactggcaatagaatcagggaattgtggcaaggacaccattgatatgctgttgaaagatgctgattcctctgataaaataaacaggacgtcctccatcaaatctgccagctaattattatctggtcgatactgattcgatgcccagtcggaatatttatagggttttcattacaagtaaatatgtaaatagctgcagccttttgcttgcaggaagtgcattttgtttaatttgtaagcttcgcaaaatgctagtagttgctactacgtaggaacctagtcatgctttaattttgtggtttcgctttgtgaaacgagaatgcaacacgtaataaacgaaaaacaccggttggctttacaatgtggacttgtaacttaaggccgtttggatcttgtcatttttagaggaattggaatctactgtgtagattatttggcttgaaatttgatgttccaccactttgtaaaattcaaatacaagtctatctcattcctcataggatagagggatggaaatgatttttatgtatcacttgactgtttctac

SEQ ID NO: 62461 - DNA, 1486 bp, Zea Mays
aatccttatcagggaaataactatacgcaaagataggaaggcaaggctcgacgtacgccgctgaacgggagagcagcacatctcggttgatttgaagatcgaacgcacggcaggctgcgggtttcctctgccgctacctccgttttacgcggccggcgcgcagccatggcgatggtgcaggcgggcatgggcctcacccgggtcgtggtcctcgttggcgccggcgtcgccggctccgtcgttctccgcaacggtcgcctcgccgagatcctcggggatactcgacaaggggaacaaggggaaggacggaggagggggagacggggaaaccgatctcaacgaggctcttacctcgcaggtgcgccgccttgccatggagatccggcaacttgctaattcacaaccaataactgttctcaatggaggttctggacaatcaggagtatcaggcctgatagtacctgcagcaactgttggagcactaggttatggttatatgtggtggaaagggatctcgttctcagacctaatgtatgtcaccaagcgcaacatggcaaatgctgtttcaagcatgactaaacatttggagcaagtgcaaagttctcttgctgctgctaaaaggcatttgacacagcgcattgaaaagttggacgataaattggatcagcagaaggctctatctggacaaataagagatgatgtcactgatgcacgtctgaagcttgagaatattggttcagaaatcaagaacatcaaagaattggtttggggtctggatgggaaaattgattcaatggaagctaaacaggacttctcatgtgctggtgtgatgtacctctgccaattcatggagcaaaatggtggaaagcttccggatcgcctggaaggctccaaaatgacgacaaaacgttttggaggccaaaagttcttacagggattgcaactggcaatagaatcagggaattgtggcaaggacaccattgatatgctgttgaaagatgctgattcctctgataaaataaacaggacgtcctccatcaaatctgccagctaattattatctggtcgatactgattcgatgcccagtcggaatatttatagggttttcattacaagtaaatatgtaaatagctgcagccttttgcttgcaggaagtgcattttgtttaatttgtaagcttcgcaaaatgctagtagttgctactacgtaggaacctagtcatgctttaattttgtggtttcgctttgtgaaacgagaatgcaacacgtaataaacgaaaaacaccggttggctttacaatgtggacttgtaacttaaggccgtttggatcttgtcatttttagaggaattggaatctactgtgtagattatttggcttgaaatttgatgttccaccactttgtaaaattcaaatacaagtctatctcattcctcataggatagagggatggaaatgatttttatgtatcacttgactgtttctac

SEQ ID NO: 62462 - DNA, 1943 bp, Zea Mays
caggatctcaggccagccccgtccggccactacagcggttggctgccaccgcggctaggccctagccgtccatcatcagctcgacacccagaaagattcattgatggatttaagttttcatgttccgacttcgaatactcaattcattggagatgagcatcgtacttcagcacaggctatctcggttgaaattgatggtggtggctcctcagagatggcagttgtcacatttgacggaattgcaattcttacaccgaggggtcggtacagtgtggagcttcatcagtcattcttgcgactccaaggacaagctaatgatttcaaaatccagtatagtagtattctccgcctatttgttttaccaaagtttgagacagaggcagttgttgaaagggaactgacattaagtggggagattttggctgagaagtacaaggataggcttgagagctcttataggggtctaatacatgaggtattctccaaggtccttcgtggcctgtctagtgctaaagtgacacggccaagtacattccgcagttgcctagatggatatgcagtcaaatcatcacttaaagctgaagatggtttgctttatccactcgaaaagggcttcttctttctgccaaagcccccaacactaattcctcatgaagagattgagtatgttgagttcgagcgtcatggtgctggaggtgcaagtatatcatctcattactttgaccttttggtcaagctgacaaatgatcaagaacttctcttcagaaacatccaaaggaatgaataccataacctcttcaacttcatcagcggtaagcatttgaaaattctgaatcttggagatggacaaggtagaactagtggtgttactgctgttcttcagagcactgatgatgattctgttgatccacatctggagcggataaaaaatcaggccggtaatgaggaaagtgatgaagaggatgaagattttgtggcagacaaggatgatagtggatctccaaccgatgattctgatgcagaaggctctgatgctagtatgagtggaggagaaaaggaggtaacaaacttcttccagaaaccttccaagaaggaagctagtagctcaaagccgcctgtgaagaagaagcagaagagtgggccagatgaaggttctcaaaaaaagaagccaaagaagaagaaagatcccaatgcccctaagagagctatagctccattcatgtacttctcaaaggctgagcgagctaatatcaagagcagcaatcctgaactggcgaccacagagattgcaaagaagctcggagaaaggtggcaaaagatgacagcggaggagaggcagccatatgtggagcagtctcaggtcgacaagcaacgctatgcagaagagtctgcagcctaccgtggtgcagccgctcagcagggctctggtgctggatcggaatgaaggtttaatcgtctcgacagttaacttgcaaggctggatgattgagtcgtcagaataaagctggaatacccaaaaacctaagctgaatgtcatcgtttgacctgttgggttgttccggaattcaaccaggattcattctagttcatcaatgcttatattaattaggcaagcaatctggtctggaatcgatcgaggccgttccctggaaccgaacatacccctaagcaaatcctgccaggtaggacaaaatgtagcagcaggtttaaacaaatttcagagaagtacaagtattttttgcataagaagtacacaattacaactgttttgacatgtatcatagaactacaattaattcccttttggcgccatgaaaatacagcacctttgatacttgactaatactatgagaatagctttagttacgtggtatccagtgtcaatagttgtagttatctgatacatgactatagtattagttacatgaaatttacttataatt

SEQ ID NO: 62463 - DNA, 1981 bp, Zea Mays
cgccgctgcccccagccccctgcgccagcatgcagccggccctgcaggatctcaggccagccccgtccggccactacagcggttggctgccaccgcggctaggccctagccgtccatcatcagctcgacacccagaaagattcattgatggatttaagttttcatgttccgacttcgaatactcaattcattggagatgagcatcgtacttcagcacagatgttatggcaggctatctcggttgaaattgatggtggtggctcctcagagatggcagttgtcacatttgacggaattgcaattcttacaccgaggggtcggtacagtgtggagcttcatcagtcattcttgcgactccaaggacaagctaatgatttcaaaatccagtatagtagtattctccgcctatttgttttaccaaagtttgagacagaggcagttgttgaaagggaactgacattaagtggggagattttggctgagaagtacaaggataggcttgagagctcttataggggtctaatacatgaggtattctccaaggtccttcgtggcctgtctagtgctaaagtgacacggccaagtacattccgcagttgcctagatggatatgcagtcaaatcatcacttaaagctgaagatggtttgctttatccactcgaaaagggcttcttctttctgccaaagcccccaacactaattcctcatgaagagattgagtatgttgagttcgagcgtcatggtgctggaggtgcaagtatatcatctcattactttgaccttttggtcaagctgacaaatgatcaagaacttctcttcagaaacatccaaaggaatgaataccataacctcttcaacttcatcagcggtaagcatttgaaaattctgaatcttggagatggacaaggtagaactagtggtgttactgctgttcttcagagcactgatgatgattctgttgatccacatctggagcggataaaaaatcaggccggtaatgaggaaagtgatgaagaggatgaagattttgtggcagacaaggatgatagtggatctccaaccgatgattctgatgcagaaggctctgatgctagtatgagtggaggagaaaaggagaaaccttccaagaaggaagctagtagctcaaagccgcctgtgaagaagaagcagaagagtgggccagatgaaggttctcaaaaaaagaagccaaagaagaagaaagatcccaatgcccctaagagagctatagctccattcatgtacttctcaaaggctgagcgagctaatatcaagagcagcaatcctgaactggcgaccacagagattgcaaagaagctcggagaaaggtggcaaaagatgacagcggaggagaggcagccatatgtggagcagtctcaggtcgacaagcaacgctatgcagaagagtctgcagcctaccgtggtgcagccgctcagcagggctctggtgctggatcggaatgaaggtttaatcgtctcgacagttaacttgcaaggctggatgattgagtcgtcagaataaagctggaatacccaaaaacctaagctgaatgtcatcgtttgacctgttgggttgttccggaattcaaccaggattcattctagttcatcaatgcttatattaattaggcaagcaatctggtctggaatcgatcgaggccgttccctggaaccgaacatacccctaagcaaatcctgccaggtaggacaaaatgtagcagcaggtttaaacaaatttcagagaagtacaagtattttttgcataagaagtacacaattacaactgttttgacatgtatcatagaactacaattaattcccttttggcgccatgaaaatacagcacctttgatacttgactaatactatgagaatagctttagttacgtggtatccagtgtcaatagttgtagttatctgatacatgactatagtattagttacatgaaatttacttataatt

SEQ ID NO: 62464 - DNA, 2111 bp, Zea Mays
ccttccctctctcttctgcgccgctcccagcccagcctacagccgccgctgcccccagccccctgcgccagcatgcagccggccctgcaggatctcaggccagccccgtccggccactacagcggttggctgccaccgcggctaggccctagccgtccatcatcagctcgacacccagaaagattcattgatggatttaagttttcatgttccgacttcgaatactcaattcattggagatgagcatcgtacttcagcacagatgttatggcaggctatctcggttgaaattgatggtggtggctcctcagagatggcagttgtcacatttgacggaattgcaattcttacaccgaggggtcggtacagtgtggagcttcatcagtcattcttgcgactccaaggacaagctaatgatttcaaaatccagtatagtagtattctccgcctatttgttttaccaaagtcacacaatccacatacctttgtggttatcacacttgatccaccaattcgcaaaggacaaactttgtatcctcacattgttattcagtttgagacagaggcagttgttgaaagggaactgacattaagtggggagattttggctgagaagtacaaggataggcttgagagctcttataggggtctaatacatgaggtattctccaaggtccttcgtggcctgtctagtgctaaagtgacacggccaagtacattccgcagttgcctagatggatatgcagtcaaatcatcacttaaagctgaagatggtttgctttatccactcgaaaagggcttcttctttctgccaaagcccccaacactaattcctcatgaagagattgagtatgttgagttcgagcgtcatggtgctggaggtgcaagtatatcatctcattactttgaccttttggtcaagctgacaaatgatcaagaacttctcttcagaaacatccaaaggaatgaataccataacctcttcaacttcatcagcggtaagcatttgaaaattctgaatcttggagatggacaaggtagaactagtggtgttactgctgttcttcagagcactgatgatgattctgttgatccacatctggagcggataaaaaatcaggccggtaatgaggaaagtgatgaagaggatgaagattttgtggcagacaaggatgatagtggatctccaaccgatgattctgatgcagaaggctctgatgctagtatgagtggaggagaaaaggagaaaccttccaagaaggaagctagtagctcaaagccgcctgtgaagaagaagcagaagagtgggccagatgaaggttctcaaaaaaagaagccaaagaagaagaaagatcccaatgcccctaagagagctatagctccattcatgtacttctcaaaggctgagcgagctaatatcaagagcagcaatcctgaactggcgaccacagagattgcaaagaagctcggagaaaggtggcaaaagatgacagcggaggagaggcagccatatgtggagcagtctcaggtcgacaagcaacgctatgcagaagagtctgcagcctaccgtggtgcagccgctcagcagggctctggtgctggatcggaatgaaggtttaatcgtctcgacagttaacttgcaaggctggatgattgagtcgtcagaataaagctggaatacccaaaaacctaagctgaatgtcatcgtttgacctgttgggttgttccggaattcaaccaggattcattctagttcatcaatgcttatattaattaggcaagcaatctggtctggaatcgatcgaggccgttccctggaaccgaacatacccctaagcaaatcctgccaggtaggacaaaatgtagcagcaggtttaaacaaatttcagagaagtacaagtattttttgcataagaagtacacaattacaactgttttgacatgtatcatagaactacaattaattcccttttggcgccatgaaaatacagcacctttgatacttgactaatactatgagaatagctttagttacgtggtatccagtgtcaatagttgtagttatctgatacatgactatagtattagttacatgaaatttacttataatt

SEQ ID NO: 62465 - DNA, 2074 bp, Zea Mays
ccttccctctctcttctgcgccgctcccagcccagcctacagccgccgctgcccccagccccctgcgccagcatgcagccggccctgcaggatctcaggccagccccgtccggccactacagcggttggctgccaccgcggctaggccctagccgtccatcatcagctcgacacccagaaagattcattgatggatttaagttttcatgttccgacttcgaatactcaattcattggagatgagcatcgtacttcagcacagatgttatggcaggctatctcggttgaaattgatggtggtggctcctcagagatggcagttgtcacatttgacggaattgcaattcttacaccgaggggtcggtacagtgtggagcttcatcagtcattcttgcgactccaaggacaagctaatgatttcaaaatccatcacacaatccacatacctttgtggttatcacacttgatccaccaattcgcaaaggacaaactttgtatcctcacattgttattcagtttgagacagaggcagttgttgaaagggaactgacattaagtggggagattttggctgagaagtacaaggataggcttgagagctcttataggggtctaatacatgaggtattctccaaggtccttcgtggcctgtctagtgctaaagtgacacggccaagtacattccgcagttgcctagatggatatgcagtcaaatcatcacttaaagctgaagatggtttgctttatccactcgaaaagggcttcttctttctgccaaagcccccaacactaattcctcatgaagagattgagtatgttgagttcgagcgtcatggtgctggaggtgcaagtatatcatctcattactttgaccttttggtcaagctgacaaatgatcaagaacttctcttcagaaacatccaaaggaatgaataccataacctcttcaacttcatcagcggtaagcatttgaaaattctgaatcttggagatggacaaggtagaactagtggtgttactgctgttcttcagagcactgatgatgattctgttgatccacatctggagcggataaaaaatcaggccggtaatgaggaaagtgatgaagaggatgaagattttgtggcagacaaggatgatagtggatctccaaccgatgattctgatgcagaaggctctgatgctagtatgagtggaggagaaaaggagaaaccttccaagaaggaagctagtagctcaaagccgcctgtgaagaagaagcagaagagtgggccagatgaaggttctcaaaaaaagaagccaaagaagaagaaagatcccaatgcccctaagagagctatagctccattcatgtacttctcaaaggctgagcgagctaatatcaagagcagcaatcctgaactggcgaccacagagattgcaaagaagctcggagaaaggtggcaaaagatgacagcggaggagaggcagccatatgtggagcagtctcaggtcgacaagcaacgctatgcagaagagtctgcagcctaccgtggtgcagccgctcagcagggctctggtgctggatcggaatgaaggtttaatcgtctcgacagttaacttgcaaggctggatgattgagtcgtcagaataaagctggaatacccaaaaacctaagctgaatgtcatcgtttgacctgttgggttgttccggaattcaaccaggattcattctagttcatcaatgcttatattaattaggcaagcaatctggtctggaatcgatcgaggccgttccctggaaccgaacatacccctaagcaaatcctgccaggtaggacaaaatgtagcagcaggtttaaacaaatttcagagaagtacaagtattttttgcataagaagtacacaattacaactgttttgacatgtatcatagaactacaattaattcccttttggcgccatgaaaatacagcacctttgatacttgactaatactatgagaatagctttagttacgtggtatccagtgtcaatagttgtagttatctgatacatgactatagtattagttacatgaaatttacttataatt

SEQ ID NO: 62466 - DNA, 2113 bp, Zea Mays
cagcccccttccctctctcttctgcgccgctcccagcccagcctacagccgccgctgcccccagccccctgcgccagcatgcagccggccctgcaggatctcaggccagccccgtccggccactacagcggttggctgccaccgcggctaggccctagccgtccatcatcagctcgacacccagattcattgatggatttaagttttcatgttccgacttcgaatactcaattcattggagatgagcatcgtacttcagcacagatgttatggcaggctatctcggttgaaattgatggtggtggctcctcagagatggcagttgtcacatttgacggaattgcaattcttacaccgaggggtcggtacagtgtggagcttcatcagtcattcttgcgactccaaggacaagctaatgatttcaaaatccagtatagtagtattctccgcctatttgttttaccaaagtcacacaatccacatacctttgtggttatcacacttgatccaccaattcgcaaaggacaaactttgtatcctcacattgttattcagtttgagacagaggcagttgttgaaagggaactgacattaagtggggagattttggctgagaagtacaaggataggcttgagagctcttataggggtctaatacatgaggtattctccaaggtccttcgtggcctgtctagtgctaaagtgacacggccaagtacattccgcagttgcctagatggatatgcagtcaaatcatcacttaaagctgaagatggtttgctttatccactcgaaaagggcttcttctttctgccaaagcccccaacactaattcctcatgaagagattgagtatgttgagttcgagcgtcatggtgctggaggtgcaagtatatcatctcattactttgaccttttggtcaagctgacaaatgatcaagaacttctcttcagaaacatccaaaggaatgaataccataacctcttcaacttcatcagcggtaagcatttgaaaattctgaatcttggagatggacaaggtagaactagtggtgttactgctgttcttcagagcactgatgatgattctgttgatccacatctggagcggataaaaaatcaggccggtaatgaggaaagtgatgaagaggatgaagattttgtggcagacaaggatgatagtggatctccaaccgatgattctgatgcagaaggctctgatgctagtatgagtggaggagaaaaggagaaaccttccaagaaggaagctagtagctcaaagccgcctgtgaagaagaagcagaagagtgggccagatgaaggttctcaaaaaaagaagccaaagaagaagaaagatcccaatgcccctaagagagctatagctccattcatgtacttctcaaaggctgagcgagctaatatcaagagcagcaatcctgaactggcgaccacagagattgcaaagaagctcggagaaaggtggcaaaagatgacagcggaggagaggcagccatatgtggagcagtctcaggtcgacaagcaacgctatgcagaagagtctgcagcctaccgtggtgcagccgctcagcagggctctggtgctggatcggaatgaaggtttaatcgtctcgacagttaacttgcaaggctggatgattgagtcgtcagaataaagctggaatacccaaaaacctaagctgaatgtcatcgtttgacctgttgggttgttccggaattcaaccaggattcattctagttcatcaatgcttatattaattaggcaagcaatctggtctggaatcgatcgaggccgttccctggaaccgaacatacccctaagcaaatcctgccaggtaggacaaaatgtagcagcaggtttaaacaaatttcagagaagtacaagtattttttgcataagaagtacacaattacaactgttttgacatgtatcatagaactacaattaattcccttttggcgccatgaaaatacagcacctttgatacttgactaatactatgagaatagctttagttacgtggtatccagtgtcaatagttgtagttatctgatacatgactatagtattagttacatgaaatttacttataatt

SEQ ID NO: 62467 - DNA, 1508 bp, Zea Mays
ctcctacagtcaggcgctggcaaagccactcatcttcggttttccggttcttcccagttcccattcggtcactcggaccggacatggcgatgagtttcttctcgcccactaccaccccttcatcctccgcatccctcctccccatccgccgccagtgtgccaccggcccctccgtgtccttccccctcaagccccaccgcttccgagttcatctcaaacctccgcgctcctcccgaacccgaatccacaccctctccacctcctccttgaagatccccaccgagagcattctctcttccgtggtctccacctcgacgaccctcctttttgtgctcgtcgcaggcctcctctccctctccggcgtccgctcactccccgccctcgcctgcgctccggcgccgacccagcaaccgcaagaaaccgaagaacaagaatccaaagagaagaagcagcaagaagaggctggtgagaggaaagaggacgtgttgccgcagctggatgaagaggacgcggaggatgacgaggtgcggatgtattcagcgattctgagccgcaactctggcgacgtggacgcgctcaagtgcgctctatacgctaagatgaggcgcgcggattggggcggggcgctgcggttcgcgcgactgctgcgcgacgccgagcccagcgagttggagtggcgcctgatggtggcgcagctgcacgagctcaagggggacctcgccgaggctgagcgtcacttcagggagctcctggcagaggagcccctcctcgttcgggctctccatggacttgcactgtgtatgcagaagaaacctgagggccctgctgtttttgaaatgcttgagaatgctttgcagcttgcaacttcagagagaagggtcccggaggagcgcaacataaagcttttgatcgcacaaatgcatgttgtcatgttagatgttgcgtctgagaaactacaaaatcttataaatgaggatcctcgggattttcggtctcatctttgccagggcattgtgtatgcacttttagacagaaaagaagacgcagatatgcaatttgatgtatacagaagccttgtgccggatgaattcccagataagagttttatcagtgatgttatactggcggctaggacggagtcacatgatcggctacaaaaggaatttgactctgagtttcaagcgaagaaatgatacattaagttttgtatagatgaggcccaaatactcctggtaggctaaatggttgcatggtaccaatcttacaaataaaacataacacagtaaaagcatagtgaaaagaggcgtctcttatcaggctatcaccaattttcctcatttcctctccctgttagtctctgcagacatttctcagtgaaatataatatagcgaagacaaaattctgcttgaagttaaaagctgtagtatccaaccagatggattgatttgttgatgttcaaatgtagaatttgtgaagcttatattccgtcccttcttttttgcgttgg

SEQ ID NO: 62468 - DNA, 1394 bp, Zea Mays
ctcaagtatagagctaagagcgtgtggtgagtttttttttaatcaagtgtcggagacacaggtcaactcaactacaaccggagtaccataacctatggacaacaccaacatggtcgtggtgacgacgcgggattccggaatcctggcacggttcctcatcaagcccgcggcattccacccgtggcgcgaccgcgccaccacgcagcccacgcaccaacgccgccctaataaatcccctgcgctccgcgcccgccggctcgcaaccctaaccttcctcccctgctccgccgccgccacggtcgcctctactgccatggtgagcgctgaagtcggcatcgattacgtgctgtggacggaggacgaggtgtccacccgcgtgggcgaggtcgccgccgagctcgcggccgacctgcgcgcgttgccggagcccgccgtcatcgtcggcgtcgccacgggcgcgttcctcttcctcgctgacctcgtccggcgcgtcgacgtgcggctcgtggtcgacctcgtgcgcgtcgagtcctatggggcgggcacagagtccagcggcaagccacgtatcacggccgacctcaaagtcgatgtggccgggaagcatgtggtcgtgggaatactctgtcctatctcattgctcatttggagaagaaaggtgcatcatccatatcggtttgcacttttcttgacaaaccagcaagaaggaaagtcaatgttcatctagtaggggatggaaaattttaccgtggatttgagtgcccagactactttgttgttggctatggtttagattacgcggagctctaccgtaacctgccttatgtcggagttctcaagcccgagatgtacaaaaaggattcaagcaattagacctgaggctgtacctgcaccttgtgcaatcgatcgatacgaagatctcagttacaaatgatacagagatcccagttttgatcaacaactttaccgaagcagaacttcttaatgcaaatgatacgagggggaaaaaggcaaaaaaaaaacagaaagatctagtttaccttttttctgtaagttcaggaaaacttcagttttttccaggtttctgtagcataacagcaagatgtacaactgtcagttttgtttgtcaccaaacagcaacccagaagggaaagatgtagttatatggcatgttacattttcagtttacaggctaaacagcttacagtgtcttgtagtgagatgtaactgtaaggtcggggagcttagtgaggtcagggtgggccatgcgttcccctgcccaacataaccaccattgagcaaacagtattttcattaccgtttagagactgtttggttgagttgttgctaaaaaaagctgacgtggaatgtgagatgtgaaaaaaattgctata

SEQ ID NO: 62469 - DNA, 1409 bp, Zea Mays
ctcaagtatagagctaagagcgtgtggtgagtttttttttaatcaagtgtcggagacacaggtcaactcaactacaaccggagtaccataacctatggacaacaccaacatggtcgtggtgacgacgcgggattccggaatcctggcacggttcctcatcaagcccgcggcattccacccgtggcgcgaccgcgccaccacgcagcccacgcaccaacgccgccctaataaatcccctgcgctccgcgcccgccggctcgcaaccctaaccttcctcccctgctccgccgccgccacggtcgcctctactgccatggtgagcgctgaagtcggcatcgattacgtgctgtggacggaggacgaggtgtccacccgcgtgggcgaggtcgccgccgagctcgcggccgacctgcgcgcgttgccggagcccgccgtcatcgtcggcgtcgccacgggcgcgttcctcttcctcgctgacctcgtccggcgcgtcgacgtgcggctcgtggtcgacctcgtgcgcgtcgagtcctatggggcgggcacagagtccagcggcaagccacgtatcacggccgacctcaaagtcgatgtggccgggaagcatgtggtcgtggttgaagatattgttgacacagggaatactctgtcctatctcattgctcatttggagaagaaaggtgcatcatccatatcggtttgcacttttcttgacaaaccagcaagaaggaaagtcaatgttcatctagtaggggatggaaaattttaccgtggatttgagactactttgttgttggctatggtttagattacgcggagctctaccgtaacctgccttatgtcggagttctcaagcccgagatgtacaaaaaggattcaagcaattagacctgaggctgtacctgcaccttgtgcaatcgatcgatacgaagatctcagttacaaatgatacagagatcccagttttgatcaacaactttaccgaagcagaacttcttaatgcaaatgatacgagggggaaaaaggcaaaaaaaaaacagaaagatctagtttaccttttttctgtaagttcaggaaaacttcagttttttccaggtttctgtagcataacagcaagatgtacaactgtcagttttgtttgtcaccaaacagcaacccagaagggaaagatgtagttatatggcatgttacattttcagtttacaggctaaacagcttacagtgtcttgtagtgagatgtaactgtaaggtcggggagcttagtgaggtcagggtgggccatgcgttcccctgcccaacataaccaccattgagcaaacagtattttcattaccgtttagagactgtttggttgagttgttgctaaaaaaagctgacgtggaatgtgagatgtgaaaaaaattgctata

SEQ ID NO: 62470 - DNA, 817 bp, Zea Mays
cggcccgtcagcccacggcacccccgatcccaataagcaccgaaccctatagcccaaaacttcctccacttcacgcccctccgccgccgccgcgtctcctctgcaggtaagaaggtaaggaagagggcgaaatggtgaagcacaacaacgttatccccaacgggcacttcaagaagcactggcagaactatgtcaagacatggttcaaccagcccgcccgcaagcagaggcgccgcatcgctcgtcaaaagaaggctgtgaagatattcccacgcccaactgctggccctcttcgccccattgtgcaatgccagactctcaagtacaacatgaagtcgagggctgggagaggatttacccttgaggagctgaaggctgccggcattccaaagaagcttgccccaaccattggcatttctgtggatcaccgccgcaagaacaaatctctcgagggactgcaggccaatgtccagaggcttaagacgtacaaggccaagctggttatcttcccaaggcgtgctcgcaaggccaatgccggcgactctactccggaggagcttgccacggccacccaggtccagggtgactacatgcctattactcgtggtgagaagcgctcagtcgaggttgtgaaggttactgatgagatgaagtcgtttgcggcctacggcaagctccgtcttgagcggatgaacaagaaacaccttggtgcccgccagaagaaggcggctgaggcagagaaggatgaaaagaagtgaagcagcgaccaccaggtcactgcaacgtgaagtgcatcaatggtgtcggtcaaatcaag

SEQ ID NO: 62471 - DNA, 1035 bp, Zea Mays
ggcccgtcagcccacggcacccccgatcccaataagcaccgaaccctatagcccaaaacttcctccacttcacgcccctccgccgccgccgcgtctcctctgcaggtaagaaggtaaggaagagggcgaaatggtgaagcacaacaacgttatccccaacgggcacttcaagaagcactggcagaactatgtcaagacatggttcaaccagcccgcccgcaagcagaggcgccgcatcgctcgtcaaaagaaggctgtgaagatattcccacgcccaactgctggccctcttcgccccattgtgcaatgccagactctcaagtacaacatgaagtcgagggctgggagaggatttacccttgaggagctgaaggctgccggcattccaaagaagcttgccccaaccattggcatttctgtggatcaccgccgcaagaacaaatctctcgagggactgcaggccaatgtccagaggcttaagacgtacaaggccaagctggttatcttcccaaggcgtgctcgcaaggccaatgccggcgactctactccggaggagcttgccacggccacccaggtccagggtgactacatgcctattactcgtggtgagaagcgctcagtcgaggttgtgaaggttactgatgagatgaagtcgtttgcggcctacggcaagctccgtcttgagcggatgaacaagaaacaccttggtgcccgccagaagaaggcggctgaggcagagaaggatgaaaagaagtgaagcaggtctcttatgtcattgtgcttgacattgacgtctcgacctctgtcatggtgcgacaagttcctccatttagtgcatctgctccttcggtgctctccttgataacaggagcacataaatcttatgtcggggtgctgtttgtaattcgtggtctgccacaacattatgtaagggtttgcctcgtttcccttaaaaaagaggccattaagggctacatcctgaccaaccctagtcctagatctgcccctaccaccacgggtagaaagagggcctag

SEQ ID NO: 62472 - DNA, 1407 bp, Zea Mays
gctacattccctcctgcgccgccgtcccccgcaacgttctgtgggtggatggggcgctcgtttcttctggatgacaagccgatgcacgcgcgtatcttgctgcgcgaagggttggggttctggattgattggtaagaaggtaaggaagagggcgaaatggtgaagcacaacaacgttatccccaacgggcacttcaagaagcactggcagaactatgtcaagacatggttcaaccagcccgcccgcaagcagaggcgccgcatcgctcgtcaaaagaaggctgtgaagatattcccacgcccaactgctggccctcttcgccccattgtgcaatgccagactctcaagtacaacatgaagtcgagggctgggagaggatttacccttgaggagctgaaggctgccggcattccaaagaagcttgccccaaccattggcatttctgtggatcaccgccgcaagaacaaatctctcgagggactgcaggccaatgtccagaggcttaagacgtacaaggccaagctggttatcttcccaaggcgtgctcgcaaggccaatgccggcgactctactccggaggagcttgccacggccacccaggtccagggtgactacatgcctattactcgtggtgagaagcgctcagtcgaggttgtgaaggttactgatgagatgaagtcgtttgcggcctacggcaagctccgtcttgagcggatgaacaagaaacaccttggtgcccgccagaagaaggcggctgaggcagagaaggatgaaaagaagtgaagcagagaccagagttttggtgcccaactgtttgatacctggtacttgtggttgcaaactcatcagctatacccttatctaatggctgcctacccgatggtgcgtagtctcgtaggacaaatatgagccgaatgctcatataaataaatacatataccttcgcaattaggcaacacaaactcaacacaacaaatctagcctagggaactcttgctagctctcattcgattcctggtgctcctgcattccgagctcctgcattcctgattgcaatgacggcactccctccggactggttctgcctcgccacacgcttgatgacgcgacgatgaacgacggagggctgctggctctcgcgctcgactgtctccagacactgcccgcgctgctgttcggcctgttcttcctcgcgtgcgtgtagcatggtcctgacgccgtggcgacctggcgtttgtggccttcgcctacgccgatctcgccgtgttcttctggtgcggccgccgtgtcgagtggctggtgctggcgctgccgtctcctggcctggccccgttcgtgaagagagacgacgggtgctgcaggtcgccgtgtgggtccctctccaccgcactaagctgcgcgttcgct

SEQ ID NO: 62473 - DNA, 1735 bp, Zea Mays
gaatttgtggatgtggattttcatctcaggttcctatccaggtgaagtggatctgacctactgtaggggaaagagcaaagtacattatcttgtacaaatgtgcattacgctacctttatcataaaccaaatcatctctgtttctgggaacagcaaccagtaatttcccatgcaacctcttggttgatggatgttcttcctgttgggtcagaaagagaaagtcaaacagatagtcaccctttactcatggagcatgcgattggcatcccaaggcatgatgttgcttctacttcgacacctcatcgagacaataatgatggcatggatcaactgccccgtgattcagaaagttcttctggaacaactgatgcatcttactctccgaatgctcctctagcaaggagagatgataatcgccttcggcgtcagcaaagtctaaattctggcttctggatatcaattgaactagctgtaaatcttagccagattatagctgctatctgtgttctgtctgtgtcaaagaatgaacatcctcatgctccattgtttgagtgggtcattggttatacaataggctgcattgcaactcttcctcatctatactggcgctatctccagcgcaaccagctggccactgtgcaagggtcaaatcagaactacgttccagacaacagctttgagagtagttcttttactgggatttcgccccctcctgtgtctgaagctggtgttgtaactgtatcaaatggagtcttgagaaacaatgtggttatcacaaatccaagggcccaagcttttgctgatcacttcaagatggcgctggactgcttcttcgctgtatggtttgttgtgggaaatgtgtgggtgtttggtggacattcttccgcccatgacgcacccaacctgtacaggttgtgcatagccttcctcactttcagctgcattggctatgcgatgcccttcatcctctgcgcgctgatatgctgctgcttaccctgcataatctccctgatgggcttccgggaagatctggacgaaaacagaggtgctacttcggatgcgatcaacgccctgggcacatacaggttcaggtcaaagaagcctcgtaacggggaggcaaacgaaggtggcggtggagtctttgctcctggaacggacaaggaacgcgctgtttctgctgaagacgccgtttgctgtatctgcttggcgaggtacgtggataacgatgatctccggttgctcccttgcgggcacttcttccacaaggactgtgtcgacaaatggctcaagataaatgcgctgtgcccactctgcaaagctgagatcgacgtcgtcccgaggaccgctcctccagccattggctttgggcgccgcgacagccacaggagggtaggaaacgacattgaatcacaacggcttccatgatgtatagtgagacagcaacttgccttgggcgtgtgtgtggcttccagaagagcaccttgtaaattatatagtgagagagagaaagagattatgtcatggaccaacgagtccttacatgatccagcaagtaatcgcctgactgaaaaatgtgtcgttgttgtcaatatgtgtgaatgtgtccctgtagctgtagctttgttcactccaaaatgtaccttgtcatagctaccgtgacgtcaattaactaatctattttataaagtaaagtctaattttttatctgatcaaaactaatttattatataaagtat

SEQ ID NO: 62474 - DNA, 2123 bp, Zea Mays
aaaaagtttatatctaacgataaaaaaatatatctaaaataatcgttgccgcaccgccgctgtagactgaagggaaagaggaggaagaattcgagtccaagtcttggagctctcgctttaggtaaaaaatttccgttccgctagagcgatgctcccgtgtttttatcatccttttatattagcgcgtttaggttgatccatgggtttggcacccgttccttccttgccaccggcgccatctttgcttccgtgacctcgcccgtcgatttttcttttcggttgtttattgcaaaacttgggcgcaagatagtctctgattcgttcggctttacgcggtcgaggcgattgtttggcggccagggtggaactgccccttgcccgtggttggtgaggcgattcgtggtcgggagcttccgtttctcttcggaggtgaagtggatctgacctactgtaggggaaagagcaaagtacattatcttgtacaaatgtgcattacgctacctttatcataaaccaaatcatctctgtttctgggaacagcaaccagtaatttcccatgcaacctcttggttgatggatgttcttcctgttgggtcagaaagagaaagtcaaacagatagtcaccctttactcatggagcatgcgattggcatcccaaggcatgatgttgcttctacttcgacacctcatcgagacaataatgatggcatggatcaactgccccgtgattcagaaagttcttctggaacaactgatgcatcttactctccgaatgctcctctagcaaggagagatgataatcgccttcggcgtcagcaaagtctaaattctggcttctggatatcaattgaactagctgtaaatcttagccagattatagctgctatctgtgttctgtctgtgtcaaagaatgaacatcctcatgctccattgtttgagtgggtcattggttatacaataggctgcattgcaactcttcctcatctatactggcgctatctccagcgcaaccagctggccactgtgcaagggtcaaatcagaactacgttccagacaacagctttgagagtagttcttttactgggatttcgccccctcctgtgtctgaagctggtgttgtaactgtatcaaatggagtcttgagaaacaatgtggttatcacaaatccaagggcccaagcttttgctgatcacttcaagatggcgctggactgcttcttcgctgtatggtttgttgtgggaaatgtgtgggtgtttggtggacattcttccgcccatgacgcacccaacctgtacaggttgtgcatagccttcctcactttcagctgcattggctatgcgatgcccttcatcctctgcgcgctgatatgctgctgcttaccctgcataatctccctgatgggcttccgggaagatctggacgaaaacagaggtgctacttcggatgcgatcaacgccctgggcacatacaggttcaggtcaaagaagcctcgtaacggggaggcaaacgaaggtggcggtggagtctttgctcctggaacggacaaggaacgcgctgtttctgctgaagacgccgtttgctgtatctgcttggcgaggtacgtggataacgatgatctccggttgctcccttgcgggcacttcttccacaaggactgtgtcgacaaatggctcaagataaatgcgctgtgcccactctgcaaagctgagatcgacgtcgtcccgaggaccgctcctccagccattggctttgggcgccgcgacagccacaggagggtaggaaacgacattgaatcacaacggcttccatgatgtatagtgagacagcaacttgccttgggcgtgtgtgtggcttccagaagagcaccttgtaaattatatagtgagagagagaaagagattatgtcatggaccaacgagtccttacatgatccagcaagtaatcgcctgactgaaaaatgtgtcgttgttgtcaatatgtgtgaatgtgtccctgtagctgtagctttgttcactccaaaatgtaccttgtcatagctaccgtgacgtcaattaactaatctattttataaagtaaagtctaattttttatctgatcaaaactaatttattatataaagtat

SEQ ID NO: 62475 - DNA, 1699 bp, Zea Mays
aaaaagtttatatctaacgataaaaaaatatatctaaaataatcgttgccgcaccgccgctgtagactgaagggaaagaggaggaagaattcgagtccaagtcttggagctctcgctttaggtgaagtggatctgacctactgtaggggaaagagcaaagtacattatcttgtacaaatgtgcattacgctacctttatcataaaccaaatcatctctgtttctgggaacagcaaccagtaatttcccatgcaacctcttggttgatggatgttcttcctgttgggtcagaaagagaaagtcaaacagatagtcaccctttactcatggagcatgcgattggcatcccaaggcatgatgttgcttctacttcgacacctcatcgagacaataatgatggcatggatcaactgccccgtgattcagaaagttcttctggaacaactgatgcatcttactctccgaatgctcctctagcaaggagagatgataatcgccttcggcgtcagcaaagtctaaattctggcttctggatatcaattgaactagctgtaaatcttagccagattatagctgctatctgtgttctgtctgtgtcaaagaatgaacatcctcatgctccattgtttgagtgggtcattggttatacaataggctgcattgcaactcttcctcatctatactggcgctatctccagcgcaaccagctggccactgtgcaagggtcaaatcagaactacgttccagacaacagctttgagagtagttcttttactgggatttcgccccctcctgtgtctgaagctggtgttgtaactgtatcaaatggagtcttgagaaacaatgtggttatcacaaatccaagggcccaagcttttgctgatcacttcaagatggcgctggactgcttcttcgctgtatggtttgttgtgggaaatgtgtgggtgtttggtggacattcttccgcccatgacgcacccaacctgtacagatctggacgaaaacagaggtgctacttcggatgcgatcaacgccctgggcacatacaggttcaggtcaaagaagcctcgtaacggggaggcaaacgaaggtggcggtggagtctttgctcctggaacggacaaggaacgcgctgtttctgctgaagacgccgtttgctgtatctgcttggcgaggtacgtggataacgatgatctccggttgctcccttgcgggcacttcttccacaaggactgtgtcgacaaatggctcaagataaatgcgctgtgcccactctgcaaagctgagatcgacgtcgtcccgaggaccgctcctccagccattggctttgggcgccgcgacagccacaggagggtaggaaacgacattgaatcacaacggcttccatgatgtatagtgagacagcaacttgccttgggcgtgtgtgtggcttccagaagagcaccttgtaaattatatagtgagagagagaaagagattatgtcatggaccaacgagtccttacatgatccagcaagtaatcgcctgactgaaaaatgtgtcgttgttgtcaatatgtgtgaatgtgtccctgtagctgtagctttgttcactccaaaatgtaccttgtcatagctaccgtgacgtcaattaactaatctattttataaagtaaagtctaattttttatctgatcaaaactaatttattatataaagtat

SEQ ID NO: 62476 - DNA, 2115 bp, Zea Mays
aaaaagtttatatctaacgataaaaaaatatatctaaaataatcgttgccgcaccgccgctgtagactgaagggaaagaggaggaagaattcgagtccaagtcttggagctctcgctttaggtaaaaaatttccgttccgctagagcgatgctcccgtgtttttatcatccttttatattagcgcgtttaggttgatccatgggtttggcacccgttccttccttgccaccggcgccatctttgcttccgtgacctcgcccgtcgatttttcttttcggttgtttattgcaaaacttgggcgcaagatagtctctgattcgttcggctttacgcggtcgaggcgattgtttgggtggaactgccccttgcccgtggttggtgaggcgattcgtggtcgggagcttccgtttctcttcggaggtgaagtggatctgacctactgtaggggaaagagcaaagtacattatcttgtacaaatgtgcattacgctacctttatcataaaccaaatcatctctgtttctgggaacagcaaccagtaatttcccatgcaacctcttggttgatggatgttcttcctgttgggtcagaaagagaaagtcaaacagatagtcaccctttactcatggagcatgcgattggcatcccaaggcatgatgttgcttctacttcgacacctcatcgagacaataatgatggcatggatcaactgccccgtgattcagaaagttcttctggaacaactgatgcatcttactctccgaatgctcctctagcaaggagagatgataatcgccttcggcgtcagcaaagtctaaattctggcttctggatatcaattgaactagctgtaaatcttagccagattatagctgctatctgtgttctgtctgtgtcaaagaatgaacatcctcatgctccattgtttgagtgggtcattggttatacaataggctgcattgcaactcttcctcatctatactggcgctatctccagcgcaaccagctggccactgtgcaagggtcaaatcagaactacgttccagacaacagctttgagagtagttcttttactgggatttcgccccctcctgtgtctgaagctggtgttgtaactgtatcaaatggagtcttgagaaacaatgtggttatcacaaatccaagggcccaagcttttgctgatcacttcaagatggcgctggactgcttcttcgctgtatggtttgttgtgggaaatgtgtgggtgtttggtggacattcttccgcccatgacgcacccaacctgtacaggttgtgcatagccttcctcactttcagctgcattggctatgcgatgcccttcatcctctgcgcgctgatatgctgctgcttaccctgcataatctccctgatgggcttccgggaagatctggacgaaaacagaggtgctacttcggatgcgatcaacgccctgggcacatacaggttcaggtcaaagaagcctcgtaacggggaggcaaacgaaggtggcggtggagtctttgctcctggaacggacaaggaacgcgctgtttctgctgaagacgccgtttgctgtatctgcttggcgaggtacgtggataacgatgatctccggttgctcccttgcgggcacttcttccacaaggactgtgtcgacaaatggctcaagataaatgcgctgtgcccactctgcaaagctgagatcgacgtcgtcccgaggaccgctcctccagccattggctttgggcgccgcgacagccacaggagggtaggaaacgacattgaatcacaacggcttccatgatgtatagtgagacagcaacttgccttgggcgtgtgtgtggcttccagaagagcaccttgtaaattatatagtgagagagagaaagagattatgtcatggaccaacgagtccttacatgatccagcaagtaatcgcctgactgaaaaatgtgtcgttgttgtcaatatgtgtgaatgtgtccctgtagctgtagctttgttcactccaaaatgtaccttgtcatagctaccgtgacgtcaattaactaatctattttataaagtaaagtctaattttttatctgatcaaaactaatttattatataaagtat

SEQ ID NO: 62477 - DNA, 1683 bp, Zea Mays
aaaaagtttatatctaacgataaaaaaatatatctaaaataatcgttgccgcaccgccgctgtagactgaagggaaagaggaggaagaattcgagtccaagtcttggagctctcgctttaggtgaagtggatctgacctactgtaggggaaagagcaaagtacattatcttgtacaaatgtgcattacgctacctttatcataaaccaaatcatctctgtttctgggaacagcaaccagtaatttcccatgcaacctcttggttgatggatgttcttcctgttgggtcagaaagagaaagtcaaacagatagtcaccctttactcatggagcatgcgattggcatcccaaggcatgatgttgcttctacttcgacacctcatcgagacaataatgatggcatggatcaactgccccgtgattcagaaagttcttctggaacaactgatgcatcttactctccgaatgctcctctagcaaggagagatgataatcgccttcggcgtcagcaaagtctaaattctggcttctggatatcaattgaactagctgtaaatcttagccagattatagctgctatctgtgttctgtctgtgtcaaagaatgaacatcctcatgctccattgtttgagtgggtcattggttatacaataggctgcattgcaactcttcctcatctatactggcgctatctccagcgcaaccagctggccactgtgcaagggtcaaatcagaactacgttccagacaacagctttgagagtagttcttttactgggatttcgccccctcctgtgtctgaagctggtgttgtaactgtatcaaatggagtcttgagaaacaatgtggttatcacaaatccaagggcccaagcttttgctgatcacttcaagatggcgctggactgcttcttcgctgtatggtttgttgtgggaaatgtgtgggtgtttggtggacattcttccgcccatgacgcacccaacctgtacagaggtgctacttcggatgcgatcaacgccctgggcacatacaggttcaggtcaaagaagcctcgtaacggggaggcaaacgaaggtggcggtggagtctttgctcctggaacggacaaggaacgcgctgtttctgctgaagacgccgtttgctgtatctgcttggcgaggtacgtggataacgatgatctccggttgctcccttgcgggcacttcttccacaaggactgtgtcgacaaatggctcaagataaatgcgctgtgcccactctgcaaagctgagatcgacgtcgtcccgaggaccgctcctccagccattggctttgggcgccgcgacagccacaggagggtaggaaacgacattgaatcacaacggcttccatgatgtatagtgagacagcaacttgccttgggcgtgtgtgtggcttccagaagagcaccttgtaaattatatagtgagagagagaaagagattatgtcatggaccaacgagtccttacatgatccagcaagtaatcgcctgactgaaaaatgtgtcgttgttgtcaatatgtgtgaatgtgtccctgtagctgtagctttgttcactccaaaatgtaccttgtcatagctaccgtgacgtcaattaactaatctattttataaagtaaagtctaattttttatctgatcaaaactaatttattatataaagtat

SEQ ID NO: 62478 - DNA, 1898 bp, Zea Mays
aaaaagtttatatctaacgataaaaaaatatatctaaaataatcgttgccgcaccgccgctgtagactgaagggaaagaggaggaagaattcgagtccaagtcttggagctctcgctttaggcggccagggtggaactgccccttgcccgtggttggtgaggcgattcgtggtcgggagcttccgtttctcttcggaggtaggagtgaagtggatctgacctactgtaggggaaagagcaaagtacattatcttgtacaaatgtgcattacgctacctttatcataaaccaaatcatctctgtttctgggaacagcaaccagtaatttcccatgcaacctcttggttgatggatgttcttcctgttgggtcagaaagagaaagtcaaacagatagtcaccctttactcatggagcatgcgattggcatcccaaggcatgatgttgcttctacttcgacacctcatcgagacaataatgatggcatggatcaactgccccgtgattcagaaagttcttctggaacaactgatgcatcttactctccgaatgctcctctagcaaggagagatgataatcgccttcggcgtcagcaaagtctaaattctggcttctggatatcaattgaactagctgtaaatcttagccagattatagctgctatctgtgttctgtctgtgtcaaagaatgaacatcctcatgctccattgtttgagtgggtcattggttatacaataggctgcattgcaactcttcctcatctatactggcgctatctccagcgcaaccagctggccactgtgcaagggtcaaatcagaactacgttccagacaacagctttgagagtagttcttttactgggatttcgccccctcctgtgtctgaagctggtgttgtaactgtatcaaatggagtcttgagaaacaatgtggttatcacaaatccaagggcccaagcttttgctgatcacttcaagatggcgctggactgcttcttcgctgtatggtttgttgtgggaaatgtgtgggtgtttggtggacattcttccgcccatgacgcacccaacctgtacaggttgtgcatagccttcctcactttcagctgcattggctatgcgatgcccttcatcctctgcgcgctgatatgctgctgcttaccctgcataatctccctgatgggcttccgggaagatctggacgaaaacagaggtgctacttcggatgcgatcaacgccctgggcacatacaggttcaggtcaaagaagcctcgtaacggggaggcaaacgaaggtggcggtggagtctttgctcctggaacggacaaggaacgcgctgtttctgctgaagacgccgtttgctgtatctgcttggcgaggtacgtggataacgatgatctccggttgctcccttgcgggcacttcttccacaaggactgtgtcgacaaatggctcaagataaatgcgctgtgcccactctgcaaagctgagatcgacgtcgtcccgaggaccgctcctccagccattggctttgggcgccgcgacagccacaggagggtaggaaacgacattgaatcacaacggcttccatgatgtatagtgagacagcaacttgccttgggcgtgtgtgtggcttccagaagagcaccttgtaaattatatagtgagagagagaaagagattatgtcatggaccaacgagtccttacatgatccagcaagtaatcgcctgactgaaaaatgtgtcgttgttgtcaatatgtgtgaatgtgtccctgtagctgtagctttgttcactccaaaatgtaccttgtcatagctaccgtgacgtcaattaactaatctattttataaagtaaagtctaattttttatctgatcaaaactaatttattatataaagtat

SEQ ID NO: 62479 - DNA, 2040 bp, Zea Mays
aacggaacaatacttatctttttccctgcccccgcggccgccgccccgaacgcgcacgcctcctccgccgaagccaagcaaaccaccgacctcgacggagtcttctagccgtcaccctcgttgtcgccctgctcctcctctcagccggtccggccggcggcgtggcgtgaagatcaatccggacccggaacgagttccctcttttgctggttacataaactttggaataggaggatatcccatattgatctttgtgattgagattgattttttttctggaaaatggagatacaaacttcagggaagcccattgatgtgctgatggagaaggttcttagcatgaacattctgtcttctgattactttaaggagctctataggttgaaaacctatcatgaggtcatcgatgagatctacaacactgtcaaacatgtggagccttggatgactggcaattgcagaggcccctccactgcattctgtcttctatacaagttctttaccatgaagcttactgtcaaacagatgcacggtttgttgaagcatcctgactccccacacattagagctgtaagtttctgtttcctgcccttctgtttgctgatgctgaatgtcttgcttcatggccctgtatctattcattaggcatgaggttagtgtatgaatctatatgtttattgggatgattataaaacttatttcggaagtattttttgcaatgaaaaatcttacattccttgcgaatcacttgtacataattttgtgcttacattttggttatagccactaacggtccgacaacttgtttctttggatggacttgtggctgaatttcttggtcctaggacacggggatgacaaagtttgcaagaagttcatagtgtaccagtctgtgctttggagttattggtttcttgtatcttcggtatgttgcagacccaaaggttctttggatgtggtatgagccctatttgagggatgatgaggagttctcccccggatctaatggccgcaagacaaccatgggtgtttatgtgcgtgatcttatacttggacagtactactttgatagtcttctaccaagaattcctctcccagtaactcgtcagattacagccaatcttgaaaagatgaaattgcccactaagctttctggggcaactggagactccagtcgtcagggatcagaagatactgcacgccgtcctccttcagtgaaagcttctctgtcagtttcctttggacagcgtgctccacatcgggcttccaccagggattcatctccagttcgtcgaacagtcacccgtgatggtcatcgaagttcatactcaccatctcgtcgtagtggtagccgtgagggtcctgatcatgaccgttctgaccgggaactggatcattctagtcgtgaccgtgaaagagcccgggatcgttcaaaccgggatcggtatcattcaagccgagaccttgaccgtgacaaggatgccagagattatcatcggcatgagcgtgatagcagggatcgtgagtactacaggtccaggcattcagaagaaagacgggacgacagaagagatcatgaaagtagcaggcacaggcgctctagctctcgccacaggagcaggagtaggagccgaagcaggagcaggagtaggagcaggagaagccgcagccgaagcacgagcaggaggagcctgaatgagcagcgatccagcccattcagggatgcaaataaagagaaggcagccaccgtgtcgagcaacctagcaaagctgaaggacttgtacggtgacataactgcaaagaaggaagacagtgatgctgaaaagcttcaccgtgattcatgcgctgaggaggtcatcaggctgggaggccctcgatggagggtgatacatcatttcctgtcaactcattagcaacatgcccttgcgagccattagattcatcaaatgtcacatctaccacaatttcaacaacaccagtggtattgttgaagacatgatatctgtgagcatttgatgcattaccaagcaagaagccctc

SEQ ID NO: 62480 - DNA, 1705 bp, Zea Mays
aacggaacaatacttatctttttccctgcccccgcggccgccgccccgaacgcgcacgcctcctccgccgaagccaagcaaaccaccgacctcgacggagtcttctagccgtcaccctcgttgtcgccctgctcctcctctcagccggtccggccggcggcgtggcgtgaagatcaatccggacccggaacgagttccctcttttgctggttacataaactttggaataggaggatatcccatattgatctttgtgattgagattgattttttttctggaaaatggagatacaaacttcagggaagcccattgatgtgctgatggagaaggttcttagcatgaacattctgtcttctgattactttaaggagctctataggttgaaaacctatcatgaggtcatcgatgagatctacaacactgtcaaacatgtggagccttggatgactggcaattgcagaggcccctccactgcattctgtcttctatacaagttctttaccatgaagcttactgtcaaacagatgcacggtttgttgaagcatcctgactccccacacattagagctattggtttcttgtatcttcggtatgttgcagacccaaaggttctttggatgtggtatgagccctatttgagggatgatgaggagttctcccccggatctaatggccgcaagacaaccatgggtgtttatgtgcgtgatcttatacttggacagtactactttgatagtcttctaccaagaattcctctcccagtaactcgtcagattacagccaatcttgaaaagatgaaattgcccactaagctttctggggcaactggagactccagtcgtcagggatcagaagatactgcacgccgtcctccttcagtgaaagcttctctgtcagtttcctttggacagcgtgctccacatcgggcttccaccagggattcatctccagttcgtcgaacagtcacccgtgatggtcatcgaagttcatactcaccatctcgtcgtagtggtagccgtgagggtcctgatcatgaccgttctgaccgggaactggatcattctagtcgtgaccgtgaaagagcccgggatcgttcaaaccgggatcggtatcattcaagccgagaccttgaccgtgacaaggatgccagagattatcatcggcatgagcgtgatagcagggatcgtgagtactacaggtccaggcattcagaagaaagacgggacgacagaagagatcatgaaagtagcaggcacaggcgctctagctctcgccacaggagcaggagtaggagccgaagcaggagcaggagtaggagcaggagaagccgcagccgaagcacgagcaggaggagcctgaatgagcagcgatccagcccattcagggatgcaaataaagagaaggcagccaccgtgtcgagcaacctagcaaagctgaaggacttgtacggtgacataactgcaaagaaggaagacagtgatgctgaaaagcttcaccgtgattcatgcgctgaggaggtcatcaggctgggaggccctcgatggagggtgatacatcatttcctgtcaactcattagcaacatgcccttgcgagccattagattcatcaaatgtcacatctaccacaatttcaacaacaccagtggtattgttgaagacatgatatctgtgagcatttgatgcattaccaagcaagaagccctc

SEQ ID NO: 62481 - DNA, 1795 bp, Zea Mays
caggcacggccgcctcgcatcgcggcccttaacggaacaatacttatctttttccctgcccccgcggccgccgccccgaacgcgcacgcctcctccgccgaagccaagcaaaccaccgacctcgacggagtcttctagccgtcaccctcgttgtcgccctgctcctcctctcagccggtccggccggcggcgtggcgtgaagatcaatccggacccggaacgagttccctcttttgctggttacataaactttggaataggaggatatcccatattgatctttgtgattgagattgattttttttctggaaaatggagatacaaacttcagggaagcccattgatgtgctgatggagaaggttcttagcatgaacattctgtcttctgattactttaaggagctctataggttgaaaacctatcatgaggtcatcgatgagatctacaacactgtcaaacatgtggagccttggatgactggcaattgcagaggcccctccactgcattctgtcttctatacaagttctttaccatgaagcttactgtcaaacagatgcacggtttgttgaagcatcctgactccccacacattagagctgacacggggatgacaaagtttgcaagaagttcatagtgtaccagtctgtgctttggagttattggtttcttgtatcttcggtatgttgcagacccaaaggttctttggatgtggtatgagccctatttgagggatgatgaggagttctcccccggatctaatggccgcaagacaaccatgggtgtttatgtgcgtgatcttatacttggacagtactactttgatagtcttctaccaagaattcctctcccagtaactcgtcagattacagccaatcttgaaaagatgaaattgcccactaagctttctggggcaactggagactccagtcgtcagggatcagaagatactgcacgccgtcctccttcagtgaaagcttctctgtcagtttcctttggacagcgtgctccacatcgggcttccaccagggattcatctccagttcgtcgaacagtcacccgtgatggtcatcgaagttcatactcaccatctcgtcgtagtggtagccgtgagggtcctgatcatgaccgttctgaccgggaactggatcattctagtcgtgaccgtgaaagagcccgggatcgttcaaaccgggatcggtatcattcaagccgagaccttgaccgtgacaaggatgccagagattatcatcggcatgagcgtgatagcagggatcgtgagtactacaggtccaggcattcagaagaaagacgggacgacagaagagatcatgaaagtagcaggcacaggcgctctagctctcgccacaggagcaggagtaggagccgaagcaggagcaggagtaggagcaggagaagccgcagccgaagcacgagcaggaggagcctgaatgagcagcgatccagcccattcagggatgcaaataaagagaaggcagccaccgtgtcgagcaacctagcaaagctgaaggacttgtacggtgacataactgcaaagaaggaagacagtgatgctgaaaagcttcaccgtgattcatgcgctgaggaggtcatcaggctgggaggccctcgatggagggtgatacatcatttcctgtcaactcattagcaacatgcccttgcgagccattagattcatcaaatgtcacatctaccacaatttcaacaacaccagtggtattgttgaagacatgatatctgtgagcatttgatgcattaccaagcaagaagccctc

SEQ ID NO: 62482 - DNA, 1423 bp, Zea Mays
gaagaattaggccccgatctctccaatagtctagtccctcccaagccgactccgcctgattatcttcccggcgctgtttacccccctatgaactaggattcataacagccaccacgacctctgcagctgccggcgcactgcatcgcacacgcattggcgttggcattgagggctcaagtcctctgccagtccaagtcattacggtgtcctccacgacgttggcgttgagggctcaagtctgctgccagtccaagccgtcgttgtggctggccccctccctggcgttggcgttgagggctcgaggccgatgctagtcacgccctcagttgcggccctcgtggcatttctcaccaaggccgcccgctcgccccagactcaacaagctggagtactactttgatagtcttctaccaagaattcctctcccagtaactcgtcagattacagccaatcttgaaaagatgaaattgcccactaagctttctggggcaactggagactccagtcgtcagggatcagaagatactgcacgccgtcctccttcagtgaaagcttctctgtcagtttcctttggacagcgtgctccacatcgggcttccaccagggattcatctccagttcgtcgaacagtcacccgtgatggtcatcgaagttcatactcaccatctcgtcgtagtggtagccgtgagggtcctgatcatgaccgttctgaccgggaactggatcattctagtcgtgaccgtgaaagagcccgggatcgttcaaaccgggatcggtatcattcaagccgagaccttgaccgtgacaaggatgccagagattatcatcggcatgagcgtgatagcagggatcgtgagtactacaggtccaggcattcagaagaaagacgggacgacagaagagatcatgaaagtagcaggcacaggcgctctagctctcgccacaggagcaggagtaggagccgaagcaggagcaggagtaggagcaggagaagccgcagccgaagcacgagcaggaggagcctgaatgagcagcgatccagcccattcagggatgcaaataaagagaaggcagccaccgtgtcgagcaacctagcaaagctgaaggacttgtacggtgacataactgcaaagaaggaagacagtgatgctgaaaagcttcaccgtgattcatgcgctgaggaggtcatcaggctgggaggccctcgatggaggaagtcgcccgcatgattcaaggcacttttggacatccttgtctttgcagtcagcacgggaattgaatcgacatgcagttatggcaaggctgcattgctgaatcgaggtcgcaactcataatgccttatataagtgttggtaactagttcagacaaacaacttgttgggaaaataatgaaacatatttgataagggtacgattggaaaat

SEQ ID NO: 62483 - DNA, 1757 bp, Zea Mays
aacggaacaatacttatctttttccctgcccccgcggccgccgccccgaacgcgcacgcctcctccgccgaagccaagcaaaccaccgacctcgacggagtcttctagccgtcaccctcgttgtcgccctgctcctcctctcagccggtccggccggcggcgtggcgtgaagatcaatccggacccggaacgagttccctcttttgctggttacataaactttggaataggaggatatcccatattgatctttgtgattgagattgattttttttctggaaaatggagatacaaacttcagggaagcccattgatgtgctgatggagaaggttcttagcatgaacattctgtcttctgattactttaaggagctctataggttgaaaacctatcatgaggtcatcgatgagatctacaacactgtcaaacatgtggagccttggatgactggcaattgcagaggcccctccactgcattctgtcttctatacaagttctttaccatgaagcttactgtcaaacagatgcacggtttgttgaagcatcctgactccccacacattagagctattggtttcttgtatcttcggtatgttgcagacccaaaggttctttggatgtggtatgagccctatttgagggatgatgaggagttctcccccggatctaatggccgcaagacaaccatgggtgtttatgtgcgtgatcttatacttggacagtactactttgatagtcttctaccaagaattcctctcccagtaactcgtcagattacagccaatcttgaaaagatgaaattgcccactaagctttctggggcaactggagactccagtcgtcagggatcagaagatactgcacgccgtcctccttcagtgaaagcttctctgtcagtttcctttggacagcgtgctccacatcgggcttccaccagggattcatctccagttcgtcgaacagtcacccgtgatggtcatcgaagttcatactcaccatctcgtcgtagtggtagccgtgagggtcctgatcatgaccgttctgaccgggaactggatcattctagtcgtgaccgtgaaagagcccgggatcgttcaaaccgggatcggtatcattcaagccgagaccttgaccgtgacaaggatgccagagattatcatcggcatgagcgtgatagcagggatcgtgagtactacaggtccaggcattcagaagaaagacgggacgacagaagagatcatgaaagtagcaggcacaggcgctctagctctcgccacaggagcaggagtaggagccgaagcaggagcaggagtaggagcaggagaagccgcagccgaagcacgagcaggaggagcctgaatgagcagcgatccagcccattcagggatgcaaataaagagaaggcagccaccgtgtcgagcaacctagcaaagctgaaggacttgtacggtgacataactgcaaagaaggaagacagtgatgctgaaaagcttcaccgtgattcatgcgctgaggaggtcatcaggctgggaggccctcgatggaggaagtcgcccgcatgattcaaggcacttttggacatccttgtctttgcagtcagcacgggaattgaatcgacatgcagttatggcaaggctgcattgctgaatcgaggtcgcaactcataatgccttatataagtgttggtaactagttcagacaaacaacttgttgggaaaataatgaaacatatttgataagggtacgattggaaaat

SEQ ID NO: 62484 - DNA, 1799 bp, Zea Mays
aacggaacaatacttatctttttccctgcccccgcggccgccgccccgaacgcgcacgcctcctccgccgaagccaagcaaaccaccgacctcgacggagtcttctagccgtcaccctcgttgtcgccctgctcctcctctcagccggtccggccggcggcgtggcgtgaagatcaatccggacccggaacgagttccctcttttgctggttacataaactttggaataggaggatatcccatattgatctttgtgattgagattgattttttttctggaaaatggagatacaaacttcagggaagcccattgatgtgctgatggagaaggttcttagcatgaacattctgtcttctgattactttaaggagctctataggttgaaaacctatcatgaggtcatcgatgagatctacaacactgtcaaacatgtggagccttggatgactggcaattgcagaggcccctccactgcattctgtcttctatacaagttctttaccatgaagcttactgtcaaacagatgcacggtttgttgaagcatcctgactccccacacattagagcttttgcaagaagttcatagtgtaccagtctgtgctttggagttattggtttcttgtatcttcggtatgttgcagacccaaaggttctttggatgtggtatgagccctatttgagggatgatgaggagttctcccccggatctaatggccgcaagacaaccatgggtgtttatgtgcgtgatcttatacttggacagtactactttgatagtcttctaccaagaattcctctcccagtaactcgtcagattacagccaatcttgaaaagatgaaattgcccactaagctttctggggcaactggagactccagtcgtcagggatcagaagatactgcacgccgtcctccttcagtgaaagcttctctgtcagtttcctttggacagcgtgctccacatcgggcttccaccagggattcatctccagttcgtcgaacagtcacccgtgatggtcatcgaagttcatactcaccatctcgtcgtagtggtagccgtgagggtcctgatcatgaccgttctgaccgggaactggatcattctagtcgtgaccgtgaaagagcccgggatcgttcaaaccgggatcggtatcattcaagccgagaccttgaccgtgacaaggatgccagagattatcatcggcatgagcgtgatagcagggatcgtgagtactacaggtccaggcattcagaagaaagacgggacgacagaagagatcatgaaagtagcaggcacaggcgctctagctctcgccacaggagcaggagtaggagccgaagcaggagcaggagtaggagcaggagaagccgcagccgaagcacgagcaggaggagcctgaatgagcagcgatccagcccattcagggatgcaaataaagagaaggcagccaccgtgtcgagcaacctagcaaagctgaaggacttgtacggtgacataactgcaaagaaggaagacagtgatgctgaaaagcttcaccgtgattcatgcgctgaggaggtcatcaggctgggaggccctcgatggaggaagtcgcccgcatgattcaaggcacttttggacatccttgtctttgcagtcagcacgggaattgaatcgacatgcagttatggcaaggctgcattgctgaatcgaggtcgcaactcataatgccttatataagtgttggtaactagttcagacaaacaacttgttgggaaaataatgaaacatatttgataagggtacgattggaaaat

SEQ ID NO: 62485 - DNA, 2092 bp, Zea Mays
aacggaacaatacttatctttttccctgcccccgcggccgccgccccgaacgcgcacgcctcctccgccgaagccaagcaaaccaccgacctcgacggagtcttctagccgtcaccctcgttgtcgccctgctcctcctctcagccggtccggccggcggcgtggcgtgaagatcaatccggacccggaacgagttccctcttttgctggttacataaactttggaataggaggatatcccatattgatctttgtgattgagattgattttttttctggaaaatggagatacaaacttcagggaagcccattgatgtgctgatggagaaggttcttagcatgaacattctgtcttctgattactttaaggagctctataggttgaaaacctatcatgaggtcatcgatgagatctacaacactgtcaaacatgtggagccttggatgactggcaattgcagaggcccctccactgcattctgtcttctatacaagttctttaccatgaagcttactgtcaaacagatgcacggtttgttgaagcatcctgactccccacacattagagctgtaagtttctgtttcctgcccttctgtttgctgatgctgaatgtcttgcttcatggccctgtatctattcattaggcatgaggttagtgtatgaatctatatgtttattgggatgattataaaacttatttcggaagtattttttgcaatgaaaaatcttacattccttgcgaatcacttgtacataattttgtgcttacattttggttatagccactaacggtccgacaacttgtttctttggatggacttgtggctgaatttcttggtcctaggacacggggatgacaaagtttgcaagaagttcatagtgtaccagtctgtgctttggagttattggtttcttgtatcttcggtatgttgcagacccaaaggttctttggatgtggtatgagccctatttgagggatgatgaggagttctcccccggatctaatggccgcaagacaaccatgggtgtttatgtgcgtgatcttatacttggacagtactactttgatagtcttctaccaagaattcctctcccagtaactcgtcagattacagccaatcttgaaaagatgaaattgcccactaagctttctggggcaactggagactccagtcgtcagggatcagaagatactgcacgccgtcctccttcagtgaaagcttctctgtcagtttcctttggacagcgtgctccacatcgggcttccaccagggattcatctccagttcgtcgaacagtcacccgtgatggtcatcgaagttcatactcaccatctcgtcgtagtggtagccgtgagggtcctgatcatgaccgttctgaccgggaactggatcattctagtcgtgaccgtgaaagagcccgggatcgttcaaaccgggatcggtatcattcaagccgagaccttgaccgtgacaaggatgccagagattatcatcggcatgagcgtgatagcagggatcgtgagtactacaggtccaggcattcagaagaaagacgggacgacagaagagatcatgaaagtagcaggcacaggcgctctagctctcgccacaggagcaggagtaggagccgaagcaggagcaggagtaggagcaggagaagccgcagccgaagcacgagcaggaggagcctgaatgagcagcgatccagcccattcagggatgcaaataaagagaaggcagccaccgtgtcgagcaacctagcaaagctgaaggacttgtacggtgacataactgcaaagaaggaagacagtgatgctgaaaagcttcaccgtgattcatgcgctgaggaggtcatcaggctgggaggccctcgatggaggaagtcgcccgcatgattcaaggcacttttggacatccttgtctttgcagtcagcacgggaattgaatcgacatgcagttatggcaaggctgcattgctgaatcgaggtcgcaactcataatgccttatataagtgttggtaactagttcagacaaacaacttgttgggaaaataatgaaacatatttgataagggtacgattggaaaat

SEQ ID NO: 62486 - DNA, 1753 bp, Zea Mays
aacggaacaatacttatctttttccctgcccccgcggccgccgccccgaacgcgcacgcctcctccgccgaagccaagcaaaccaccgacctcgacggagtcttctagccgtcaccctcgttgtcgccctgctcctcctctcagccggtccggccggcggcgtggcgtgaagatcaatccggacccggaacgagttccctcttttgctggttacataaactttggaataggaggatatcccatattgatctttgtgattgagattgattttttttctggaaaatggagatacaaacttcagggaagcccattgatgtgctgatggagaaggttcttagcatgaacattctgtcttctgattactttaaggagctctataggttgaaaacctatcatgaggtcatcgatgagatctacaacactgtcaaacatgtggagccttggatgactggcaattgcagaggcccctccactgcattctgtcttctatacaagttctttaccatgaagcttactgtcaaacagatgcacggtttgttgaagcatcctgactccccacacattagagctattggtttcttgtatcttcggtatgttgcagacccaaaggttctttggatgtggtatgagccctatttgagggatgatgaggagttctcccccggatctaatggccgcaagacaaccatgggtgtttatgtgcgtgatcttatacttggacagtactactttgatagtcttctaccaagaattcctctcccagtaactcgtcagattacagccaatcttgaaaagatgaaattgcccactaagctttctggggcaactggagactccagtcgtcagggatcagaagatactgcacgccgtcctccttcagtgaaagcttctctgtcagtttcctttggacagcgtgctccacatcgggcttccaccagggattcatctccagttcgtcgaacagtcacccgtgatggtcatcgaagttcatactcaccatctcgtcgtagtggtagccgtgagggtcctgatcatgaccgttctgaccgggaactggatcattctagtcgtgaccgtgaaagagcccgggatcgttcaaaccgggatcggtatcattcaagccgagaccttgaccgtgacaaggatgccagagattatcatcggcatgagcgtgatagcagggatcgtgagtactacaggtccaggcattcagaagaaagacgggacgacagaagagatcatgaaagtagcaggcacaggcgctctagctctcgccacaggagcaggagtaggagccgaagcaggagcaggagtaggagcaggagaagccgcagccgaagcacgagcaggaggagcctgaatgagcagcgatccagcccattcagggatgcaaataaagagaaggcagccaccgtgtcgagcaacctagcaaagctgaaggacttgtacggtgacataactgcaaagaaggaagacagtgatgctgaaaagcttcaccgtgattcatgcgctgaggaggtcatcaggctgggaggccctcgatggagtcgcccgcatgattcaaggcacttttggacatccttgtctttgcagtcagcacgggaattgaatcgacatgcagttatggcaaggctgcattgctgaatcgaggtcgcaactcataatgccttatataagtgttggtaactagttcagacaaacaacttgttgggaaaataatgaaacatatttgataagggtacgattggaaaat

SEQ ID NO: 62487 - DNA, 1847 bp, Zea Mays
caggcacggccgcctcgcatcgcggcccttaacggaacaatacttatctttttccctgcccccgcggccgccgccccgaacgcgcacgcctcctccgccgaagccaagcaaaccaccgacctcgacggagtcttctagccgtcaccctcgttgtcgccctgctcctcctctcagccggtccggccggcggcgtggcgtgaagatcaatccggacccggaacgagttccctcttttgctggttacataaactttggaataggaggatatcccatattgatctttgtgattgagattgattttttttctggaaaatggagatacaaacttcagggaagcccattgatgtgctgatggagaaggttcttagcatgaacattctgtcttctgattactttaaggagctctataggttgaaaacctatcatgaggtcatcgatgagatctacaacactgtcaaacatgtggagccttggatgactggcaattgcagaggcccctccactgcattctgtcttctatacaagttctttaccatgaagcttactgtcaaacagatgcacggtttgttgaagcatcctgactccccacacattagagctgacacggggatgacaaagtttgcaagaagttcatagtgtaccagtctgtgctttggagttattggtttcttgtatcttcggtatgttgcagacccaaaggttctttggatgtggtatgagccctatttgagggatgatgaggagttctcccccggatctaatggccgcaagacaaccatgggtgtttatgtgcgtgatcttatacttggacagtactactttgatagtcttctaccaagaattcctctcccagtaactcgtcagattacagccaatcttgaaaagatgaaattgcccactaagctttctggggcaactggagactccagtcgtcagggatcagaagatactgcacgccgtcctccttcagtgaaagcttctctgtcagtttcctttggacagcgtgctccacatcgggcttccaccagggattcatctccagttcgtcgaacagtcacccgtgatggtcatcgaagttcatactcaccatctcgtcgtagtggtagccgtgagggtcctgatcatgaccgttctgaccgggaactggatcattctagtcgtgaccgtgaaagagcccgggatcgttcaaaccgggatcggtatcattcaagccgagaccttgaccgtgacaaggatgccagagattatcatcggcatgagcgtgatagcagggatcgtgagtactacaggtccaggcattcagaagaaagacgggacgacagaagagatcatgaaagtagcaggcacaggcgctctagctctcgccacaggagcaggagtaggagccgaagcaggagcaggagtaggagcaggagaagccgcagccgaagcacgagcaggaggagcctgaatgagcagcgatccagcccattcagggatgcaaataaagagaaggcagccaccgtgtcgagcaacctagcaaagctgaaggacttgtacggtgacataactgcaaagaaggaagacagtgatgctgaaaagcttcaccgtgattcatgcgctgaggaggtcatcaggctgggaggccctcgatggaggaagtcgcccgcatgattcaaggcacttttggacatccttgtctttgcagtcagcacgggaattgaatcgacatgcagttatggcaaggctgcattgctgaatcgaggtcgcaactcataatgccttatataagtgttggtaactagttcagacaaacaacttgttgggaaaataatgaaacatatttgataagggtacgattggaaaat

SEQ ID NO: 62488 - DNA, 1919 bp, Zea Mays
caggcacggccgcctcgcatcgcggcccttaacggaacaatacttatctttttccctgcccccgcggccgccgccccgaacgcgcacgcctcctccgccgaagccaagcaaaccaccgacctcgacggagtcttctagccgtcaccctcgttgtcgccctgctcctcctctcagccggtccggccggcggcgtggcgtgaagatcaatccggacccggaacgagttccctcttttgctggttacataaactttggaataggaggatatcccatattgatctttgtgattgagattgattttttttctggaaaatggagatacaaacttcagggaagcccattgatgtgctgatggagaaggttcttagcatgaacattctgtcttctgattactttaaggagctctataggttgaaaacctatcatgaggtcatcgatgagatctacaacactgtcaaacatgtggagccttggatgactggcaattgcagaggcccctccactgcattctgtcttctatacaagttctttaccatgaagcttactgtcaaacagatgcacggtttgttgaagcatcctgactccccacacattagagctgacacggggatgacaaagtttgcaagaagttcatagtgtaccagtctgtgctttggagttattggtttcttgtatcttcggtatgttgcagacccaaaggttctttggatgtggtatgagccctatttgagggatgatgaggagttctcccccggatctaatggccgcaagacaaccatgggtgtttatgtgcgtgatcttatacttggacagtactactttgatagtcttctaccaagaattcctctcccagtaactcgtcagattacagccaatcttgaaaagatgaaattgcccactaagctttctggggcaactggagactccagtcgtcagggatcagaagatactgcacgccgtcctccttcagtgaaagcttctctgtcagtttcctttggacagcgtgctccacatcgggcttccaccagggattcatctccagttcgtcgaacagtcacccgtgatggtcatcgaagttcatactcaccatctcgtcgtagtggtagccgtgagggtcctgatcatgaccgttctgaccgggaactggatcattctagtcgtgaccgtgaaagagcccgggatcgttcaaaccgggatcggtatcattcaagccgagaccttgaccgtgacaaggatgccagagattatcatcggcatgagcgtgatagcagggatcgtgagtactacaggtccaggcattcagaagaaagacgggacgacagaagagatcatgaaagtagcaggcacaggcgctctagctctcgccacaggagcaggagtaggagccgaagcaggagcaggagtaggagcaggagaagccgcagccgaagcacgagcaggaggagcctgaatgagcagcgatccagcccattcagggatgcaaataaagagaaggcagccaccgtgtcgagcaacctagcaaagctgaaggacttgtacggtgacataactgcaaagaaggaagacagtgatgctgaaaagcttcaccgtgattcatgcgctgaggaggtcatcaggctgggaggccctcgatggaggtaactttgagacctgtagaactctggtttccgctttgttctgccagcctctctgtaggccttcttgaaaatgctctttatgttcccaaacttgatagagtcgactggtacttcggtatcttgacttgttgtcgcctgacatttgccattaatgtatgttgtttggtatgttattcctaagaattcctatgacattggaacgtactgtataaaccgtggtatccgagcttcatgtttgcttgatgcttatgcaaattgaaggttgaataagtttcagtttca

SEQ ID NO: 62489 - DNA, 544 bp, Zea Mays
cccgtattagctagacgccaatagtactgcgtcgaccaaaaatccattttttaaaacaaaactgaaaatgtcatttttattaaaatataacacaaaagactaataaattgtaaaaaagttggccgcagcgccgcccttcagacccttctcttcatcttcactctcctggtttattcctccgtgccgatctcgtcttctccggcgggaccatggcgccgtcctcctcccgattcgacgatccggcggcggtgaggcgccccccgcagcatgaacggaagccgccgtatatgttgcttctcccgctcgtctacgcccccgtcctccccctcatcaggatcgggctgcggcacaatcccgtagtgagggaccgtctcttctacggcgtcctcgccggcgcattcgcccacggcgcctacctcatatcggaactgtatgatgtggagagcaaatgatgggcatccctcgaaggatgaggggataagttttcaggatggaatggttgagcaaataaagtaattccagattgagaaatattttcagcgat

SEQ ID NO: 62490 - DNA, 919 bp, Zea Mays
aaattgtaaaaaagttggccgcagcgccgcccttcagacccttctcttcatcttcactctcctggtttattcctccgtgccgatctcgtcttctccggcgggaccatggcgccgtcctcctcccgattcgacgatccggcggcggtgaggcgccccccgcagcatgaacggaagccgccgtatatgttgcttctcccgctcgtctacgcccccgtcctccccctcatcaggatcgggctgcggcacaatcccgtagtgagggaccgtctcttctacggcgtcctcgccggcgcattcgcccacggcgcctacctcatatcttgtcgaagcatgtcgaactctcggtgccgctcaatttgtacccccaaaccccttccacacaccgcctcgccacatcgcagagccagagcaaaggaagacgacgcagatctcgccacgcgaacacagttagatcgagggagtgagtgagagagagccatgacggagctgttcgacacggccgtgaccagcctcctccacctgccggaggtgctggatcgcctcgccactgcagacggcgaccggcggtcgaccggccaccacgcggcgcacgaccacggccacggacacgtccacgggctcggcggcggcggcggagcgccggtggacatagtggagagcccccgcgagtacgccttcgtgctcgacgtgcccggcctctccaagtcagacatccaggtgacgctggaggaggaccgggtgctggtgatgaagggcggcagcgggaagcggaagcgcgacgaggaggaggacatgaacggcgaagggtgccgatacatccggttggagcgcggcgcggcgccgcggtcgttcgtgcgcaagttccggctgccggaggactttgtgggatcggaactgtatgatgtggagagcaaatgat

SEQ ID NO: 62491 - DNA, 469 bp, Zea Mays
gtgcattcagttcagttcttacttgatcatttcgtgttctcgtatgtgccatggccgagtggcaagctcaacgctggtattgttgtcttgtctcaaatgaagtccgattccacaagttaaccggaaatcttcatgggtgatagctgtgtcagattctttcgcgcatagggcaagtaatacaagtgatagctgtgtcagtttacccctattttcttgggcatcacttgtctaaataaagtccattgccggtgcttcatcgcgaacctccataatctcacttgtcgaatcatcgtgaattactgaattttatcagatgcacttgtctcatccataatccactcattccctattaatctcacatgtgtacgttcaactaaacactgctcctccgttctaatttagatcttgtcgaagcatgtcgaactctcggtgccgctcaatttgtacccccaaaccccttccacacacc

SEQ ID NO: 62492 - DNA, 1001 bp, Zea Mays
gcagtgcggcaccgcccagcagccgagcactgcggcactccggcgcgccttccgcttccaggtaataattatgccaaatcaaagggaaagtggacgaagtcacaaatttgtagatttaaaaagctattttagccgggcttctagtagtacaaacccaaacccaagtactcatggaagtggagttggccaagaggtgaacaatgaagaagtccaatatgaacaagatgtcagtggaacaggtagtacagtcaatgagtttcatatggatcatattatctctgatcccggtattcgcattccaattgatcaatttgctcctaatattagaagtgaagttaggagagcattcatagaaaaaggtccaacacaaccaattggtcataattttcctaaagcacatgataaaaggtcatttcaggaacattggtttaagcaacacaattggttggaatatagtttggtgaaggatagtgcttattgctattattgctatctttttagagatgattgcaaggatgagaaattctgtcatgacactttcacaaaaacgggcttcaagcaatggaagaacgccctgttgatatttagaaaacatgttgggggtccgagtagtttgcacaatcgggcaagatcgacttttgaggattttgataatcaaagatcaagtttaaaacataaagtcataactcatagcaaagatgcacttgtgaagtatgaaactcgattggaaacttctttgggtattgtaagtctgcttgcattgcaaggtgaaccatttcgtggccatgatgaaacggttacttcactaaataaagggaattttcttgagactcttgagtggtacaaaattagaaatgaggaagtgagaaaggcatttgatgagctttgtcctaagaatgcaaaaatgatttgagaagtgaaggttgggatccattgtttgaagaagtcaaagctttttgtgtggaagctggtattgatataccagatatggatggtccaat

SEQ ID NO: 62493 - DNA, 982 bp, Zea Mays
gcaccagaacaggcaacgcactactcgttcgtatctttaagcttgctgctgcagcgtaagaaaaagcagtctgcactcggtcggtcggtcgctctgttcagctagctgcatgctcggccaccatatctcctccagtacgttcgtcgttctccacgccgctatctggtctgcggtaagcagcagctagaggccgttgtgtaggctacacagaagatcatcgaggaggatgctggtgaagaagaacaacagcacggcgatggcggcgggcgtgctgccgctggcgtcgctgaaccacatcagcgtggaccagatcttcttccacgacccggacgccttcatgatcgaggtctgcaactgcgacaacctccccgtcgtcccgctcgccgccgccgccgaccagcgcgcgcctgccgtcctcggcgcctgcaagcgggccgcggcggcggtcggcgtcaagcagcagcagcagcaaagcagcggcggcgccgtgccttcttccgccgccccggcggcggccgcgcagcgcgtgccgtcggcggcgcaggcgcccatcgtccgcgtcgccgaggagtcgacgtcgcacatttcgtgcgcgtgattcttcatgccaaatggcgaggacggtcagtgtcgtgccggcctgccggatgccgtcaccgcgacggtgaccgcgcgcactgcatgtctgcgtcgagccgtgacgaagcaggcacgatgcgtcgagtcacggcaaaaagcgtctagcgcgtcgtctctgtatatgcgagtgcgtcgtcgtgtagctccatgtgcaagcaaactactgcccttttgtagtaaagaataaaaccatgtgaagagacgagtgcgtgcatcattggatatctcagctcgatctccgacccatgcatctccatcgatccaccatgtcttcacattttttttcgacaaaacacgcatattttacccccacaaaatacacaagactttttttttttggaag

SEQ ID NO: 62494 - DNA, 1466 bp, Zea Mays
aatagggaacacaagtgcgtcgtggtggtgctggcggttttgagttttgacccaccattcccgcattccttctcttctgcagtggcggcagcggcagccaggaaacgcaaacgaggaagaggagcggtcgattcccaatctttatacggcacagtgtcaagaactgctgttgcacctttggagacgatcagaacgcatttgatggttgggagtaatgggaattcgtcgacggaggtgttccagtctatcatgaagcatgagggatggactgggttgttccgtggtaactttgttaatgtcatccgggtagccccaagcaaggcaatcgagctttttgctttcgatacagctaacaagttcttgacccccaaatctggggaggaacggaagatcccagtccctccttcactagtggctggggcatttgcaggtgttagctcaacactgtgtacataccctctggaattgattaagacacggttaactatacagagaggggtgtatgacaatttccttgacgcgtttgtcaagatcgtccgcgacgaagggcctactgaactctaccgaggcttaaccccaagtctgattggagtggtgccatatgctgcaaccaactacttcgcctatgacaccctgaagaaggtgtacaagaagatgttcaagacaaatgagattggcaatgtcccaacgctgctcatcgggtctgctgcaggagctatctcaagctcagcgacattccctcttgaggttgcacggaagcacatgcaagttggagctgttggtggcaggaaggtttacaagaacatgctccatgccctcctaagcattcttgaggatgaaggggttgggggcctctacaaagggttggggccaagctgcatgaagttgatgcctgctgctgggatttcctttatgtgctacgaggcttgcaagaagattctgatcgaagaagaggatgagtgaagtgtgtgcggatgcattgcgtcattagaactcagttttgcgacatcctgaattcctgatagcaggcagcttctttcggtatttctttgagtcgactggtgctggagttggttgaaactcaagactgaggttactgctgcagtcagcataagttctttttttttgatgagtcgaccaaggggggagaggcccccaccagatccactgcattatgtagctcttcgagttcaaagtacacgccaagcacatattcttaacccccactttgcacccagtttgatcttataaattcacctgtttttttccagatttaaacttttacttttgggtacaagttgtgttgtcgaaactcatgactgcgatgtgtgaaaacgttcagatgccataggcaatcataattcacaagtggcaaagctgcacctgacctgtgttcttgtttctcatatgttggtctgtgatgtcacaacagtgaccattaattccacctaaatgaaaaaaaaaca

SEQ ID NO: 62495 - DNA, 2184 bp, Zea Mays
caaaatctcacactagtccgtggcactgctcaagtaaagaaaaccagctagacaggaaaaaaaatagggaacacaagtgcgtcgtggtggtgctggcggttttgagttttgacccaccattcccgcattccttctcttctgcagtggcggcagcggcagccaggaaacgcaaacgaggaagaggagcggtcgattcccaatctttatacgattgattctttaccaattgtatcgccattccttcctgttcattgggcgtggggtttcaacctaataaatcggtccttttccgcgcaactagtggggagtggagccgctgagaaatagcaccccttttcctgccccaagatgcctgtttccgcttcttttccacgccacaccttttgaaaatccttcgccgtcagctccccttttgcagcactagttgtttctcagcctgcttggagtttggagggggcagagaacaccatcctgtcgattcaagaaaaaggctgagccgatgggcagtaagagcggcgtgcgactgcaatgcgccgaggccaaatcggcgacggattggagctgctgcttcctggccctgccaccggcagcaccatccggtgttgatggcgatggcgggtttaacctctcgtggaacctccgcaagtccttccacccgccggcgggactcttcgccagcatgggccagcaggttggggttgggttcccggggacttcttctaggtccccgtcgccggagacacctcgggatccgtacatgaagtacgtctcgccggaggttgtcgagacacctccgtcgggggaaggggtggcgttgagggacaaggggaagaagaaagccgtgaagctcaggattaaggttgtgaatcatcacctcaagaggctgatcagtggagcactcgcaggcacagtgtcaagaactgctgttgcacctttggagacgatcagaacgcatttgatggttgggagtaatgggaattcgtcgacggaggtgttccagtctatcatgaagcatgagggatggactgggttgttccgtggtaactttgttaatgtcatccgggtagccccaagcaaggcaatcgagctttttgctttcgatacagctaacaagttcttgacccccaaatctggggaggaacggaagatcccagtccctccttcactagtggctggggcatttgcaggtgttagctcaacactgtgtacataccctctggaattgattaagacacggttaactatacagatcgtccgcgacgaagggcctactgaactctaccgaggcttaaccccaagtctgattggagtggtgccatatgctgcaaccaactacttcgcctatgacaccctgaagaaggtgtacaagaagatgttcaagacaaatgagattggcaatgtcccaacgctgctcatcgggtctgctgcaggagctatctcaagctcagcgacattccctcttgaggttgcacggaagcacatgcaagttggagctgttggtggcaggaaggtttacaagaacatgctccatgccctcctaagcattcttgaggatgaaggggttgggggcctctacaaagggttggggccaagctgcatgaagttgatgcctgctgctgggatttcctttatgtgctacgaggcttgcaagaagattctgatcgaagaagaggatgagtgaagtgtgtgcggatgcattgcgtcattagaactcagttttgcgacatcctgaattcctgatagcaggcagcttctttcggtatttctttgagtcgactggtgctggagttggttgaaactcaagactgaggttactgctgcagtcagcataagttctttttttttgatgagtcgaccaaggggggagaggcccccaccagatccactgcattatgtagctcttcgagttcaaagtacacgccaagcacatattcttaacccccactttgcacccagtttgatcttataaattcacctgtttttttccagatttaaacttttacttttgggtacaagttgtgttgtcgaaactcatgactgcgatgtgtgaaaacgttcagatgccataggcaatcataattcacaagtggcaaagctgcacctgacctgtgttcttgtttctcatatgttggtctgtgatgtcacaacagtgaccattaattccacctaaatgaaaaaaaaaca

SEQ ID NO: 62496 - DNA, 5925 bp, Zea Mays
ccagtggctaccgaccacagtgatgaaattctcctctgctgccttggaaatgatgtactcaagtaccatgtcatggacccgacaacttttgacgcttccattgctgttgtgctcaacgggcctcatcatcttcctttcaatgagctgtttgaagcatgtgtcagcaacatcctccacactcaaaccttgcttctcactgacgaaaccttccgctatccacctccgaatcagccgcttcctgctaacttcacggcccttaggaaatatgctaagatacagacagcaagtcttgagatcactaggcaagtcgttgtagcaatagtttattatcctcataaattcctctggtttatgacatttttctggctccggaaacaaggaattgcaaacggcaatccattcatctctgatcatcagtggcttggatgccaccacacctgccatggtaactatggccaacggcaagccaccacacatctgccaaactctgtctggcaccttggtctggtttgattgtctggcactattacctctacactcggacaaggttttgatgaataaactgttggcctcttcaccggaaagaacatcaaccaaatgaatatgatcttgatctttatgtgcagagcatgtcgtggcaacagcttgaaaccgtgtggtgacaattattctgcttcccttcttattttcttcaggaaaatatttccaaatactttgccatgttgatgatgaccatacatcatcaattaacagtaagtacctgtcaaggaatacgaaacaaacacacatcaggattagtggattaccatatatttccacatagcagtctcacaaatgttgagtgggctttggattcgggagatgttttgggagagggcatgcttgactagaggccggcactatgtggtggcaatatacatgaatactggtatttggcttattaacgcattctactagtatcatgtatggaaacaaaaatgaaaggcacatgaagcagcagacagccagggcgcaggcggggagtgttatgaccggccgccactacaggcatcggacaacagcagagcggcggccaaaaataggcatgcagattagttagataaggattagaagattaaggagataaggtttgttagagagaaaagaggggatttcatgcagattagttagataaggtttgttagagaagaggggatctcagatttgatctctttagataaggactagaagggagtataagtctatatgaattaagcagaaaactatttagcttacttcctccaaaggaagcagtcgagttttcctctcccaaagtcgtcgtccagcgtccgccgaagaacagcgtggccacagcgccccctgcgccagtccgccaagcgcccggtcacggcgcccctgcgccaacccgcaacgcctcatccctacaatctgtgcagtctctctggtaggagttataatcctatcactgcggctctctacggagttacctgtcccgatgcttagccctcacatgatcttccctttgcgtagggtcaccaacgaggattagtcagaaccttgcacggtcctagatacctcggtaaaatatcgatgcgtccacgggagtttgcaatctctacctctgctctttagcttctacagttacattgattacttaagttgcaatcttaccattctcagtagaatataggattagaacttagattgcataactcttttgcgatagagatagcaacagttagataaaacctagattgcacattcttgtttagttatttgcattggttttgtttaggagatttatttgtggcctagactaacgagatttttagaagtcctaattcactccccccccccctcttaggcgtttgtgttcttttcacttgggttgcctgaaaatggaattagtgggttcactcagttctttgctcaggcacttcggctgttttgttaaatggtgtccctggcaaaaatttcaatgtagaagaggggtgcaccagggagaccctttgtcccctttgctctttgttttggctgctaagcttcttcaatacattattaacaaagcagcatgtattggtaccttatcagttcctgttatgacccacagccagtcagagttccccataattatgctgatggtaccttgatcattatgaaagcatctcaacgagagttattttgcctaaaggggattcttcattccttctcaggattgacaggtcctaaagttatttacagcaagtagtgcctccttcctatcaacttggacgctattaaaggcactcagttggctgctgtgtttagttgtcaaattggttccttccccttacttatcttggtttgccaattgggacctctaggcctaaagttcaagattatctccctgtcaacaacaagattgaaagaaggttgaacatgaccagcatgtggctatcgatggctgggaggctgacattggtcaactccactttctgggcaatgccgatttatgcaatgtgcctcagaagctcccatcctcggatatcaactctattgatcgtgcaagaaactgtctctagaaaggaagtgatgttaatgtgaaatcaactccccttattgtctgggacaaagttacctctcctaagagcaaaggagatctgggagtgcacaatcttaaaattcaaaacagggcccttctgatgaaatttctgcataagttctatggtaggcatgacacaccttgggtgaatcttataaggaacatgcacaaaagatcgggtagaattccccattgctctcccgaaaaaggttccttttggtggaaagacatctctagactgattgatcattttaggggggttgctatgcccgaagctgatgatggtaagagtaagaccatacttctctggcaagatgtttagaacaactctttgcccaaacaggtttacccttgcttatactcgtttgctaaaaagaaggattgctctcttatggagtatcttgggaatccaactctcgaggaaaattttcattccccattatctcctgaagttcatgaggcatatgtggagttgagcaactttgctgccttgattcagagtgacatgagtggacaagacaggtggacttactcctggggaaataacaatttctgttccaccagagtctacaatttgaattttcaatgtatacagccacctcctccttttacctggatctggaagtcaaaagtggccaaaaagcttaaagttttcatttggctggtattcagaggcagaatcaactcaaagaatcttctaaggagaaaaggttatgcattgacaaataatgatcacagttgcactctttgcaatctgaattgtgaagagactacttattgcttgctctttgagtgtcccttcagtgttgagtgctggaactttgtgggtatccaatgggaccatgctctagacttctttcacatggtggctaatacaaggaatcaattcacaatcccttcttcatggaagttctggtagactctgcttgggaaatctggaagcaacggaatgcagctattttcagggaatatgtcttgtctttcaactcctagaagacttgcttcaatgatacgctgaagcttcagatgctcaaatttagcccagaccttaaattgcttgtgcctctctggctaacttctctctgacctcgctaaatcttagtagttgttgttttttattccttattcattctctgttttttgttttgttcttcttattgtatagtcttgtcccaccttttttataattattttaatatattttactgttgtgggggtttcccctatagcctttactatcaaaaacaacttgtatgagattttggtatttgagtgacaacataaccattgtgactaatatagcttgctaaaatatttcatttagttccaatgatgaaagtaatggacttggtaaacaaacacctcaaaggagtgatcgagagtacaagagaagacctagaataccaactagaagacctaagacatcacactgaataaaccacagttcagaattttcaagaagttgatggcctagacaatggagaaacatgcaccgaacaaattggtgaggaaagtaatgaaaaatgaagaccaagcaatgatgcacaactcttagcactagatggtccgattataagaatgttagtgaacattgaaaggtccagtgattagaagagcttggtaaaggaaatgcataatgcattggatggtctaacgattcacaagattaaatgacctgaggagatattgagtttgatgatgacactgaatcgattgcacgcacctgacagtctagttgtacatcgaacacataaatagtcaaattggagcaacagttagtttgatggttggtgctcgttttagtgtagttaagagttactagaatatactcttggatagagattcattcctgtgaagctctagccaataaagtgtttaggtgcatatatagtatggcttagtgcttgcaagcgcttgattatactacttagtacattgcttttggttgtgacaaggtttgtataacatttgcacacaccgatggtatcaatacttgtgcataccattgttctacgtgtggggtttgcaagtcctgcgaggtccatgtatatggacttgcacgaaactgttcacgcactgtaggcacagtggagttcgaaatagaaaatgtgggatagaaagtttggtgaggtcagtcttgagaacccaattatgtgtggggaaagtcaagactacacatagaacttttcataaaagtttctttatacccatgattcataaaagttagaactatttactcatcgttgccatcatacgctggatcaggggcaggcacagaaggataatgggcattatgtcaaatacccatgattcacacaaaaacaatttccatacactatacgtacatttttgacaagggaaaattttctttattcttcaaaattttgagcacctaatgtgattttgaataccgaacgtctggatcgtagatccgcctctgcgctggatcataaacctacccaagctactaactagggaaataaacaagacattagaagttcagggcatagataccaaaattaatgtatcaaggctgaacaatatatatcgggacaaaacttgttgaagctaactaaaaaccttactaggaaaaggaaaagaaagtgaagtagaagacatgtctttggaatcaattgactgctctctgcgatgaagacagaagacattggcaatgtggatattcagaggtgaagaataaagagcaaagtccattttacaaactggcattcgattttcaaccttgaactatgaagttaggtatctaggtccctcaaactataaaaaccagacaaagtacaccctcaaacttggtttaagtgttggttttatatttattttatagagataatataataatgtttaatttctaaaaatcatgtcaaattcattttttatccgaaaaatatgaaacttgtaccaaacttttttcctaaaaatacaatgtatccattagtgctatattgaaatctacaatggatcttgcttgctcgtatatcaaatgctctagttagagcaatagaataataggcgtggtaataaataggttctaaatatttccatataaagcaccaaatgtaaaaagggcgtacccagtgtcgtaggcttcccgcactatacggggtctgtggggaagggtatctttaagcgtcaagtcttacccgcataatatgcagaggctgaggctcgaacccggaaccttccggttacagacggtaggctctaccgctgcaccaggcccgcccttctataaagcaccaaatgtagacgataataatatattaatatatagaacagtttaaaagtggtacagggagagaaaagggttgtatatattaattaactag

SEQ ID NO: 62497 - DNA, 236 bp, Zea Mays
acctcctactagtcttacccttgctcttggcccccaagagagtcggtgcctggagcgtatgggtcacgtggacgtcgtctacatggtgtgagctgtaacggctgagttgtgggagcgtcctgcagctgtgacggtccaatcaggtcttgaccagcagcgtcgttgtcgtcgtccacgtctgcaaacgtatcccgcgtcgatcgcgaggagctctgtccagctgtagaaggtccaac

SEQ ID NO: 62498 - DNA, 7567 bp, Zea Mays
ctttcctcgatatgcccaagcgagagagagaagagatagagagagagattccttagttgattcttctgtggatgaagatgaaatctacttctgaaatcttgccaccgtccaactctgtttgatctaatctctatatcctccggccaccaagttcttgtcaaataagcgagcacagcaagctagccatggagttcgcaactggagcgctaggcgcccttcttcccaagctctccatgctgcttcatggtgagtacaacctggagaagggcgtcaggggggacatccagcgcgtcatgagcaagctcgagcgggttcatgctgccctccgccatgttggcgaagtgcctgtgccactggagcagatcattcgtcctggtatagtcaatatgtgggcacgcgacgtcggggagctatcctacgacatggaggacttcgtcgacaccttcctggtgcgtgtccaaggccctgaacgcaccagcaaaagaaggttattcattaagatgatagatatggtcatgaataatcgccatgatgagatcgccccagacatcaagcacttcgaaaagcgcgtccaggagatggatgatcgtcgtcaaaggtacggtgttggtactattgttcctaccgtcaaaaccttgttttatcctcgcataattgctctaaactacaccaaggccacggaccttgtcggcatcgatgaggcaagggaggaactgatcacaaggttgaccaaggaatatgacacctccactgaacaaaggcaagtctctatcgttggttttggaggacttggcaagacagcgcttgcaaaagcagtttataacaaacttaaagctaaaggggaattccattgtgcggcctttgtgtcgatgtctcggtatcctaagctcgtagaaatcttcaaggaattgctttatgagcttgacaagactgagtacaaggacgttattagcaccccaatggaaatagatgaacttataaatctagtgcacgaattccttaataaaaagaggtaccttatcgctgttgatgacatatgggatactgacgcatgggcaatgatacgatacgcttttgctgagaataagctaggaagcagaataatcgtaactactcgcagaattgatgttgctgagtatgtaggtggttgttgctatatgatgaaacctcttactcgagagaaatcaaagatattattctatggacgaacatttggttctgaaggtaaatgccctcctgaactttctcatgcgtctgagaaaatattgaataaatgcggaggcgtgccattggctattattactatatctagcttgctggctagtaagtcaaaaaacataaaagaatggttctatcttgctgattctattggttccggaatactagaaagaagtgctgaaatggagattatgtggaagatactgctgcgtagctattctgatctaccagcacgattaaagacatgtttgttatatctgagtattttccctgaagattgtgagattgggatgcatcggttaatatggaggtggatagctgaaggttttttcaatggagaactagcacatggtgggctctttaagattggggaatcttgtttccacgagctcataaggagaagcatggtgcagccagtaacacttgaaggcacgggtcttgtatatgcttgtcgtgttcataatatgtttcatgatttgatcctctccatgtcacatgaagaacaatttgtttctgtagtcaatgaaaaatttggtcctcttgatgttctttctcggcggttagcattccagaacataaaaaaaagtcagtacagacttgtggaacatccacggctggcacaatcgaggtcacttaatgccattggatgtcctatatacgcgatacctccaattgaaagctataaatcattgcgtgtactggatttcgaaaattgtgcaggtattgaagaccatgatcttgttcatcttgggaaattgcatcacctcaagttccttgggctaagaaacacgtttatcggtaagctgccggaaggaatagggaacctcaagtttctgcaaacattggacctcgatggaactggtgtggaagaattacctcaagccttgcataatcttacagaattgatgtgcctaattgctgactggagaacgagagtgcccaattggattggtaacctcacgtccctgcagcacttggtgatttatcctggtgggcatgacgatgaggattctgcgagcaggtttgttaatgagctgggaaagctgagacaactaagggtgctccgttttttgataaaagcacaagatgaagggcagctgagagatttgctagagtccctatcgaatctgccagagatcgaggctatacattttgattactatggagtacagttaaatagagtgatactcacgtcgtctacatctgttacccttccccacgtcctctacatctgttacccttccccggagcgggattacaacctgccccagagcggccggcgctggaggctggccgtcccgtccgccgccggcgcgtccagtctcgcctcgtcgctctcgcgctccctcaggtggaagcgccggctcccgggtctcccctccctcaccctgcgcagcggctccgcggccgccgtggtcgacgctgtcgcgttccgcgtcatgtacgtcgtcgaggccgtcgtgctgggcctcgcgctctcctgcttcttcctctgcgctatgggtggttcttgcatgtttaggctctgcatagcaaacacggaggaggactggaggccgggaacggagcagtacaagttcatcgatcgaagcagccctggatctgcactccttagagctctctcccaggtgggcacttttctcagcttcatagagctgtcctccattccccagactagaccacgctctgccaagcaatccatggtcgggaaccccggcgacgtccgcgcggtggtcctggacccggccgccggggccctcgcgggcctccgccgcggcggcgtgctggtggactgcacgagctcctccccgtccctcgcgcgcgaggtcgccgcggccgcggccgcggcgggctgccacgccgtcgacgcgccagtctccggcggcgtgctgcggactgcacgagctcctccccgtccctcgccattacagagctctctggtgcgtttctgaagcgaggagaaggagagagaggtcttgtgaggcagcggcggctgtatcaacggcgctgggacgggaaagcagcagagatctcacggcgctgggacggtggctgtatcaaaaacactaatcgtcgttcactactggtaatagagtgatcttgtctgttttagagtgtgggctattccctgcttttccataacagataatccctcgcctacgcctccaaatcgtcgaagccgcaccgacggctttccataatagcaaatttctcattcgttccatggaattgcgctggttggagttctcaaggctgcctctttggattaatcctggacaacttcctaacctctaccacttatggctgatggtatctgatgcggaagagcgggatctggaaatccttggggggtttccagtgcttcactccctccacttgttgattgtgaatactgaacgtgaacatgtcatgacttgtggctgtggtggattcaagaatttgaaatgctgcagtataactaaaccgctgaaatttgtacatggagctatgcccaggcttgaagtcctcgatttccatttcagtgtgcaactcctaacggattcaaaccaagaatttgattttgactttggcttgggaaacctacattggcttcagcaagccatcgttcaaatcacagcccttggtgaggaggtggagtctgtggggagagcacaggtggctctgcgggatgcaatacgtacccatctcaaccgtcctacccttgaaataaacttatttgggcaaacaatacctccagagttaccaaagcaagacgacgatggagcgaaaattgtggagatatcaccggccgagagtagtcgtcaagctcaagagcgggagaaaagaagcatcgatgtggcgacgaagaaagcaacacgggtgccgtctttttacacaaagtcatcaattgatgagccaatggatcagctcataaacatgctatctgtggttgatgacgaagcctacactaagaacataaagatactatctattgtaaggtctgagggactggggaagactactctggcccaaaaagcattcgaagagctccattcgcaatttgaccgtggggcgttcgttctactaggccagaatcctgacttgaggagagtttttgctgacattctccgtggtcttgacaagcaaaggtacatagatttcccagtggcaatattggatctagtggacctgatctggctagtccgtaaatcgctcataaacaaaaggttctttattgtatttgatgatatatgtgatgtaaaagcatgggaaattataaagtgcgctttgattgaaaataacaaccacagtgtagttcttacgacaagtcgcaacactggtattactgaaattattggtggcagcaagcaattacaacctctatcagcaactatctctaaaaatctactctgcaaaaggttatttggatcggcaggcaagtgtccttctgaactagtaaatatatgtgacaatcttgtagaagaatgtggtggaatactatctgtgatcgacgaaactgtgacattgcttgcaagtataccaccaacagtggagaactgggaggcagtgtacgccagaagaatgttggatcggtcttatcctggtttaactgacagtctaaagaattgcttactctattttactatgtttcgaagaggacatgagattagtggagaacacttaatatgtgcatggatagctgaaggttttgtacatgggcaagaggtagcagagacctaccttagtgatctagtaaaaaagaaattaatcgatgcagtggaggttgatgctggaggaaaggtcctcacgtgccgcatgtatgacttggtgcatgactttatcgtctcaaaatcaattgaagaacgatttgtttatattttaaatgactcggaaggcagagatttgtcagaagcagttcacgttcaccagcgactatacatccagggacataataacaaagaactagacctgcaaattccttggctgccccaagtgaagtcacttgtctcctgtggtactgcgccatccatcttaaagtttaagggtctacatgttatggatttaggggcctgtgaatctttgcaggctagtcatctcaagggtataaataatgtaagttctttgagatatctggtcataggaggtaagtgtatctctggcatccctaaggaaattgcgaagctggaacatttgcggacactagatttaagtgcaagtggtctaaatgaattgccagaatatgttttcatgataagaaaattggaacgcctaattgttaatagtcagatgaagatatcatatggtattgcaaagatgtctgctttacaggagctaggcgatatcaatgtcaccgacccagagttgctgaaaagtctctgtaagctaaccaaattgagggttcttagaatttccatatggtcatgggatgatagtttgaagaactattttaaacaactgtgtgacaacttgcgttcactggttcagtgcacggagaacatccagagtctctccataatgacatgctgctccctggttttcatggatgatttgggtgagaattggacccctcaatgtctccagaagctcgaggtcggttgcagcgcatttgacatattgccaagttggtttggctcactttctagtatctccacgttaacaatcgaggtctacaagctgtcacaggacataattgatacgctcggaaggctggctggtcttggttctctatccctgacatcgaaacaagtaccaaaaggatactttgtgatcggctctgacaggttcaataagctacagagcttaaagtttgtgagcaatgcaatggtagagatgtttccacgtcaacaatcaaatggcacggaacagctcaaaaggcttatgattgtgttccatgcttcacgtacacaagatgtgaacaaagatttctgctttggtttggagaacctgtcttccctagagcatgttcgtgttgaaataatttgtttcgatgccagccataacatggtgaaaaacgcagaagctgcagttcagaaagctatatctggcacaagtatcgcaaatctggaaatacgaagacttcaggaaaatagtatgacacaggacgaagcggacctctgtgatgcagtacaagagcagaataatcagaagcaccagaaaatgaagagttctatggagtcccaggatgggtacctcacttctttaccgaaccaggaaagtgcagatgttgttggctccgatagtattgtggaaccactagtgaatgaaatgaactcgcagacaattaagagggatcaatccacgaatttcagtgaagatgaggacttaatgttggtttctagctaccttaatgtaagcaaagattctattactggaagggataaaaaagaaggcacattttgggaaagagtatgggaatactataacaagaataggacattcgagtccgatcatagttggtcgtcattgaaacatcgctggcttgcaattcagaaggaagtgaatatctttcaaggttactatgatgccatagaaaggaaaaatcaaagtggccagacaagtgatgacaagcatgctgaagcagaagtagaattccgagaaaaacaagggaaggctttttctgtattccatgtgtggatgattctaaggcatgagccaaagtgggcatttagagaatcaaagatcaaagaccagcatgaagcaaacaatgctaatactgatgctcctgccaacatttatagaccacaggggaggaaagctgagaaggaaaaggctcgtgcgagaaagcatggtggatctgatgttgatggtgatccgttcatcgaagaagtaaaaaatatgagggaagcacgggaagaaacagaacgagaccgaaagacccatgatgacaagttctatgagttggaaaagagtaagcttgaattggagcgagatcgacatgacaaagagataatgcaaacagacacaagcacaatggatgaagaatcgaaacaatacttcaagttgatgaaacaagagattttggctcgccgtttcgggagtagtcagccatagttgttagctgttggaaacttagatagtattttgtttttgccagacatctgttattgataatcttgtgaacttttacatatggcacctgtcaactacttcctcctttctaaaatattattcgttttagggtgttaatagattcatacaatatttgatgtatgtattttatatatgtgtctagattcgttgtctaagggtcttctagtctggcattgcctgtacagtcataatttgagcacttcctattttgtttggtggaaagtactgtgatcactttcattgcctctgctttattgtaccatgctaaactgggtcgatt

SEQ ID NO: 62499 - DNA, 4839 bp, Zea Mays
ctttcctcgatatgcccaagcgagagagagaagagatagagagagagattccttagttgattcttctgtggatgaagatgaaatctacttctgaaatcttgccaccgtccaactctgtttgatctaatctctatatcctccggccaccaagttcttgtcaaataagcgagcacagcaagctagccatggagttcgcaactggagcgctaggcgcccttcttcccaagctctccatgctgcttcatggtgagtacaacctggagaagggcgtcaggggggacatccagcgcgtcatgagcaagctcgagcgggttcatgctgccctccgccatgttggcgaagtgcctgtgccactggagcagatcattcgtcctggtatagtcaatatgtgggcacgcgacgtcggggagctatcctacgacatggaggacttcgtcgacaccttcctggtgcgtgtccaaggccctgaacgcaccagcaaaagaaggttattcattaagatgatagatatggtcatgaataatcgccatgatgagatcgccccagacatcaagcacttcgaaaagcgcgtccaggagatggatgatcgtcgtcaaaggtacggtgttggtactattgttcctaccgtcaaaaccttgttttatcctcgcataattgctctaaactacaccaaggccacggaccttgtcggcatcgatgaggcaagggaggaactgatcacaaggttgaccaaggaatatgacacctccactgaacaaaggcaagtctctatcgttggttttggaggacttggcaagacagcgcttgcaaaagcagtttataacaaacttaaagctaaaggggaattccattgtgcggcctttgtgtcgatgtctcggtatcctaagctcgtagaaatcttcaaggaattgctttatgagcttgacaagactgagtacaaggacgttattagcaccccaatggaaatagatgaacttataaatctagtgcacgaattccttaataaaaagagtgtgcaactcctaacggattcaaaccaagaatttgattttgactttggcttgggaaacctacattggcttcagcaagccatcgttcaaatcacagcccttggtgaggaggtggagtctgtggggagagcacaggtggctctgcgggatgcaatacgtacccatctcaaccgtcctacccttgaaataaacttatttgggcaaacaatacctccagagttaccaaagcaagacgacgatggagcgaaaattgtggagatatcaccggccgagagtagtcgtcaagctcaagagcgggagaaaagaagcatcgatgtggcgacgaagaaagcaacacgggtgccgtctttttacacaaagtcatcaattgatgagccaatggatcagctcataaacatgctatctgtggttgatgacgaagcctacactaagaacataaagatactatctattgtaaggtctgagggactggggaagactactctggcccaaaaagcattcgaagagctccattcgcaatttgaccgtggggcgttcgttctactaggccagaatcctgacttgaggagagtttttgctgacattctccgtggtcttgacaagcaaaggtacatagatttcccagtggcaatattggatctagtggacctgatctggctagtccgtaaatcgctcataaacaaaaggttctttattgtatttgatgatatatgtgatgtaaaagcatgggaaattataaagtgcgctttgattgaaaataacaaccacagtgtagttcttacgacaagtcgcaacactggtattactgaaattattggtggcagcaagcaattacaacctctatcagcaactatctctaaaaatctactctgcaaaaggttatttggatcggcaggcaagtgtccttctgaactagtaaatatatgtgacaatcttgtagaagaatgtggtggaatactatctgtgatcgacgaaactgtgacattgcttgcaagtataccaccaacagtggagaactgggaggcagtgtacgccagaagaatgttggatcggtcttatcctggtttaactgacagtctaaagaattgcttactctattttactatgtttcgaagaggacatgagattagtggagaacacttaatatgtgcatggatagctgaaggttttgtacatgggcaagaggtagcagagacctaccttagtgatctagtaaaaaagaaattaatcgatgcagtggaggttgatgctggaggaaaggtcctcacgtgccgcatgtatgacttggtgcatgactttatcgtctcaaaatcaattgaagaacgatttgtttatattttaaatgactcggaaggcagagatttgtcagaagcagttcacgttcaccagcgactatacatccagggacataataacaaagaactagacctgcaaattccttggctgccccaagtgaagtcacttgtctcctgtggtactgcgccatccatcttaaagtttaagggtctacatgttatggatttaggggcctgtgaatctttgcaggctagtcatctcaagggtataaataatgtaagttctttgagatatctggtcataggaggtaagtgtatctctggcatccctaaggaaattgcgaagctggaacatttgcggacactagatttaagtgcaagtggtctaaatgaattgccagaatatgttttcatgataagaaaattggaacgcctaattgttaatagtcagatgaagatatcatatggtattgcaaagatgtctgctttacaggagctaggcgatatcaatgtcaccgacccagagttgctgaaaagtctctgtaagctaaccaaattgagggttcttagaatttccatatggtcatgggatgatagtttgaagaactattttaaacaactgtgtgacaacttgcgttcactggttcagtgcacggagaacatccagagtctctccataatgacatgctgctccctggttttcatggatgatttgggtgagaattggacccctcaatgtctccagaagctcgaggtcggttgcagcgcatttgacatattgccaagttggtttggctcactttctagtatctccacgttaacaatcgaggtctacaagctgtcacaggacataattgatacgctcggaaggctggctggtcttggttctctatccctgacatcgaaacaagtaccaaaaggatactttgtgatcggctctgacaggttcaataagctacagagcttaaagtttgtgagcaatgcaatggtagagatgtttccacgtcaacaatcaaatggcacggaacagctcaaaaggcttatgattgtgttccatgcttcacgtacacaagatgtgaacaaagatttctgctttggtttggagaacctgtcttccctagagcatgttcgtgttgaaataatttgtttcgatgccagccataacatggtgaaaaacgcagaagctgcagttcagaaagctatatctggcacaagtatcgcaaatctggaaatacgaagacttcaggaaaatagtatgacacaggacgaagcggacctctgtgatgcagtacaagagcagaataatcagaagcaccagaaaatgaagagttctatggagtcccaggatgggtacctcacttctttaccgaaccaggaaagtgcagatgttgttggctccgatagtattgtggaaccactagtgaatgaaatgaactcgcagacaattaagagggatcaatccacgaatttcagtgaagatgaggacttaatgttggtttctagctaccttaatgtaagcaaagattctattactggaagggataaaaaagaaggcacattttgggaaagagtatgggaatactataacaagaataggacattcgagtccgatcatagttggtcgtcattgaaacatcgctggcttgcaattcagaaggaagtgaatatctttcaaggttactatgatgccatagaaaggaaaaatcaaagtggccagacaagtgatgacaagcatgctgaagcagaagtagaattccgagaaaaacaagggaaggctttttctgtattccatgtgtggatgattctaaggcatgagccaaagtgggcatttagagaatcaaagatcaaagaccagcatgaagcaaacaatgctaatactgatgctcctgccaacatttatagaccacaggggaggaaagctgagaaggaaaaggctcgtgcgagaaagcatggtggatctgatgttgatggtgatccgttcatcgaagaagtaaaaaatatgagggaagcacgggaagaaacagaacgagaccgaaagacccatgatgacaagttctatgagttggaaaagagtaagcttgaattggagcgagatcgacatgacaaagagataatgcaaacagacacaagcacaatggatgaagaatcgaaacaatacttcaagttgatgaaacaagagattttggctcgccgtttcgggagtagtcagccatagttgttagctgttggaaacttagatagtattttgtttttgccagacatctgttattgataatcttgtgaacttttacatatggcacctgtcaactacttcctcctttctaaaatattattcgttttagggtgttaatagattcatacaatatttgatgtatgtattttatatatgtgtctagattcgttgtctaagggtcttctagtctggcattgcctgtacagtcataatttgagcacttcctattttgtttggtggaaagtactgtgatcactttcattgcctctgctttattgtaccatgctaaactgggtcgatt

SEQ ID NO: 62500 - DNA, 6297 bp, Zea Mays
cttgccagtagccgcactttcctcgatatgcccaagcgagagagagaagagatagagagagagattccttagttgattcttctgtggatgaagatgaaatctacttctgaaatcttgccaccgtccaactctgtttgatctaatctctatatcctccggccaccaagttcttgtcaaataagcgagcacagcaagctagccatggagttcgcaactggagcgctaggcgcccttcttcccaagctctccatgctgcttcatggtgagtacaacctggagaagggcgtcaggggggacatccagcgcgtcatgagcaagctcgagcgggttcatgctgccctccgccatgttggcgaagtgcctgtgccactggagcagatcattcgtcctggtatagtcaatatgtgggcacgcgacgtcggggagctatcctacgacatggaggacttcgtcgacaccttcctggtgcgtgtccaaggccctgaacgcaccagcaaaagaaggttattcattaagatgatagatatggtcatgaataatcgccatgatgagatcgccccagacatcaagcacttcgaaaagcgcgtccaggagatggatgatcgtcgtcaaaggtacggtgttggtactattgttcctaccgtcaaaaccttgttttatcctcgcataattgctctaaactacaccaaggccacggaccttgtcggcatcgatgaggcaagggaggaactgatcacaaggttgaccaaggaatatgacacctccactgaacaaagctcgtagaaatcttcaaggaattgctttatgagcttgacaagactgagtacaaggacgttattagcaccccaatggaaatagatgaacttataaatctagtgcacgaattccttaataaaaagaggtaccttatcgctgttgatgacatatgggatactgacgcatgggcaatgatacgatacgcttttgctgagaataagctaggaagcagaataatcgtaactactcgcagaattgatgttgctgagtatgtaggtggttgttgctatatgatgaaacctcttactcgagagaaatcaaagatattattctatggacgaacatttggttctgaaggtaaatgccctcctgaactttctcatgcgtctgagaaaatattgaataaatgcggaggcgtgccattggctattattactatatctagcttgctggctagtaagtcaaaaaacataaaagaatggttctatcttgctgattctattggttccggaatactagaaagaagtgctgaaatggagattatgtggaagatactgctgcgtagctattctgatctaccagcacgattaaagacatgtttgttatatctgagtattttccctgaagattgtgagattgggatgcatcggttaatatggaggtggatagctgaaggttttttcaatggagaactagcacatggtgggctctttaagattggggaatcttgtttccacgagctcataaggagaagcatggtgcagccagtaacacttgaaggcacgggtcttgtatatgcttgtcgtgttcataatatgtttcatgatttgatcctctccatgtcacatgaagaacaatttgtttctgtagtcaatgaaaaatttggtcctcttgatgttctttctcggcggttagcattccagaacataaaaaaaagtcagtacagacttgtggaacatccacggctggcacaatcgaggtcacttaatgccattggatgtcctatatacgcgatacctccaattgaaagctataaatcattgcgtgtactggatttcgaaaattgtgcaggtattgaagaccatgatcttgttcatcttgggaaattgcatcacctcaagttccttgggctaagaaacacgtttatcggtaagctgccggaaggaatagggaacctcaagtttctgcaaacattggacctcgatggaactggtgtggaagaattacctcaagccttgcataatcttacagaattgatgtgcctaattgctgactggagaacgagagtgcccaattggattggtaacctcacgtccctgcagcacttggtgatttatcctggtgggcatgacgatgaggattctgcgagcaggtttgttaatgagctgggaaagctgagacaactaagggtgctccgttttttgataaaagcacaagatgaagggcagctgagagatttgctagagtccctatcgaatctgccagagatcgaggctatacattttgattactatggagtacagttaaatagaggtgttcagttggaacctgaaggctatgccctctctagacatattcgttccgagaaatttgccattatggaagtcctcagatacggcttcgacgatttggaggcgtaggcgagggattctctattatagaaaacaaggggacaacccacactccaaaatggatatgactacaccattacaagtgtgcaactcctaacggattcaaaccaagaatttgattttgactttggcttgggaaacctacattggcttcagcaagccatcgttcaaatcacagcccttggtgaggaggtggagtctgtggggagagcacaggtggctctgcgggatgcaatacgtacccatctcaaccgtcctacccttgaaataaacttatttgggcaaacaatacctccagagttaccaaagcaagacgacgatggagcgaaaattgtggagatatcaccggccgagagtagtcgtcaagctcaagagcgggagaaaagaagcatcgatgtggcgacgaagaaagcaacacgggtgccgtctttttacacaaagtcatcaattgatgagccaatggatcagctcataaacatgctatctgtggttgatgacgaagcctacactaagaacataaagatactatctattgtaaggtctgagggactggggaagactactctggcccaaaaagcattcgaagagctccattcgcaatttgaccgtggggcgttcgttctactaggccagaatcctgacttgaggagagtttttgctgacattctccgtggtcttgacaagcaaaggtacatagatttcccagtggcaatattggatctagtggacctgatctggctagtccgtaaatcgctcataaacaaaaggttctttattgtatttgatgatatatgtgatgtaaaagcatgggaaattataaagtgcgctttgattgaaaataacaaccacagtgtagttcttacgacaagtcgcaacactggtattactgaaattattggtggcagcaagcaattacaacctctatcagcaactatctctaaaaatctactctgcaaaaggttatttggatcggcaggcaagtgtccttctgaactagtaaatatatgtgacaatcttgtagaagaatgtggtggaatactatctgtgatcgacgaaactgtgacattgcttgcaagtataccaccaacagtggagaactgggaggcagtgtacgccagaagaatgttggatcggtcttatcctggtttaactgacagtctaaagaattgcttactctattttactatgtttcgaagaggacatgagattagtggagaacacttaatatgtgcatggatagctgaaggttttgtacatgggcaagaggtagcagagacctaccttagtgatctagtaaaaaagaaattaatcgatgcagtggaggttgatgctggaggaaaggtcctcacgtgccgcatgtatgacttggtgcatgactttatcgtctcaaaatcaattgaagaacgatttgtttatattttaaatgactcggaaggcagagatttgtcagaagcagttcacgttcaccagcgactatacatccagggacataataacaaagaactagacctgcaaattccttggctgccccaagtgaagtcacttgtctcctgtggtactgcgccatccatcttaaagtttaagggtctacatgttatggatttaggggcctgtgaatctttgcaggctagtcatctcaagggtataaataatgtaagttctttgagatatctggtcataggaggtaagtgtatctctggcatccctaaggaaattgcgaagctggaacatttgcggacactagatttaagtgcaagtggtctaaatgaattgccagaatatgttttcatgataagaaaattggaacgcctaattgttaatagtcagatgaagatatcatatggtattgcaaagatgtctgctttacaggagctaggcgatatcaatgtcaccgacccagagttgctgaaaagtctctgtaagctaaccaaattgagggttcttagaatttccatatggtcatgggatgatagtttgaagaactattttaaacaactgtgtgacaacttgcgttcactggttcagtgcacggagaacatccagagtctctccataatgacatgctgctccctggttttcatggatgatttgggtgagaattggacccctcaatgtctccagaagctcgaggtcggttgcagcgcatttgacatattgccaagttggtttggctcactttctagtatctccacgttaacaatcgaggtctacaagctgtcacaggacataattgatacgctcggaaggctggctggtcttggttctctatccctgacatcgaaacaagtaccaaaaggatactttgtgatcggctctgacaggttcaataagctacagagcttaaagtttgtgagcaatgcaatggtagagatgtttccacgtcaacaatcaaatggcacggaacagctcaaaaggcttatgattgtgttccatgcttcacgtacacaagatgtgaacaaagatttctgctttggtttggagaacctgtcttccctagagcatgttcgtgttgaaataatttgtttcgatgccagccataacatggtgaaaaacgcagaagctgcagttcagaaagctatatctggcacaagtatcgcaaatctggaaatacgaagacttcaggaaaatagtatgacacaggacgaagcggacctctgtgatgcagtacaagagcagaataatcagaagcaccagaaaatgaagagttctatggagtcccaggatgggtacctcacttctttaccgaaccaggaaagtgcagatgttgttggctccgatagtattgtggaaccactagtgaatgaaatgaactcgcagacaattaagagggatcaatccacgaatttcagtgaagatgaggacttaatgttggtttctagctaccttaatgtaagcaaagattctattactggaagggataaaaaagaaggcacattttgggaaagagtatgggaatactataacaagaataggacattcgagtccgatcatagttggtcgtcattgaaacatcgctggcttgcaattcagaaggaagtgaatatctttcaaggttactatgatgccatagaaaggaaaaatcaaagtggccagacaagtgatgacaagcatgctgaagcagaagtagaattccgagaaaaacaagggaaggctttttctgtattccatgtgtggatgattctaaggcatgagccaaagtgggcatttagagaatcaaagatcaaagaccagcatgaagcaaacaatgctaatactgatgctcctgccaacatttatagaccacaggggaggaaagctgagaaggaaaaggctcgtgcgagaaagcatggtggatctgatgttgatggtgatccgttcatcgaagaagtaaaaaatatgagggaagcacgggaagaaacagaacgagaccgaaagacccatgatgacaagttctatgagttggaaaagagtaagcttgaattggagcgagatcgacatgacaaagagataatgcaaacagacacaagcacaatggatgaagaatcgaaacaatacttcaagttgatgaaacaagagattttggctcgccgtttcgggagtagtcagccatagttgttagctgttggaaacttagatagtattttgtttttgccagacatctgttattgataatcttgtgaacttttacatatggcacctgtcaactacttcctcctttctaaaatattattcgttttagggtgttaatagattcatacaatatttgatgtatgtattttatatatgtgtctagattcgttgtctaagggtcttctagtctggcattgcctgtacagtcataatttgagcacttcctattttgtttggtggaaagtactgtgatcactttcattgcctctgctttattgtaccatgctaaactgggtcgatt

SEQ ID NO: 62501 - DNA, 4913 bp, Zea Mays
tagtatttgtttgccacttgccagtagccgcactttcctcgatatgcccaagcgagagagagaagagatagagagagagattccttagttgattcttctgtggatgaagatgaaatctacttctgaaatcttgccaccgtccaactctgtttgatctaatctctatatcctccggccaccaagttcttgtcaaataagcgagcacagcaagctagccatggagttcgcaactggagcgctaggcgcccttcttcccaagctctccatgctgcttcatggtgagtacaacctggagaagggcgtcaggggggacatccagcgcgtcatgagcaagctcgagcgggttcatgctgccctccgccatgttggcgaagtgcctgtgccactggagcagatcattcgtcctggtatagtcaatatgtgggcacgcgacgtcggggagctatcctacgacatggaggacttcgtcgacaccttcctggtgcgtgtccaaggccctgaacgcaccagcaaaagaaggttattcattaagatgatagatatggtcatgaataatcgccatgatgagatcgccccagacatcaagcacttcgaaaagcgcgtccaggagatggatgatcgtcgtcaaaggtacggtgttggtactattgttcctaccgtcaaaaccttgttttatcctcgcataattgctctaaactacaccaaggccacggaccttgtcggcatcgatgaggcaagggaggaactgatcacaaggttgaccaaggaatatgacacctccactgaacaaaggcaagtctctatcgttggttttggaggacttggcaagacagcgcttgcaaaagcagtttataacaaacttaaagctaaaggggaattccattgtgcggcctttgtgtcgatgtctcggtatcctaagctcgtagaaatcttcaaggaattgctttatgagcttgacaagactgagtacaaggacgttattagcaccccaatggaaatagatgaacttataaatctagtgcacgaattccttaataaaaagagtgtgcaactcctaacggattcaaaccaagaatttgattttgactttggcttgggaaacctacattggcttcagcaagccatcgttcaaatcacagcccttggtgaggaggtggagtctgtggggagagcacaggtggctctgcgggatgcaatacgtacccatctcaaccgtcctacccttgaaataaacttatttgggcaaacaatacctccagagttaccaaagcaagacgacgatggagcgaaaattgtggagatatcaccggccgagagtagtcgtcaagctcaagagcgggagaaaagaagcatcgatgtggcgacgaagaaagcaacacgggtgccgtctttttacacaaagtcatcaattgatgagccaatggatcagctcataaacatgctatctgtggttgatgacgaagcctacactaagaacataaagatactatctattgtaaggtctgagggactggggaagactactctggcccaaaaagcattcgaagagctccattcgcaatttgaccgtggggcgttcgttctactaggccagaatcctgacttgaggagagtttttgctgacattctccgtggtcttgacaagcaaaggtacatagatttcccagtggcaatattggatctagtggacctgatctggctagtccgtaaatcgctcataaacaaaaggttctttattgtatttgatgatatatgtgatgtaaaagcatgggaaattataaagtgcgctttgattgaaaataacaaccacagtgtagttcttacgacaagtcgcaacactggtattactgaaattattggtggcagcaagcaattacaacctctatcagcaactatctctaaaaatctactctgcaaaaggttatttggatcggcaggcaagtgtccttctgaactagtaaatatatgtgacaatcttgtagaagaatgtggtggaatactatctgtgatcgacgaaactgtgacattgcttgcaagtataccaccaacagtggagaactgggaggcagtgtacgccagaagaatgttggatcggtcttatcctggtttaactgacagtctaaagaattgcttactctattttactatgtttcgaagaggacatgagattagtggagaacacttaatatgtgcatggatagctgaaggttttgtacatgggcaagaggtagcagagacctaccttagtgatctagtaaaaaagaaattaatcgatgcagtggaggttgatgctggaggaaaggtcctcacgtgccgcatgtatgacttggtgcatgactttatcgtctcaaaatcaattgaagaacgatttgtttatattttaaatgactcggaaggcagagatttgtcagaagcagttcacgttcaccagcgactatacatccagggacataataacaaagaactagacctgcaaattccttggctgccccaagtgaagtcacttgtctcctgtggtactgcgccatccatcttaaagtttaagggtctacatgttatggatttaggggcctgtgaatctttgcaggctagtcatctcaagggtataaataatgtaagttctttgagatatctggtcataggaggtaagtgtatctctggcatccctaaggaaattgcgaagctggaacatttgcggacactagatttaagtgcaagtggtctaaatgaattgccagaatatgttttcatgataagaaaattggaacgcctaattgttaatagtcagatgaagatatcatatggtattgcaaagatgtctgctttacaggagctaggcgatatcaatgtcaccgacccagagttgctgaaaagtctctgtaagctaaccaaattgagggttcttagaatttccatatggtcatgggatgatagtttgaagaactattttaaacaactgtgtgacaacttgcgttcactggttcagtgcacggagaacatccagagtctctccataatgacatgctgctccctggttttcatggatgatttgggtgagaattggacccctcaatgtctccagaagctcgaggtcggttgcagcgcatttgacatattgccaagttggtttggctcactttctagtatctccacgttaacaatcgaggtctacaagctgtcacaggacataattgatacgctcggaaggctggctggtcttggttctctatccctgacatcgaaacaagtaccaaaaggatactttgtgatcggctctgacaggttcaataagctacagagcttaaagtttgtgagcaatgcaatggtagagatgtttccacgtcaacaatcaaatggcacggaacagctcaaaaggcttatgattgtgttccatgcttcacgtacacaagatgtgaacaaagatttctgctttggtttggagaacctgtcttccctagagcatgttcgtgttgaaataatttgtttcgatgccagccataacatggtgaaaaacgcagaagctgcagttcagaaagctatatctggcacaagtatcgcaaatctggaaatacgaagacttcaggaaaatagtatgacacaggacgaagcggacctctgtgatgcagtacaagagcagaataatcagaagcaccagaaaatgaagagaatttatgcaacgggggactggcaactggaaatagcacatagttctatggagtcccaggatgggtacctcacttctttaccgaaccaggaaagtgcagatgttgttggctccgatagtattgtggaaccactagtgaatgaaatgaactcgcagacaattaagagggatcaatccacgaatttcagtgaagatgaggacttaatgttggtttctagctaccttaatgtaagcaaagattctattactggaagggataaaaaagaaggcacattttgggaaagagtatgggaatactataacaagaataggacattcgagtccgatcatagttggtcgtcattgaaacatcgctggcttgcaattcagaaggaagtgaatatctttcaaggttactatgatgccatagaaaggaaaaatcaaagtggccagacaagtgatgacaagcatgctgaagcagaagtagaattccgagaaaaacaagggaaggctttttctgtattccatgtgtggatgattctaaggcatgagccaaagtgggcatttagagaatcaaagatcaaagaccagcatgaagcaaacaatgctaatactgatgctcctgccaacatttatagaccacaggggaggaaagctgagaaggaaaaggctcgtgcgagaaagcatggtggatctgatgttgatggtgatccgttcatcgaagaagtaaaaaatatgagggaagcacgggaagaaacagaacgagaccgaaagacccatgatgacaagttctatgagttggaaaagagtaagcttgaattggagcgagatcgacatgacaaagagataatgcaaacagacacaagcacaatggatgaagaatcgaaacaatacttcaagttgatgaaacaagagattttggctcgccgtttcgggagtagtcagccatagttgttagctgttggaaacttagatagtattttgtttttgccagacatctgttattgataatcttgtgaacttttacatatggcacctgtcaactacttcctcctttctaaaatattattcgttttagggtgttaatagattcatacaatatttgatgtatgtattttatatatgtgtctagattcgttgtctaagggtcttctagtctggcattgcctgtacagtcataatttgagcacttcctattttgtttggtggaaagtactgtgatcactttcattgcctctgctttattgtaccatgctaaactgggtcgatt

SEQ ID NO: 62502 - DNA, 7822 bp, Zea Mays
attagtatttgtttgccacttgccagtagccgcactttcctcgatatgcccaagcgagagagagaagagatagagagagagattccttagttgattcttctgtggatgaagatgaaatctacttctgaaatcttgccaccgtccaactctgtttgatctaatctctatatcctccggccaccaagttcttgtcaaataagcgagcacagcaagctagccatggagttcgcaactggagcgctaggcgcccttcttcccaagctctccatgctgcttcatggtgagtacaacctggagaagggcgtcaggggggacatccagcgcgtcatgagcaagctcgagcgggttcatgctgccctccgccatgttggcgaagtgcctgtgccactggagcagatcattcgtcctggtatagtcaatatgtgggcacgcgacgtcggggagctatcctacgacatggaggacttcgtcgacaccttcctggtgcgtgtccaaggccctgaacgcaccagcaaaagaaggttattcattaagatgatagatatggtcatgaataatcgccatgatgagatcgccccagacatcaagcacttcgaaaagcgcgtccaggagatggatgatcgtcgtcaaaggtacggtgttggtactattgttcctaccgtcaaaaccttgttttatcctcgcataattgctctaaactacaccaaggccacggaccttgtcggcatcgatgaggcaagggaggaactgatcacaaggttgaccaaggaatatgacacctccactgaacaaaggcaagtctctatcgttggttttggaggacttggcaagacagcgcttgcaaaagcagtttataacaaacttaaagctaaaggggaattccattgtgcggcctttgtgtcgatgtctcggtatcctaagctcgtagaaatcttcaaggaattgctttatgagcttgacaagactgagtacaaggacgttattagcaccccaatggaaatagatgaacttataaatctagtgcacgaattccttaataaaaagaggtaccttatcgctgttgatgacatatgggatactgacgcatgggcaatgatacgatacgcttttgctgagaataagctaggaagcagaataatcgtaactactcgcagaattgatgttgctgagtatgtaggtggttgttgctatatgatgaaacctcttactcgagagaaatcaaagatattattctatggacgaacatttggttctgaaggtaaatgccctcctgaactttctcatgcgtctgagaaaatattgaataaatgcggaggcgtgccattggctattattactatatctagcttgctggctagtaagtcaaaaaacataaaagaatggttctatcttgctgattctattggttccggaatactagaaagaagtgctgaaatggagattatgtggaagatactgctgcgtagctattctgatctaccagcacgattaaagacatgtttgttatatctgagtattttccctgaagattgtgagattgggatgcatcggttaatatggaggtggatagctgaaggttttttcaatggagaactagcacatggtgggctctttaagattggggaatcttgtttccacgagctcataaggagaagcatggtgcagccagtaacacttgaaggcacgggtcttgtatatgcttgtcgtgttcataatatgtttcatgatttgatcctctccatgtcacatgaagaacaatttgtttctgtagtcaatgaaaaatttggtcctcttgatgttctttctcggcggttagcattccagaacataaaaaaaagtcagtacagacttgtggaacatccacggctggcacaatcgaggtcacttaatgccattggatgtcctatatacgcgatacctccaattgaaagctataaatcattgcgtgtactggatttcgaaaattgtgcaggtattgaagaccatgatcttgttcatcttgggaaattgcatcacctcaagttccttgggctaagaaacacgtttatcggtaagctgccggaaggaatagggaacctcaagtttctgcaaacattggacctcgatggaactggtgtggaagaattacctcaagccttgcataatcttacagaattgatgtgcctaattgctgactggagaacgagagtgcccaattggattggtaacctcacgtccctgcagcacttggtgatttatcctggtgggcatgacgatgaggattctgcgagcaggtttgttaatgagctgggaaagctgagacaactaagggtgctccgttttttgataaaagcacaagatgaagggcagctgagagatttgctagagtccctatcgaatctgccagagatcgaggctatacattttgattactatggagtacagttaaatagaggtgttcagttggaacctgaaggctatgccctctctagacatattcgttccgagaaatttgccattatggaagtcctcagatacggcttcgacgatttggaggcgtaggcgagggattctctattatagaaaacaaggggacaacccacactccaaaatggatatgactacaccattacaaggtaatatctatgattaaaccagtgatactcacgtcgtctacatctgttacccttccccacgtcctctacatctgttacccttccccggagcgggattacaacctgccccagagcggccggcgctggaggctggccgtcccgtccgccgccggcgcgtccagtctcgcctcgtcgctctcgcgctccctcaggtggaagcgccggctcccgggtctcccctccctcaccctgcgcagcggctccgcggccgccgtggtcgacgctgtcgcgttccgcgtcatgtacgtcgtcgaggccgtcgtgctgggcctcgcgctctcctgcttcttcctctgcgctatgggtggttcttgcatgtttaggctctgcatagcaaacacggaggaggactggaggccgggaacggagcagtacaagttcatcgatcgaagcagccctggtgtagaacaaatcatgcctttagcatgttcatatgaatgcactgaagccgggaacggagcagtacaagttcatcgatcgatcgagacatgtgttgatagatacactgtttgatatactttcagcattgtcctttggttaccattggttctgaatgcactgaagcttctacctcgacactacatgctacatatcaaaagggcaatggtgtagaacaaatcatgcgcttctcactttcatctggttctggtttccagcgcagattctggctggatctttagcatgttcatatgaatgtccttgttcgagcatgcctcagcctgacccagacgaaaattcagaaaatgataccttaagatggcagcagcaaggggttcaacttgcattttgtaagcattgagaagacatcacgtgaagaagcctcaaaacgatcaacaattcccttttttcacaacaataattcgacactacatacaagctatatatctctcaaaaagcaatggtgtacagtgcagtggactattggtccacagaaaacagaagtttctgggcgttaacgagtacatgtgaaccttgtttagttctctctacgatctgccggatcagcactgcacattcgtcatcgtcgtcatcgccacctgactcatccttatcgcgctcgtgatctctgctaggatctgcactccttagagctctctcccaggtgggcacttttctcagcttcatagagctgtcctccattccccagactagaccacgctctgccaagcaatccatggtcgggaaccccggcgacgtccgcgcggtggtcctggacccggccgccggggccctcgcgggcctccgccgcggcggcgtgctggtggactgcacgagctcctccccgtccctcgcgcgcgaggtcgccgcggccgcggccgcggcgggctgccacgccgtcgacgcgccagtctccggcggcgtgctgcggactgcacgagctcctccccgtccctcgccattacagagctctctgcaagccatcgttcaaatcacagcccttggtgaggaggtggagtctgtggggagagcacaggtggctctgcgggatgcaatacgtacccatctcaaccgtcctacccttgaaataaacttatttgggcaaacaatacctccagagttaccaaagcaagacgacgatggagcgaaaattgtggagatatcaccggccgagagtagtcgtcaagctcaagagcgggagaaaagaagcatcgatgtggcgacgaagaaagcaacacgggtgccgtctttttacacaaagtcatcaattgatgagccaatggatcagctcataaacatgctatctgtggttgatgacgaagcctacactaagaacataaagatactatctattgtaaggtctgagggactggggaagactactctggcccaaaaagcattcgaagagctccattcgcaatttgaccgtggggcgttcgttctactaggccagaatcctgacttgaggagagtttttgctgacattctccgtggtcttgacaagcaaaggtacatagatttcccagtggcaatattggatctagtggacctgatctggctagtccgtaaatcgctcataaacaaaaggttctttattgtatttgatgatatatgtgatgtaaaagcatgggaaattataaagtgcgctttgattgaaaataacaaccacagtgtagttcttacgacaagtcgcaacactggtattactgaaattattggtggcagcaagcaattacaacctctatcagcaactatctctaaaaatctactctgcaaaaggttatttggatcggcaggcaagtgtccttctgaactagtaaatatatgtgacaatcttgtagaagaatgtggtggaatactatctgtgatcgacgaaactgtgacattgcttgcaagtataccaccaacagtggagaactgggaggcagtgtacgccagaagaatgttggatcggtcttatcctggtttaactgacagtctaaagaattgcttactctattttactatgtttcgaagaggacatgagattagtggagaacacttaatatgtgcatggatagctgaaggttttgtacatgggcaagaggtagcagagacctaccttagtgatctagtaaaaaagaaattaatcgatgcagtggaggttgatgctggaggaaaggtcctcacgtgccgcatgtatgacttggtgcatgactttatcgtctcaaaatcaattgaagaacgatttgtttatattttaaatgactcggaaggcagagatttgtcagaagcagttcacgttcaccagcgactatacatccagggacataataacaaagaactagacctgcaaattccttggctgccccaagtgaagtcacttgtctcctgtggtactgcgccatccatcttaaagtttaagggtctacatgttatggatttaggggcctgtgaatctttgcaggctagtcatctcaagggtataaataatgtaagttctttgagatatctggtcataggaggtaagtgtatctctggcatccctaaggaaattgcgaagctggaacatttgcggacactagatttaagtgcaagtggtctaaatgaattgccagaatatgttttcatgataagaaaattggaacgcctaattgttaatagtcagatgaagatatcatatggtattgcaaagatgtctgctttacaggagctaggcgatatcaatgtcaccgacccagagttgctgaaaagtctctgtaagctaaccaaattgagggttcttagaatttccatatggtcatgggatgatagtttgaagaactattttaaacaactgtgtgacaacttgcgttcactggttcagtgcacggagaacatccagagtctctccataatgacatgctgctccctggttttcatggatgatttgggtgagaattggacccctcaatgtctccagaagctcgaggtcggttgcagcgcatttgacatattgccaagttggtttggctcactttctagtatctccacgttaacaatcgaggtctacaagctgtcacaggacataattgatacgctcggaaggctggctggtcttggttctctatccctgacatcgaaacaagtaccaaaaggatactttgtgatcggctctgacaggttcaataagctacagagcttaaagtttgtgagcaatgcaatggtagagatgtttccacgtcaacaatcaaatggcacggaacagctcaaaaggcttatgattgtgttccatgcttcacgtacacaagatgtgaacaaagatttctgctttggtttggagaacctgtcttccctagagcatgttcgtgttgaaataatttgtttcgatgccagccataacatggtgaaaaacgcagaagctgcagttcagaaagctatatctggcacaagtatcgcaaatctggaaatacgaagacttcaggaaaatagtatgacacaggacgaagcggacctctgtgatgcagtacaagagcagaataatcagaagcaccagaaaatgaagagttctatggagtcccaggatgggtacctcacttctttaccgaaccaggaaagtgcagatgttgttggctccgatagtattgtggaaccactagtgaatgaaatgaactcgcagacaattaagagggatcaatccacgaatttcagtgaagatgaggacttaatgttggtttctagctaccttaatgtaagcaaagattctattactggaagggataaaaaagaaggcacattttgggaaagagtatgggaatactataacaagaataggacattcgagtccgatcatagttggtcgtcattgaaacatcgctggcttgcaattcagaaggaagtgaatatctttcaaggttactatgatgccatagaaaggaaaaatcaaagtggccagacaagtgatgacaagcatgctgaagcagaagtagaattccgagaaaaacaagggaaggctttttctgtattccatgtgtggatgattctaaggcatgagccaaagtgggcatttagagaatcaaagatcaaagaccagcatgaagcaaacaatgctaatactgatgctcctgccaacatttatagaccacaggggaggaaagctgagaaggaaaaggctcgtgcgagaaagcatggtggatctgatgttgatggtgatccgttcatcgaagaagtaaaaaatatgagggaagcacgggaagaaacagaacgagaccgaaagacccatgatgacaagttctatgagttggaaaagagtaagcttgaattggagcgagatcgacatgacaaagagataatgcaaacagacacaagcacaatggatgaagaatcgaaacaatacttcaagttgatgaaacaagagattttggctcgccgtttcgggagtagtcagccatagttgttagctgttggaaacttagatagtattttgtttttgccagacatctgttattgataatcttgtgaacttttacatatggcacctgtcaactacttcctcctttctaaaatattattcgttttagggtgttaatagattcatacaatatttgatgtatgtattttatatatgtgtctagattcgttgtctaagggtcttctagtctggcattgcctgtacagtcataatttgagcacttcctattttgtttggtggaaagtactgtgatcactttcattgcctctgctttattgtaccatgctaaactgggtcgatt

SEQ ID NO: 62503 - DNA, 1197 bp, Zea Mays
ggagcagatcatcaaggatatcaggaagtttaaggagaagaacaaagtggacaaggtagtcgtgctgtggactgcaaacactgaaaggtacaacaatgtatgcgcttgtctcaacgacacaatggagaatctactggcatctgtggacaagaacgaggcggagatctcgccatcaacactatatgccattgcctgtgtcacagagggggtgtcgttcatcaatgggagcccccagaacacttttgtgcctgggctgattgatcttgctatcaagaacaactgcctgatcggtgttgacgacttcaagagtggcagaccaagatgaaatcagtcctggttgatttccttgttggtgctagaataaagcccacctcgattgtgagctacaaccacttgggaaacaacaacggcatgaacctgtctgcccctcaaacattcaggtccaaggagatctccaagagcaacgtggtggatgacattgtctcaagcaatgccattctctatgggcccggcgagcatcccgatcatgttgttgtcatcaagtatgtgccgtacgtgggagatagtaagagggctatggacgagtacacatcagagatctttatgggcagcaagaacaccatcatgctgcacaacacctgcgaggactcgctcctcaccgcaccgatcatccttgatctggtgcttctggctgagcttagcaccaggatctagctaaaacctgagggaacgacaagttccactccttccactcggtggccaccatccttagctacctcaccaaggcaccactagttccgcccggcacaccggtggtgaacgctctggcaaagcagagggcgatgctggagaacatcatgagggcctgcgttggcttggccccagagaacaacatgatcctggagtacaagtgagcgaagtggcgtggctgcagctggatatacaggaggctgcatgaagggaactagagaggcgagattagctgtgggattgtgttggcttctcgtgttttcttttgcgttctttcctgttcatcgctgtcgagttgttgtattttatttgttggactctcgtgccaacaatgtcatcaagcgtgtatggtggtgcgtgcctgagactgacgatgtacgagggaacttctaccggcagtgtgacacgtactctgcaatgatgagacaatgcaaattgtggtatata

SEQ ID NO: 62504 - DNA, 1760 bp, Zea Mays
ccggccgcccctccactccccccggtcactccacgataccggacttccattataccgtgcgtttcccgtcgccttgcgtggcgtccgacagccgtttcttcccctctcgcgagcgccctccctcttctataaatggccacactgtggtgacagaccgcgtcaccgctgctgccatcgcagccgcattcgcttctccgccgcttacgcttcaagaaaccccaccggtactccgtggccatcgacgccgccaagtggcgcttagcagccgcagcacatacccggacctgaccgctgagaagggcaacgcggacgcgccgagatgcagagcatgtcggcgtcctgctcgtccgccgtctccgtctctacctctagagtctgggccgcggcgcgccgctcgccctcgccccgatccctaccctcgttgcgccacgtcgccttctggccctctccatcctcctcctacccctcttcttctcatggctgtcgctggccgatcgccggcgccggcgcaccggcgctcccgctcggcattcgcgggggcctgcgccggctgccctcgcctctgcttgcgccggacgcccccagtgccggcgcggcggcgaggacgcgggcggccgcggccgcggcgtctccggcagcagccggtaagcaggagggcgccgccggcatttcgcagaccctgcaactcgggacaatgatcctcgtctggtacctcctcaacatctacttcaacatctacaacaagctggttctgaaagccatacctttcccttacaccatcaccaccttccatttcgcatccggaaccttcttcatcacactcatgtggctgctcaatctgcatcccaaaccgaggctctccctcaaacagtatgcaaagctcctgcctttggccttgatccacatgcttggaaatgttttcaccaatatgagtttgggtaaggtgtctgtctccttcacccacaccatcaaggccatggagcccttcttctcggtcctcctctctatcctattcctaggagaggacagtttggatgatataaatctcttctcaataataactgtcatggcattcttgttatctgctccactgatgctatgtgtagaaggaatcaagtttagcccatcgtatctacagaatgctggagttaatgtaaaagaattatttataagagcggcacttgctgggacatctttctatttttaccaacaggtttcgtacagtttattggctagagtatctcccgtgacccattcggttgccaactctcttaaacgtgtggtggtcattgtgtcatccgttctcttctttagaactctaatttcacctataaatgccttaggaaccggtgttgctcttgctggagtgttcctgtactcgcagttcaaaaagtcaaaaccaaaggctacggctgcatgaagacaacccctgatgatgaggttctttggatgtgagaagcttgtacgtcagtttcctggacaaggtgtggtggaacacgtgaacaacgaagatatagcattattagatttcaagagaatacaaattttggaatatacttcaatgtcattgaaactgacagaatgctctcacttacatatattctttacgtcaaaatatggttcaatgttttcttactattatatatattctttacgaactttgtgttttttgctgaaagaaaaacaaaaggaatatcctggttcctggatatggtatatatgaaatagacagaatctcagaatcaactggtgatattgat

SEQ ID NO: 62505 - DNA, 1993 bp, Zea Mays
gtgcggtgcggtgcgagcgagagcgagctccatccggtttcgagcagtctccccacgcgaatccggccgcccctccactccccccggtcactccacgataccggacttccattataccgtgcgtttcccgtcgccttgcgtggcgtccgacagccgtttcttcccctctcgcgagcgccctccctcttctataaatggccacactgtggtgacagaccgcgtcaccgctgctgccatcgcagccgcattcgcttctccgccgcttacgcttcaagaaaccccaccggtactccgtggccatcgacgccgccaagtggcgcttagcagccgcagcacatacccggacctgaccgctgagaagggcaacgcggacgcgccgagatgcagagcatgtcggcgtcctgctcgtccgccgtctccgtctctacctctagagtctgggccgcggcgcgccgctcgccctcgccccgatccctaccctcgttgcgccacgtcgccttctggccctctccatcctcctcctacccctcttcttctcatggctgtcgctggccgatcgccggcgccggcgcaccggcgctcccgctcggcattcgcgggggcctgcgccggctgccctcgcctctgcttgcgccggacgcccccagtgccggcgcggcggcgaggacgcgggcggccgcggccgcggcgtctccggcagcagccggtaagcaggagggcgccgccggcatttcgcagaccctgcaactcgggacaatgatcctcgtctggtacctcctcaacatctacttcaacatctacaacaagctggttctgaaagccatacctttcccttacaccatcaccaccttccatttcgcatccggaaccttcttcatcacactcatgtggctgctcaatctgcatcccaaaccgaggctctccctcaaacagtatgcaaagctcctgcctttggccttgatccacatgcttggaaatgttttcaccaatatgagtttgggtaaggtgtctgtctccttcacccacaccatcaaggccatggagcccttcttctcggtcctcctctctatcctattcctaggagagacaccttctctaccagtgttgggctcacttgtccctattgttggtggagttgtattggcgtcgatgactgaagtttcattcaactggattggattctggagtgccatgacttcgaatcttatgaatcaatcgcggaacgtttacagcaagaaaattctcgctgataaagaggacagtttggatgatataaatctcttctcaataataactgtcatggcattcttgttatctgctccactgatgctatgtgtagaaggaatcaagtttagcccatcgtatctacagaatgctggagttaatgtaaaagaattatttataagagcggcacttgctgggacatctttctatttttaccaacaggtttcgtacagtttattggctagagtatctcccgtgacccattcggttgccaactctcttaaacgtgtggtggtcattgtgtcatccgttctcttctttagaactctaatttcacctataaatgccttaggaaccggtgttgctcttgctggagtgttcctgtactcgcagttcaaaaagtcaaaaccaaaggctacggctgcatgaagacaacccctgatgatgaggttctttggatgtgagaagcttgtacgtcagtttcctggacaaggtgtggtggaacacgtgaacaacgaagatatagcattattagatttcaagagaatacaaattttggaatatacttcaatgtcattgaaactgacagaatgctctcacttacatatattctttacgtcaaaatatggttcaatgttttcttactattatatatattctttacgaactttgtgttttttgctgaaagaaaaacaaaaggaatatcctggttcctggatatggtatatatgaaatagacagaatctcagaatcaactggtgatattgat

SEQ ID NO: 62506 - DNA, 2118 bp, Zea Mays
gtgcggtgcggtgcgagcgagagcgagctccatccggtttcgagcagtctccccacgcgaatccggccgcccctccactccccccggtcactccacgataccggacttccattataccgtgcgtttcccgtcgccttgcgtggcgtccgacagccgtttcttcccctctcgcgagcgccctccctcttctataaatggccacactgtggtgacagaccgcgtcaccgctgctgccatcgcagccgcattcgcttctccgccgcttacgcttcaagaaaccccaccggtactccgtggccatcgacgccgccaagtggcgcttagcagccgcagcacatacccggacctgaccgctgagaagggcaacgcggacgcgccgagatgcagagcatgtcggcgtcctgctcgtccgccgtctccgtctctacctctagagtctgggccgcggcgcgccgctcgccctcgccccgatccctaccctcgttgcgccacgtcgccttctggccctctccatcctcctcctacccctcttcttctcatggctgtcgctggccgatcgccggcgccggcgcaccggcgctcccgctcggcattcgcgggggcctgcgccggctgccctcgcctctgcttgcgccggacgcccccagtgccggcgcggcggcgaggacgcgggcggccgcggccgcggcgtctccggcagcagccggtaagcaggagggcgccgccggcatttcgcagaccctgcaactcgggacaatgatcctcgtctggtacctcctcaacatctacttcaacatctacaacaagctggttctgaaagccatacctttcccttacaccatcaccaccttccatttcgcatccggaaccttcttcatcacactcatgtggctgctcaatctgcatcccaaaccgaggctctccctcaaacagtatgcaaagctcctgcctttggccttgatccacatgcttggaaatgttttcaccaatatgagtttgggtaaggtgtctgtctccttcacccacaccatcaaggccatggagcccttcttctcggtcctcctctctatcctattcctaggagagacaccttctctaccagtgttgggctcacttgtccctattgttggtggagttgtattggcgtcgatgactgaagtttcattcaactggattggattctggagtgccatgacttcgaatcttatgaatcaatcgcggaacgtttacagcaagaaaattctcgctgataaagagtttggatgatataaatctcttctcaataataactgtcatggcattcttgttatctgctccactgatgctatgtgtagaaggaatcaagtttagcccatcgtatctacagaatgctggagttaatgtaaaagaattatttataagagcggcacttgctgggacatctttctatttttaccaacaggtttcgtacagtttattggctagagtatctcccgtgacccattcggttgccaactctcttaaacgtgtggtggtcattgtgtcatccgttctcttctttagaactctaatttcacctataaatgccttaggaaccggtgttgctcttgctggagtgttcctgtactcgcagttcaaaaagtcaaaaccaaaggctacggctgcatgaagacaacccctgatgatgaggtaacagactatagaatgatggaggatttggaactatcagttgacgtggtgaagcagactggccttcacggtagcaaacacatgtagtttctccatgctgcatcttaaaaaaaatgtgttctcttgtcaggttctttggatgtgagaagcttgtacgtcagtttcctggacaaggtgtggtggaacacgtgaacaacgaagatatagcattattagatttcaagagaatacaaattttggaatatacttcaatgtcattgaaactgacagaatgctctcacttacatatattctttacgtcaaaatatggttcaatgttttcttactattatatatattctttacgaactttgtgttttttgctgaaagaaaaacaaaaggaatatcctggttcctggatatggtatatatgaaatagacagaatctcagaatcaactggtgatattgat

SEQ ID NO: 62507 - DNA, 5363 bp, Zea Mays
tcgaccctcatcgtagataacaagtgaaactaaagctgctaaaataaagctagtgtagaacaagtgaatgctctagattaggcaaatctagattaaggaaaaatacttaatttgtgaagtaaaagtttggcataaggatccactactagtaagcttttctgcgaaaatgtgtctttgaaatttgatgagctttaccttgattcccaacaaaccagcatacccttgagagtcttttctttagtcgggtaagtcttgctgagtaattgcgtactcagggttttattccctgttgtttttcaggttataattttgttctattgtggatggtgctaagtgccggtgggctcggccttcttctataagtatatcccgtctttagcttctttattgaggattgtcacttaagctagcatatattttaaaacttataaatgctttatacattcaaattgtaatctttttgaatcaatttctattgtaatcaacttcgatgatatatattgtaatcttgttataacttgtaaatgttgtaacttgtaaccattttgtaataaaaaatttccgctgcaaatgttggtgtgtgatttgtgtttacttaatcttgcgatcttggcggtaagtcgtttatccggggtccttggggcactcggacagatcctgttaagttatttggtgcacatgcatagtcgtttgaggtccttggaacgaggacaggtgcatgtgggcctgataacttgggaggttctgcgacagctggtatcggagctgaattaagtatatacggtcacatacatatttttaaaataaagttttggtttcgaaaacctattttcaactaaacacattgtttggttttgaaaaacagttttgaaaaaactataatgctagcgacatcctctattaagccctaaattaaggactactaggtggcttagttcagaatattaacccacaacctgggaagggtaatgcatacatgtgtaatgttatttttgaggccattcagttttgaatggatcgacgctcaggtaaggtgagatgtgagagtatgaccgaacaaacgtcggtctagggaagagtataaaaagcgcttgattatatacatgttacacatatgtatatatgaaggctgcgatgtggagtatttacttttccgggaatcggtaccccatggatgtgtatgggtatacagacatgggaataccgagaagtgtaatgtatttgcaacgacgcacctatgctcaggtaagaaggtgagttaccataatgagctgccctatggttaaagtgtggcagcggcgcctatgcgtggctcggcgcttaatgaggagctggcctccatatagcaatatatggagtataaactgtgataaactgtcatgtgtgaattgcatcattgggaattgggctgtgatggatttttctgcaggtacactaacttcgaactcgtatgtgtagctgacgactagcaatatatcgagagagacgtaattatgccaccgatatagaacgctattgccacattatgttggtgaaattcgtgaggacgaataggacgagcatgcatcctgattgttgcattgtgtttgttgtttgcgcaagaaatgcttccctcacctttattctaataataggtgattgtttttattctaataataggtgattgtgaaggaacatgcttttctcatctttattccgacaataaataattggaaactgtatgaagtattactgttttataagcaatttctagctttgtttgttgcgtcctttagacatgtgtttatgtggcatgtgattcttcttagtttgaccgctagtgcaacttgggtttgttttcgtgcttgtgtgctggtagaatgcaggtagtttgtttgcataaacccaaagctaggtcatgtccctgtttagtgaaccttaatctaactttatattaattttcttgacaacctatcctagatgtcgtcttgtgtgaagatcattttcttcacaagattattggagttctagcaattagaccaagtcatgtcctcatcatctcaacatttgaaattgtatgagatctaattcataattttgtcatttcttcaaagcctctctaaatcttccaactccatggccaaactcgtgcaaatagatgtttcagtaatccccttgttggagatgcactcaaacttaaaaacaaggatctcgagtctgtaatcttgacaatccacttgtagctctcttatggtcaaatgttcatcctaaaccatacccttgttcggttggtgcaagctggtattcctgttccaatttgcctctccttgaggatcactacattgatattttctcaaacttttatcatcttccttaaacttggattccctggctaaccacgagttaactgtgatgttattcgacattcatcctcgtcttatgtgctaggaatttccaatgaccacttgttggtaaacctctttctgtgtgttttacccaagaggttgcatctttcatggtttgtgtaattgctatccatttgtccaccgttctcaacagacccagatagtacagtgtcattagaaaaagaaaactgcacacatggaaccttatgtgttttctgtcagttatagcttgtttgttgacgtctctagtcaaactaaagtggtatgtgctatacccactagagaagcaacattttgagatgctcgtctttgcttggaattagtttatgctatcactattatggacagggttatacgcctctctactcttagaagtctttcgttctgaatctcgggacgagattcttttaaggggggaaggctgtaacaccccaggtgtttatcgtctactcgaccacgagtgtggacgttaacacgtgatagctgtgaatgtaagtggacactacattttaatcatctttgtctatcacgattttgatatcgtgtttgtctccatctgtttaaattgtcctaatttattttgtaaaaatcctgactttagtaatcttccgaaatattgaatccaatattgtttgggttgagccatcgacgtcttacctaaactataatttttgaaatcaaatgtagctccttaaaattcgtttgaaattctttcatgcttgcgttgcacatgtctatctgtggccagacatcgtgacacgcgtggcgtgtgcaaatctgtgggcggctgtgcataacttcttgcctacgatttgcgacacgtaacatcgtttctgtgaagtttcgcagacgcatcttatctccctgccgttatccctttcgtttatctgaatcggccaccgctccaactcctcaccacgtgtcgtgccttccgtcactccactgccgcgtgtccggcatgttagcgtcgtggtggttcttgggctcgcgggctgttgttgtgcttatcttctagagttttcagttatacctcgtttagatcttagttttggttcaactaaaaatagtttggtttatctattttagatccctgtatttttttaaaaaatctgtgggcttttagcaaaaggttgctatagtaaaattgtagagtaactataggagaacaacttttattaagtgttgaagccctaagtccatatggaactattagagaacttgacccaaaagtcctatcctcaaatctgaattttcagacttagtgatatttctgggttctgaacttttatgcctaagccaactttgaagcccttttattattcagtccattgggttttagcttaggaccattatatcaaaatggtagaggatctatgaatgtgcaactttgttgaagggagatggactcagtactacataaaaagtggagttactgacccctaaagataggctgtcagacgtccttaatttttcagataaggaagagtgaacagatctgaattctagtgtttggtttaaatttggagctatatggtgactgttctggacagttttggactgggatctttatagaaaagttgaagagtacatattggtgtacaagtttacttaacaatgattaacttggtaccatataaaataaatagttaagtacccttaaagttgccttaacagtctgcaatttctgggttcagtttcagaaaactgcaatgtggtttctgtgtgatctgcctcactttggagatctataactcgaaacctgtaaggtattgactctgaaagtctacaacaaattaaaagaccaatgttcagggaataaatttgatgtggagaggtagctctgtcattataaagaaattggagaaacggaggggacaaggtggttgttgctgtcgactgaactagatcaggcagtttgaaaatatctcaggaaaaagatctgcatccactagctgtttccagatgactttggataagtgcaaaacaataagaatttcgttctggtaaaaaggggggtcacgttggatatttttactgtccaaggggaggaaatgtggcagacttgaaacctatctagaaggtggtgacacagctgcttgtgatttgctgtcaaagccacattaaaccaccacaccgtgtccctctattcatggatcatgggtggaagatagcagtgcaaccacgtgccataaccctgtctctgttggaattccagagccctccttaaccggctttcagtgaaccccgtcgtgcccctgcgtgctgcgcgtcggccgtcgtccctgcaggagcctcttccatggcgcctagttttcttcccatggcgagctcgcctaagaaatcacccccatcgcaggtgttcgacgaaatgggagaaccaagaaattgtcgtcgtttctcatccgcgaccccgccagtctggtacactaattgatcacgtgatatggaggacaagagatggattaatcacaagacgatgctaatggacggagctaaagtggatgaatcaaccaagtgccgggacggaagatgctcaccaagtggtcatcatttaacaacactaacgtagtgtttatcccaggcaagccccggtgcatttgccacctccttgttgttttaaaacttttatcacttatatgctgcattaggtgataggagttgagtgatgaaacagttgatgcattgccattccttggaatttgattatcctccttgatacctgttttacaaaaagaactaatgaggcttagccctgcctagagaattaaaacttgtttctttttaaaagaatgatgtgtgacactgggtatgggtttgttttatgaaaatggacttgtaatggtgagcgcatcatctgcagtgatgaattcatcattcaagtatagtacctctgtcaggtatatggtttgggtgttaaataataagatgagaccagacgttgagcaggaaaggtcgcccgtctgtgtcgcttaaggaccg

SEQ ID NO: 62508 - DNA, 7501 bp, Zea Mays
aacgtgtaccaaccaggccaacggctggacggtggagtgctgtgctctcgggtcgcgtgaacccattctggtcttgagaaactcggtggcgagttgacatatgcaagggttaagtgctacatatgtcgtgtggttggagatccctagctgggtattaatcgattcggatcgccgaacttctcggatatgaagactggatcttcgaccctcatcgtagataacaagtgaaactaaagctgctaaaataaagctagtgtagaacaagtgaatgctctagattaggcaaatctagattaaggaaaaatacttaatttgtgaagtaaaagtttggcataaggatccactactagtaagcttttctgcgaaaatgtgtctttgaaatttgatgagctttaccttgattcccaacaaaccagcatacccttgagagtcttttctttagtcgggtaagtcttgctgagtaattgcgtactcagggttttattccctgttgtttttcaggttataattttgttctattgtggatggtgctaagtgccggtgggctcggccttcttctataagtatatcccgtctttagcttctttattgaggattgtcacttaagctagcatatattttaaaacttataaatgctttatacattcaaattgtaatctttttgaatcaatttctattgtaatcaacttcgatgatatatattgtaatcttgttataacttgtaaatgttgtaacttgtaaccattttgtaataaaaaatttccgctgcaaatgttggtgtgtgatttgtgtttacttaatcttgcgatcttggcggtaagtcgtttatccggggtccttggggcactcggacagatcctgttaagttatttggtgcacatgcatagtcgtttgaggtccttggaacgaggacaggtgcatgtgggcctgataacttgggaggttctgcgacagctggtatcggagctgaattaagtatatacggtcacatacatatttttaaaataaagttttggtttcgaaaacctattttcaactaaacacattgtttggttttgaaaaacagttttgaaaaaactataatgctagcgacatcctctattaagccctaaattaaggactactaggtggcttagttcagaatattaacccacaacctgggaagggtaatgcatacatgtgtaatgttatttttgaggccattcagttttgaatggatcgacgctcaggtaaggtgagatgtgagagtatgaccgaacaaacgtcggtctagggaagagtataaaaagcgcttgattatatacatgttacacatatgtatatatgaaggctgcgatgtggagtatttacttttccgggaatcggtaccccatggatgtgtatgggtatacagacatgggaataccgagaagtgtaatgtatttgcaacgacgcacctatgctcaggtaagaaggtgagttaccataatgagctgccctatggttaaagtgtggcagcggcgcctatgcgtggctcggcgcttaatgaggagctggcctccatatagcaatatatggagtataaactgtgataaactgtcatgtgtgaattgcatcattgggaattgggctgtgatggatttttctgcaggtacactaacttcgaactcgtatgtgtagctgacgactagcaatatatcgagagagacgtaattatgccaccgatatagaacgctattgccacattatgttggtgaaattcgtgaggacgaataggacgagcatgcatcctgattgttgcattgtgtttgttgtttgcgcaagaaatgcttccctcacctttattctaataataggtgattgtttttattctaataataggtgattgtgaaggaacatgcttttctcatctttattccgacaataaataattggaaactgtatgaagtattactgttttataagcaatttctagctttgtttgttgcgtcctttagacatgtgtttatgtggcatgtgattcttcttagtttgaccgctagtgcaacttgggtttgttttcgtgcttgtgtgctggtagaatgcaggtagtttgtttgcataaacccaaagctaggtcatgtccctgtttagtgaaccttaatctaactttatattaattttcttgacaacctatcctagatgtcgtcttgtgtgaagatcattttcttcacaagattattggagttctagcaattagaccaagtcatgtcctcatcatctcaacatttgaaattgtatgagatctaattcataattttgtcatttcttcaaagcctctctaaatcttccaactccatggccaaactcgtgcaaatagatgtttcagtaatccccttgttggagatgcactcaaacttaaaaacaaggatctcgagtctgtaatcttgacaatccacttgtagctctcttatggtcaaatgttcatcctaaaccatacccttgttcggttggtgcaagctggtattcctgttccaatttgcctctccttgaggatcactacattgatattttctcaaacttttatcatcttccttaaacttggattccctggctaaccacgagttaactgtgatgttattcgacattcatcctcgtcttatgtgctaggaatttccaatgaccacttgttggtaaacctctttctgtgtgttttacccaagaggttgcatctttcatggtttgtgtaattgctatccatttgtccaccgttctcaacagacccagatagtacagtgtcattagaaaaagaaaactgcacacatggaaccttatgtgttttctgtcagttatagcttgtttgttgacgtctctagtcaaactaaagtggtatgtgctatacccactagagaagcaacattttgagatgctcgtctttgcttggaattagtttatgctatcactattatggacagggttatacgcctctctactcttagaagtctttcgttctgaatctcgggacgagattcttttaaggggggaaggctgtaacaccccaggtgtttatcgtctactcgaccacgagtgtggacgttaacacgtgatagctgtgaatgtaagtggacactacattttaatcatctttgtctatcacgattttgatatcgtgtttgtctccatctgtttaaattgtcctaatttattttgtaaaaatcctgactttagtaatcttccgaaatattgaatccaatattgtttgggttgagccatcgacgtcttacctaaactataatttttgaaatcaaatgtagctccttaaaattcgtttgaaattctttcatgcttgcgttgcacatgtctatctgtggccagacatcgtgacacgcgtggcgtgtgcaaatctgtgggcggctgtgcataacttcttgcctacgatttgcgacacgtaacatcgtttctgtgaagtttcgcagacgcatcttatctccctgccgttatccctttcgtttatctgaatcggccaccgctccaactcctcaccacgtgtcgtgccttccgtcactccactgccgcgtgtccggcatgttagcgtcgtggtggttcttgggctcgcgggctgttgttgtgcttatcttctagagttttcagttatacctcgtttagatcttagttttggttcaactaaaaatagtttggtttatctattttagatccctgtatttttttaaaaaatctgtgggcttttagcaaaaggttgctatagtaaaattgtagagtaactataggagaacaacttttattaagtgttgaagccctaagtccatatggaactattagagaacttgacccaaaagtcctatcctcaaatctgaattttcagacttagtgatatttctgggttctgaacttttatgcctaagccaactttgaagcccttttattattcagtccattgggttttagcttaggaccattatatcaaaatggtagaggatctatgaatgtgcaactttgttgaagggagatggactcagtactacataaaaagtggagttactgacccctaaagataggctgtcagacgtccttaatttttcagataaggaagagtgaacagatctgaattctagtgtttggtttaaatttggagctatatggtgactgttctggacagttttggactgggatctttatagaaaagttgaagagtacatattggtgtacaagtttacttaacaatgattaacttggtaccatataaaataaatagttaagtacccttaaagttgccttaacagtctgcaatttctgggttcagtttcagaaaactgcaatgtggtttctgtgtgatctgcctcactttggagatctataactcgaaacctgtaaggtattgactctgaaagtctacaacaaattaaaagaccaatgttcagggaataaatttgatgtggagaggtagctctgtcattataaagaaattggagaaacggaggggacaaggtggttgttgctgtcgactgaactagatcaggcagtttgaaaatatctcaggaaaaagatctgcatccactagctgtttccagatgactttggataagtgcaaaacaataagaatttcgttctggtaaaaaggggggtcacgttggatatttttactgtccaaggggaggaaatgtggcagacttgaaacctatctagaaggtggtgacacagctgcttgtgatttgctgtcaaagccacattaaaccaccacaccgtgtccctctattcatggatcatgggtggaagatagcagtgcaaccacgtgccataaccctgtctctgttggaattccagagccctccttaaccggctttcagtgaaccccgtcgtgcccctgcgtgctgcgcgtcggccgtcgtccctgcaggagcctcttccatggcgcctagttttcttcccatggcgagctcgcctaagaaatcacccccatcgcaggtgttcgacgaaatgggagaaccaagaaattgtcgtcgtttctcatccgcgaccccgccagtctgcgttttggggagaggaaccccagggtttgggtgatgaagaaaaggtttgtgcacatcacttgcaagaggttcgatagaaaacttcaatcaaaaggctatcgtcgttcgtgtgaatattgagttgagttgaattgtgatgtggcgagccatttcgctactctatttagttaatttgattgttgtattgattagagttgtggccgatgattttcttgtctgtagtgtaagcatattgtgtgtcgactttcagatccatcgttgtccatatgcgcgatagttggtaaatgaacatgtcaaggggggagggtaaattgccaaatttccacacgttagggctctagtgggttattcaagtagttatggtccttttagctcatctaattggtaatatgtatgctgtgttatattagatggtttttaagtctactttaagataaggtgttagtagtatttgaagtactaagcacatgacagttgtagaagccaaataggagctaaattgaatatattactgtttagagctataggtacaattttaattgcgcagctaatttaacaaagcaaaccatgttttctgtagacatgttatataggaaagttgtagctcacttctttatcttgcttgtgtaaaaatttcatgaccatagacttagcagtttagaagttatgattttcctaagtccagtttcagaatctgtccagattctgtactgatttcgaaaattgctttgtttgactaaattaaacttagaatcagcccttagtaataatagaagaattgtaatacttttcttaagatttccaacagattttggatcaccctttttggtgatttataaattaagttacagctgtttgagttagtatctctgaatctgtacaaatctgatcagtaatgtttgtttgtattaactgacttcgatacacattgaatcaccttgagatgattataaatgaattgtagacaattctattagctttctaaaaagtctaggatcacctgatttggatgtctgaaactccagttatggaattttaaagtgagtggccgaattctgtccaaatctggacagaaattgcgtttagtactgtttgacatttctatatgtcgaatctcattgtgatgataataccaaaattgtagaggactttataagctttccaaaaagtcttagtttattattttttgatgaatattgtgtaagttatgaataaaacaactagctgctgttctgctgtacaaattcagcaaatatgaaatgattacttggagtttcttttgtgaggatacttatatttggttagttcttgtcttgattaatgaagtcttgtagtggcaaatggttgtttcttttctttcttaatgcttgctttagactttagcattttggagaaggaagtaaatgccttggtgaatgtatttgagtagtgactatttaggccttgtatgtgcataatgaaatagtaatgcaagtagtaaaatttatcacttctctcgtctatccgtgatgttaccctttattgcttatagtcttacaaatgtctatgatcttgataatgtttacttgcttgatcgaatgattgtaataatttgtttggttgatgtgttatgcctaataggttagattagtagttctaagaactagttgaaatacttctattcataaacctaaattaagtatccgaaattgataagtctacaagtagtaacctatcgatgttatgctttagcctaaggcttgtgtttagttatgttgcctaatgtttgaattaggttcgattaactcgaggatcatgattgtgtagattttctctcatgtttgattatgtatgttggtgagatcttgcctgtaatattgagttttcttccttgtgacattgtttagtcttattattccttcctatgttcatacatgtgcattatgcatatcatttaggtacactaattgatcacgtgatatggaggacaagagatggattaatcacaagacgatgctaatggacggagctaaagtggatgaatcaaccaagtgccgggacggaagatgctcaccaagtggtcatcatttaacaacactaacgtagtgtttatcccaggcaagccccggtgcatttgccacctccttgttgttttaaaacttttatcacttatatgctgcattaggtgataggagttgagtgatgaaacagttgatgcattgccattccttggaatttgattatcctccttgatacctgttttacaaaaagaactaatgaggcttagccctgcctagagaattaaaacttgtttctttttaaaagaatgatgtgtgacactgggtatgggtttgttttatgaaaatggacttgtaatggtgagcgcatcatctgcagtgatgaattcatcattcaagtatagtacctctgtcaggtatatggtttgggtgttaaataataagatgagaccagacgttgagcaggaaaggtcgcccgtctgtgtcgcttaaggaccg

SEQ ID NO: 62509 - DNA, 3888 bp, Zea Mays
gttggatatttttactgtccaaggggaggaaatgtggcagacttgaaacctatctagaaggtggtgacacagctgcttgtgatttgctgtcaaagccacattaaaccaccacaccgtgtccctctattcatggatcatgggtggaagatagcagtgcaaccacgtgccataaccttgtctctgttggaattccagagccctccttaaccggctttcagtgaaccccgtcgtgcccctgcgtgctgcgcgtcggccgtcgtccctgcaggagcctcttccatggcgcctagttttcttcccatggcgagctcgcccaagaaatcacccccatcgcagctcgccgtgtctgcgcagccccgacagtgacgatgtccatcccgttcggtgctctaggtgttcgacgaaatgggagaaccatgaaattgtcgtcgtttctcatccgcgaccccgccagtcttgtatgcagtccacatattgtgttcctcatcgcgttttggggagaggaaccccaggatttgggtgatgaagaaaaggtttgtgcgcatcacttgcaagaggttcgatagaaaacttcaatcaaaaggctatcgtcgttcgtgcgaatattgagttgaggtgaattgtgatgtggcgagccttttcgctactctatttagttaatttgattgttgtattgattagagttgtggccgatgattttcttgtctgtagtgtaagcatattgtgtgtcgactttcagatccatcgttgtccatatgcgcgatagttggtaaatgaacatgtcaagggggagggtaaattgccaaatttccacacgttagggctctagtgggttattcaagtagttatggtccttttagctcatctaattggtaatatgtatgctgtgttatattagatggtttttaagtctactttaagataaggtgttagtagtatttgaagtactaagcacatgacagttgtagaagccgaataggagctaaattgaatatattactgtttagagctataggtacaattttaattgcgcagctaatttaacaaagcaaaccatgttttctgtagacatgttatataggaaagttgtagctcactgtcaagggccttagagtctagggaagggggccctcggctacgtaggtcgtacccccggtccgtcttctccggagaggttttacccctcttccgaaggcttgagagtggtagggagaatggaggaaataactgtgttattgcttgtccctcaaaggagccagctacaaggctttatagcctacggtgtaacagaaaggggaaactaatccttctgatttaggatctctactaaaaggaaactgatctctatgatttaggatctctactaatttatttcttcttctagccgcccttccttctatagaggtggcggctgcatgtcctttgattctttccttcttctagccactgatttcttggctttccttttctgctgctgacgtggcactggctgctgctctttctgcagcgcgcctcccgtctcttgcgcgcctccgacggttataggggaggccccacatgacactcacttctttatcttgcttgtgtaaaaatttcatgaccatagacttagcagtttagaagttatgattttcccaagtccagtttcagaatctgtccagattctgtactgatttcgaaaattgctttgtttgactaaattaaacttataatcagcccttagtaattatagaagaattgtaatacttttcttaagatttccaacagattttggatcaccctttttggtgatctataaattaagttacagctgtttgagttagtatctctgaatctgtacaaatctggacagcaatgtttgtttgtattaactgatttcgatacacatttaatcaccttgagatgattataaatgaattgtagacaattctattagctttctaaaaattctaggatcacctgatttggatgtctgaaactccagttatggaattttaaagtgagtggccgaattctgtccaaatctggacagaaattgcgtttagtactgtttgacatttctatatgtcgaatctcattgtgatgataataccaaaattgtagaggactttataagctttccaaaaagtcttagtttactattttttgatgaatattgtgtaagttataaataaaacaactagctgctgttctgctgtacaaattcagcaaatatgaaatgattacttggagtttcttttgtgaggatacttatatttggttagttcttgtcttgattaatgaagtcttgtagtggcaaatggttgtttcttttctttcttaatgcttgctttagactttagcattttggagaaggaagtaaatgccttggtgaatgtatttgagtagtgacaatttaggccttgtatgtgcataatgaaatagtaatgcaagtagtaaaatttatcacttctctcgtctatccgtgatgttaccctttattgcttatagtcttacaaatgtctatgatcttgataatgtttacttgcttgatcgaatgattgtaataatttgtttggttgatgtgttatgcctaataggttagattagtagttctaagaactagttgaaatacttctattcataaacctaaattaagtatccgaaattgataagtctacaagtagtaacctatcgatgttatgctttagcctaaggcttgtgtttagttatgttgcctaatgtttgaattaggttcgattaactcgaggatcatgattgtgtagattttctctcatgtttgattatgtatgttggtgagatcttgcctgtaatattgagttttcttccttgtgacattgtttagtcttattattccttcctatgttcatatatgtgcattatgcatatcatttaggtacgctaattgatcacgtgatatggaggacaagagatggattaatcacaagacgatgctaatggacggagctaaagtggatgaatcaaccaagtgccgagacggaagatgctcacaaagtggtcatcatttaacaacactaacgtagtgtttatcccagagccctccttaaccggctttcagtgaaccccgtcgtgcccctgcgtgctgcgcgtcggccgtcgtccctgcaggagcctcttccatggcgcctagttttcttcccatggcgagctcgcctaagaaatcacccccatcgcaggtgttcgacgaaatgggagaaccaagaaattgtcgtcgtttctcatccgcgaccccgccagtctgcgttttggggagaggaaccccagggtttgggtgatgaagaaaaggtttgtgcacatcacttgcaagaggtacactaattgatcacgtgatatggaggacaagagatggattaatcacaagacgatgctaatggacggagctaaagtggatgaatcaaccaagtgccgggacggaagatgctcaccaagtggtcatcatttaacaacactaacgtagtgtttatcccaggcaagccccggtgcatttgccacctccttgttgttttaaaacttttatcacttatatgctgcattaggtgataggagttgagtgatgaaacagttgatgcattgccattccttggaatttgattatcctccttgatacctgttttacaaaaagaactaatgaggcttagccctgcctagagaattaaaacttgtttctttttaaaagaatgatgtgtgacactgggtatgggtttgttttatgaaaatggacttgtaatggtgagcgcatcatctgcagtgatgaattcatcattcaagtatagtacctctgtcaggtatatggtttgggtgttaaataataagatgagaccagacgttgagcaggaaaggtcgcccgtctgtgtcgcttaaggaccg

SEQ ID NO: 62510 - DNA, 1031 bp, Zea Mays
atttttactgtccaaggggaggaaatgtggcagacttgaaacctatctagaaggtggtgacacagctgcttgtgatttgctgtcaaagccacattaaaccaccacaccgtgtccctctattcatggatcatgggtggaagatagcagtgcaaccacgtgccataaccttgtctctgttggaattccagagccctccttaaccggctttcagtgaaccccgtcgtgcccctgcgtgctgcgcgtcggccgtcgtccctgcaggagcctcttccatggcgcctagttttcttcccatggcgagctcgcccaagaaatcacccccatcgcagctcgccgtgtctgcgcagccccgacagtgacgatgtccatcccgttcggtgctctaggtgttcgacgaaatgggagaaccatgaaattgtcgtcgtttctcatccgcgaccccgccagtcttgtatgcagtccacatattgtgttcctcatcggtacgctaattgatcacgtgatatggaggacaagagatggattaatcacaagacgatgctaatggacggagctaaagtggatgaatcaaccaagtgccgagacggaagatgctcacaaagtggtcatcatttaacaacactaacgtagtgtttatcccaggcaagccccggtgcatttgccacctccttgttgttttaaaacttttatcacttatatgctgcattaggtgataggagttgagtgatgaaacagttgatgcattgccattccttggaatttgattatcctccttgatacctgttttacaaaaagaactaatgaggcttagccctgcctagagaattaaaacttgtttctttttaaaagaatgatgtgtgacactgggtatgggtttgttttatgaaaatggacttgtaatggtgagcgcatcatctgtagtgatgaattcatcattcaagtatagtacctctgtcaggtatatggtttgggtgttaaataataagatgagaccagacgttgagcaggaaaggtcgcccgtctgtgtcgct

SEQ ID NO: 62511 - DNA, 3445 bp, Zea Mays
gttggatatttttactgtccaaggggaggaaatgtggcagacttgaaacctatctagaaggtggtgacacagctgcttgtgatttgctgtcaaagccacattaaaccaccacaccgtgtccctctattcatggatcatgggtggaagatagcagtgcaaccacgtgccataaccttgtctctgttggaattccagagccctccttaaccggctttcagtgaaccccgtcgtgcccctgcgtgctgcgcgtcggccgtcgtccctgcaggagcctcttccatggcgcctagttttcttcccatggcgagctcgcccaagaaatcacccccatcgcagctcgccgtgtctgcgcagccccgacagtgacgatgtccatcccgttcggtgctctaggtgttcgacgaaatgggagaaccatgaaattgtcgtcgtttctcatccgcgaccccgccagtcttgtatgcagtccacatattgtgttcctcatcgcgttttggggagaggaaccccaggatttgggtgatgaagaaaaggtttgtgcgcatcacttgcaagaggttcgatagaaaacttcaatcaaaaggctatcgtcgttcgtgcgaatattgagttgaggtgaattgtgatgtggcgagccttttcgctactctatttagttaatttgattgttgtattgattagagttgtggccgatgattttcttgtctgtagtgtaagcatattgtgtgtcgactttcagatccatcgttgtccatatgcgcgatagttggtaaatgaacatgtcaagggggagggtaaattgccaaatttccacacgttagggctctagtgggttattcaagtagttatggtccttttagctcatctaattggtaatatgtatgctgtgttatattagatggtttttaagtctactttaagataaggtgttagtagtatttgaagtactaagcacatgacagttgtagaagccgaataggagctaaattgaatatattactgtttagagctataggtacaattttaattgcgcagctaatttaacaaagcaaaccatgttttctgtagacatgttatataggaaagttgtagctcactgtcaagggccttagagtctagggaagggggccctcggctacgtaggtcgtacccccggtccgtcttctccggagaggttttacccctcttccgaaggcttgagagtggtagggagaatggaggaaataactgtgttattgcttgtccctcaaaggagccagctacaaggctttatagcctacggtgtaacagaaaggggaaactaatccttctgatttaggatctctactaaaaggaaactgatctctatgatttaggatctctactaatttatttcttcttctagccgcccttccttctatagaggtggcggctgcatgtcctttgattctttccttcttctagccactgatttcttggctttccttttctgctgctgacgtggcactggctgctgctctttctgcagcgcgcctcccgtctcttgcgcgcctccgacggttataggggaggccccacatgacactcacttctttatcttgcttgtgtaaaaatttcatgaccatagacttagcagtttagaagttatgattttcccaagtccagtttcagaatctgtccagattctgtactgatttcgaaaattgctttgtttgactaaattaaacttataatcagcccttagtaattatagaagaattgtaatacttttcttaagatttccaacagattttggatcaccctttttggtgatctataaattaagttacagctgtttgagttagtatctctgaatctgtacaaatctggacagcaatgtttgtttgtattaactgatttcgatacacatttaatcaccttgagatgattataaatgaattgtagacaattctattagctttctaaaaattctaggatcacctgatttggatgtctgaaactccagttatggaattttaaagtgagtggccgaattctgtccaaatctggacagaaattgcgtttagtactgtttgacatttctatatgtcgaatctcattgtgatgataataccaaaattgtagaggactttataagctttccaaaaagtcttagtttactattttttgatgaatattgtgtaagttataaataaaacaactagctgctgttctgctgtacaaattcagcaaatatgaaatgattacttggagtttcttttgtgaggatacttatatttggttagttcttgtcttgattaatgaagtcttgtagtggcaaatggttgtttcttttctttcttaatgcttgctttagactttagcattttggagaaggaagtaaatgccttggtgaatgtatttgagtagtgacaatttaggccttgtatgtgcataatgaaatagtaatgcaagtagtaaaatttatcacttctctcgtctatccgtgatgttaccctttattgcttatagtcttacaaatgtctatgatcttgataatgtttacttgcttgatcgaatgattgtaataatttgtttggttgatgtgttatgcctaataggttagattagtagttctaagaactagttgaaatacttctattcataaacctaaattaagtatccgaaattgataagtctacaagtagtaacctatcgatgttatgctttagcctaaggcttgtgtttagttatgttgcctaatgtttgaattaggttcgattaactcgaggatcatgattgtgtagattttctctcatgtttgattatgtatgttggtgagatcttgcctgtaatattgagttttcttccttgtgacattgtttagtcttattattccttcctatgttcatatatgtgcattatgcatatcatttaggtacgctaattgatcacgtgatatggaggacaagagatggattaatcacaagacgatgctaatggacggagctaaagtggatgaatcaaccaagtgccgagacggaagatgctcacaaagtggtcatcatttaacaacactaacgtagtgtttatcccaggcaagccccggtgcatttgccacctccttgttgttttaaaacttttatcacttatatgctgcattaggtgataggagttgagtgatgaaacagttgatgcattgccattccttggaatttgattatcctccttgatacctgttttacaaaaagaactaatgaggcttagccctgcctagagaattaaaacttgtttctttttaaaagaatgatgtgtgacactgggtatgggtttgttttatgaaaatggacttgtaatggtgagcgcatcatctgtagtgatgaattcatcattcaagtatagtacctctgtcaggtatatggtttgggtgttaaataataagatgagaccagacgttgagcaggaaaggtcgcccgtctgtgtcgct

SEQ ID NO: 62512 - DNA, 1252 bp, Zea Mays
gttggatatttttactgtccaaggggaggaaatgtggcagacttgaaacctatctagaaggtggtgacacagctgcttgtgatttgctgtcaaagccacattaaaccaccacaccgtgtccctctattcatggatcatgggtggaagatagcagtgcaaccacgtgccataaccttgtctctgttggaattccagagccctccttaaccggctttcagtgaaccccgtcgtgcccctgcgtgctgcgcgtcggccgtcgtccctgcaggagcctcttccatggcgcctagttttcttcccatggcgagctcgcccaagaaatcacccccatcgcagctcgccgtgtctgcgcagccccgacagtgacgatgtccatcccgttcggtgctctaggtgttcgacgaaatgggagaaccatgaaattgtcgtcgtttctcatccgcgaccccgccagtcttgtatgcagtccacatattgtgttcctcatcggtgaggcttgatgttcatgacttggtacctacatctttatattaaccatatatgagtttctgtgtttgatgtggactgaaatccttagcgttttggggagaggaaccccaggatttgggtgatgaagaaaaggtttgtgcgcatcacttgcaagaggttcgatagaaaacttcaatcaaaaggctatcgtcgttcgtgcgaatattgagttgaggtacgctaattgatcacgtgatatggaggacaagagatggattaatcacaagacgatgctaatggacggagctaaagtggatgaatcaaccaagtgccgagacggaagatgctcacaaagtggtcatcatttaacaacactaacgtagtgtttatcccaggcaagccccggtgcatttgccacctccttgttgttttaaaacttttatcacttatatgctgcattaggtgataggagttgagtgatgaaacagttgatgcattgccattccttggaatttgattatcctccttgatacctgttttacaaaaagaactaatgaggcttagccctgcctagagaattaaaacttgtttctttttaaaagaatgatgtgtgacactgggtatgggtttgttttatgaaaatggacttgtaatggtgagcgcatcatctgtagtgatgaattcatcattcaagtatagtacctctgtcaggtatatggtttgggtgttaaataataagatgagaccagacgttgagcaggaaaggtcgcccgtctgtgtcgct

SEQ ID NO: 62513 - DNA, 994 bp, Zea Mays
ggcaattcaaccaccaaaattatataggaactaggtgtaagcctaattccctttcactctctgaactcatcgtaccagtcttcatgctcctccagcaatacctgtttttgaccagatcggtgatctgacggcgtggacccgatgctgatcgaatgacccaaagagacggattgcaggcctgttccaccgcgcggcctcgatttccccttaacacaacacagaggaagcaggcggcggcgatcgggcgatggcatggcgggcgagcctgtctcggagcctaaaggagatccgcgtcctcttctgtcagtcctccccggccagcgccgccgcccgtgagttcgtgaagaagaactatggtgacatcaaggctcgcaacccctccctccccttccttgtccgcgagtgctccggtgtccagccccagctctgggcgcgctacgatatgggtgtggagagatgcgtgaacttggatggcctgacggaagcacagattgataaaaagctggaggagcttgccaaggccggcgagtctcttaaaaccaaatagttttggaactctatcctgccatgtttaacgttcccaaataaatgatgccatatgggtgagcaattgttactctatcgttatctgtagttgtgcctggaattaagtctttaattggcttaactttgtgaaataatcactactcttttacttgccatgcattttctagattacatgctatattgaaaagggaaaaaatcaatgatttgataagaagaatatatacctagtagcttgtgcatgagagattgatcgtgcaatatttctgcgcagttatatacataattgtatcacagttctatacttcagttctgcgcatgactgaaattgtgcagacacatgtacgattattatttgtttttttctatactttgatgccatgtataaagttttttttacttgtatgtattatagaaaaaaagaagatatatatatatttaaaagtattgg

SEQ ID NO: 62514 - DNA, 1071 bp, Zea Mays
caacagtggattacacaacgtgatcaaataaaaaaaggagttacttcctgaaacaaaataccctgcaccaacgctactgtccagtgactttgatgatggaggtgtgggcaatatcaaatcaaactgtgcacttatgaatgcttcaattccaagttttgaaagcatggtaagtttactttatatattatcaatattatagagttgttgcatgcatgcaaattttagtacagtcaatattatgtggcatgaaggagatggaaaccagacagatggccaacttggggattcatcaggagctgggaccagagatcagtgaaaatcccatgggaaatcatattaacccagaaaaggaaactaatgaaactccaggatctgaggttaaccaagagcttgtggatatatgcccagggcgcagtggtggaaattgatatgagccaagaaaatcaagctgttccagaggcaagcttagaggttaatgaagagactatggggcatcgtagcgctcgtgtcatgataagttgcttgtgttcagacatagaaataaaagtatgaggcataggcatagaacaaatttccttttcactcttatattggtaatagacaacacccatatccgcctataaggtagtaatctgtggtcaaatttgcccatattttttattttcatcgctaacaaaaatggatcttgtgatacctcagttacctgctactttgatgaaacctcgtgtatgtgtattttttacaagaaaatattttagtgttcttctctcagctcgacttcgtatcagcagaggagaacatacattgtggaaataaactaattatggtctccgatttaagatatgactgtatggcaacaaaagatgtacactaaactggctggactgcagtataaaattgtgtacaagaaggggattgagaatggggctgcagatgctctctctaggcaaccaagggacacgattcagtgtactgctatatctcagattaccccagaatggttgcaggaagtggtggctgcttatgctaatgatccatatagccaggagttactcactaagttgagtctgc

SEQ ID NO: 62515 - DNA, 1327 bp, Zea Mays
atgctattaagattcataacagaatgagctggagcaaacaactttctcatcatgtagtgtttgaaccaaataaaagttcagcatgacatcagttttttttgctgtcttccgggccaccatggcatactgcctggctctatcttcctgctttgcaaaaagttgttatatacaattgcaacaataaggcatgccccttgatttcaggaagcactaagaggtgatgcgatacatcctgccaattgttacatctcatgcataatacgtacagtcggtctgtgctgtgcaatgcttcatatgtgattctctttggacgtcaatgcaaggtttctgacctctgttttggatgtgttatacctcagattttagttttctgtagcatgacatcaattgaccatggaacttcataattacttcaagatgctaacagagggccatgttgaagacttgaactaacagagggcatgatcattaatgttgtcaaaattcagaaataccttgaagaacagcagagccttcgattttgcacaagaacagtgtaagagagtttcagaaccaccacatgatgagacattctatatatatgtttctccagactgaggtatagacatgcagtgaaaagcaaaggtacacattcttgggaatagttaacaatctcccaaattgaggtgaagattggagctgatggtgaacaagcaacgaatatactgcataattgcgttcatatcagtgtaaaatgggcacagctaacctgaaaaacaaaactcaaatgcatattataaaagctgactatgtcacaaataaagtagggaaagatggttacagctgtattatatgggtacttttggttcaattgctgcttagagccgaaagagatcaaaggactccagtccactacccacagaacccgggcactgctctcgagatgttctcgaaaggacaattatcttgcttaattaaatagtgaccaaatacgcatagcttcattgtgaattggccactcgctaattttatatttgtgtttctaatcattccatagtgtgcaccaaggaaccaatggaattgtatggtctacaactctatattcgtgtttcttgacttagcaggtttacaatggaacgctttgaaaggacagggtcaactgtttcttgcaagctggttgatgaaaaatatgctgattgacaatacacgcgagtccaatttgttgctatctgtttattgctgaatgatactgttattgataaattcctgtatgcatgtcttgatgaagtaatgtttatttgcgttcactctatttgtatcgaagacttggagtttcggtacggattca

SEQ ID NO: 62516 - DNA, 1616 bp, Zea Mays
cttaaatttgggattatctcgtagacacatttttcatatgcaacgcctacctatatttggagtcagtgtgaattttcaaatgtacatcatcattgtgagtactagtagtgacggtgtgagaatgagctggagcaaacaactttctcatcatgtagtgtttgaaccaaataaaagttcagcatgacatcagttttttttgctgtcttccgggccaccatggcatactgcctggctctatcttcctgctttgcaaaaaggaagcactaagaggtgatgcgatacatcctgccaattgttacatctcatgcataatacgtacagtcggtctgtgctgtgcaatgcttcatgtaagtccttgcaaagagttgctccacatgaagcgtttaaatgtaaatgtgtaattgatcatatcaaatcgttctgtaccttacctgatttgttcttcattcgataaagtcactccactaactgttcccttttctggttttagactctatatctatgtttaggcgtactaaccaacatgctcaatgtttttgtatcagcctatccttgattagttttcatgtttattttactgtagatgtgattctctttggacgtcaatgcaaggtttctgacctctgttttggatgtgttatacctcagattttagttttctgtagcatgacatcaattgaccatggaacttcataattacttcaagatgctaacagagggccatgttgaagacttgaactaacagagggcatgatcattaatgttgtcaaaattcagaaataccttgaagaacagcagagccttcgattttgcacaagaacagtgtaagagagtttcagaaccaccacatgatgagacattctatatatatgtttctccagactgaggtatagacatgcagtgaaaagcaaaggtacacattcttgggaatagttaacaatctcccaaattgaggtgaagattggagctgatggtgaacaagcaacgaatatactgcataattgcgttcatatcagtgtaaaatgggcacagctaacctgaaaaacaaaactcaaatgcatattataaaagctgactatgtcacaaataaagtagggaaagatggttacagctgtattatatgggtacttttggttcaattgctgcttagagccgaaagagatcaaaggactccagtccactacccacagaacccgggcactgctctcgagatgttctcgaaaggacaattatcttgcttaattaaatagtgaccaaatacgcatagcttcattgtgaattggccactcgctaattttatatttgtgtttctaatcattccatagtgtgcaccaaggaaccaatggaattgtatggtctacaactctatattcgtgtttcttgacttagcaggtttacaatggaacgctttgaaaggacagggtcaactgtttcttgcaagctggttgatgaaaaatatgctgattgacaatacacgcgagtccaatttgttgctatctgtttattgctgaatgatactgttattgataaattcctgtatgcatgtcttgatgaagtaatgtttatttgcgttcactctatttgtatcgaagacttggagtttcggtacggattca

SEQ ID NO: 62517 - DNA, 1665 bp, Zea Mays
cagacttaaatttgggattatctcgtagacacatttttcatatgcaacgcctacctatatttggagtcagtgtgaattttcaaatgtacatcatcattgtgagtactagtagtgacggtgtgagaatgagctggagcaaacaactttctcatcatgtagtgtttgaaccaaataaaagttcagcatgacatcagttttttttgctgtcttccgggccaccatggcatactgcctggctctatcttcctgctttgcaaaaagttgttatatacaattgcaacaataaggcatgccccttgatttcaggaagcactaagaggtgatgcgatacatcctgccaattgttacatctcatgcataatacgtacagtcggtctgtgctgtgcaatgcttcatgtaagtccttgcaaagagttgctccacatgaagcgtttaaatgtaaatgtgtaattgatcatatcaaatcgttctgtaccttacctgatttgttcttcattcgataaagtcactccactaactgttcccttttctggttttagactctatatctatgtttaggcgtactaaccaacatgctcaatgtttttgtatcagcctatccttgattagttttcatgtttattttactgtagatgtgattctctttggacgtcaatgcaaggtttctgacctctgttttggatgtgttatacctcagattttagttttctgtagcatgacatcaattgaccatggaacttcataattacttcaagatgctaacagagggccatgttgaagacttgaactaacagagggcatgatcattaatgttgtcaaaattcagaaataccttgaagaacagcagagccttcgattttgcacaagaacagtgtaagagagtttcagaaccaccacatgatgagacattctatatatatgtttctccagactgaggtatagacatgcagtgaaaagcaaaggtacacattcttgggaatagttaacaatctcccaaattgaggtgaagattggagctgatggtgaacaagcaacgaatatactgcataattgcgttcatatcagtgtaaaatgggcacagctaacctgaaaaacaaaactcaaatgcatattataaaagctgactatgtcacaaataaagtagggaaagatggttacagctgtattatatgggtacttttggttcaattgctgcttagagccgaaagagatcaaaggactccagtccactacccacagaacccgggcactgctctcgagatgttctcgaaaggacaattatcttgcttaattaaatagtgaccaaatacgcatagcttcattgtgaattggccactcgctaattttatatttgtgtttctaatcattccatagtgtgcaccaaggaaccaatggaattgtatggtctacaactctatattcgtgtttcttgacttagcaggtttacaatggaacgctttgaaaggacagggtcaactgtttcttgcaagctggttgatgaaaaatatgctgattgacaatacacgcgagtccaatttgttgctatctgtttattgctgaatgatactgttattgataaattcctgtatgcatgtcttgatgaagtaatgtttatttgcgttcactctatttgtatcgaagacttggagtttcggtacggattca

SEQ ID NO: 62518 - DNA, 1402 bp, Zea Mays
gacagacttaaatttgggattatctcgtagacacatttttcatatgcaacgcctacctatatttggagtcagtgtgaattttcaaatgtacatcatcattgtgagtactagtagtgacggtgtgaggtaatttccaatcaactcatgatataagaccacatgaagttgttctagtcttcttgctaatgctattaagattcataacagaatgagctggagcaaacaactttctcatcatgtagtgtttgaaccaaataaaagttcagcatgacatcagttttttttgctgtcttccgggccaccatggcatactgcctggctctatcttcctgctttgcaaaaaggaagcactaagaggtgatgcgatacatcctgccaattgttacatctcatgcataatacgtacagtcggtctgtgctgtgcaatgcttcatattttagttttctgtagcatgacatcaattgaccatggaacttcataattacttcaagatgctaacagagggccatgttgaagacttgaactaacagagggcatgatcattaatgttgtcaaaattcagaaataccttgaagaacagcagagccttcgattttgcacaagaacagtgtaagagagtttcagaaccaccacatgatgagacattctatatatatgtttctccagactgaggtatagacatgcagtgaaaagcaaaggtacacattcttgggaatagttaacaatctcccaaattgaggtgaagattggagctgatggtgaacaagcaacgaatatactgcataattgcgttcatatcagtgtaaaatgggcacagctaacctgaaaaacaaaactcaaatgcatattataaaagctgactatgtcacaaataaagtagggaaagatggttacagctgtattatatgggtacttttggttcaattgctgcttagagccgaaagagatcaaaggactccagtccactacccacagaacccgggcactgctctcgagatgttctcgaaaggacaattatcttgcttaattaaatagtgaccaaatacgcatagcttcattgtgaattggccactcgctaattttatatttgtgtttctaatcattccatagtgtgcaccaaggaaccaatggaattgtatggtctacaactctatattcgtgtttcttgacttagcaggtttacaatggaacgctttgaaaggacagggtcaactgtttcttgcaagctggttgatgaaaaatatgctgattgacaatacacgcgagtccaatttgttgctatctgtttattgctgaatgatactgttattgataaattcctgtatgcatgtcttgatgaagtaatgtttatttgcgttcactctatttgtatcgaagacttggagtttcggtacggattca

SEQ ID NO: 62519 - DNA, 1395 bp, Zea Mays
atgatccgtgacagacttaaatttgggattatctcgtagacacatttttcatatgcaacgcctacctatatttggagtcagtgtgaattttcaaatgtacatcatcattgtgagtactagtagtgacggtgtgagaatgagctggagcaaacaactttctcatcatgtagtgtttgaaccaaataaaagttcagcatgacatcagttttttttgctgtcttccgggccaccatggcatactgcctggctctatcttcctgctttgcaaaaaggaagcactaagaggtgatgcgatacatcctgccaattgttacatctcatgcataatacgtacagtcggtctgtgctgtgcaatgcttcatatgtgattctctttggacgtcaatgcaaggtttctgacctctgttttggatgtgttatacctcagattttagttttctgtagcatgacatcaattgaccatggaacttcataattacttcaagatgctaacagagggccatgttgaagacttgaactaacagagggcatgatcattaatgttgtcaaaattcagaaataccttgaagaacagcagagccttcgattttgcacaagaacagtgtaagagagtttcagaaccaccacatgatgagacattctatatatatgtttctccagactgaggtatagacatgcagtgaaaagcaaaggtacacattcttgggaatagttaacaatctcccaaattgaggtgaagattggagctgatggtgaacaagcaacgaatatactgcataattgcgttcatatcagtgtaaaatgggcacagctaacctgaaaaacaaaactcaaatgcatattataaaagctgactatgtcacaaataaagtagggaaagatggttacagctgtattatatgggtacttttggttcaattgctgcttagagccgaaagagatcaaaggactccagtccactacccacagaacccgggcactgctctcgagatgttctcgaaaggacaattatcttgcttaattaaatagtgaccaaatacgcatagcttcattgtgaattggccactcgctaattttatatttgtgtttctaatcattccatagtgtgcaccaaggaaccaatggaattgtatggtctacaactctatattcgtgtttcttgacttagcaggtttacaatggaacgctttgaaaggacagggtcaactgtttcttgcaagctggttgatgaaaaatatgctgattgacaatacacgcgagtccaatttgttgctatctgtttattgctgaatgatactgttattgataaattcctgtatgcatgtcttgatgaagtaatgtttatttgcgttcactctatttgtatcgaagacttggagtttcggtacggattca

SEQ ID NO: 62520 - DNA, 1343 bp, Zea Mays
atgatccgtgacagacttaaatttgggattatctcgtagacacatttttcatatgcaacgcctacctatatttggagtcagtgtgaattttcaaatgtacatcatcattgtgagtactagtagtgacggtgtgaggtaatttccaatcaactcatgatataagaccacatgaagttgttctagtcttcttgctaatgctattaagattcataacagaatgagctggagcaaacaactttctcatcatgtagtgtttgaaccaaataaaagttcagcatgacatcagttttttttgctgtcttccgggccaccatggcatactgcctggctctatcttcctgctttgcaaaaaggaagcactaagaggtgatgcgatacatcctgccaattgttacatctcatgcataatacgtacagtcggtctgtgctgtgcaatgcttcatagggccatgttgaagacttgaactaacagagggcatgatcattaatgttgtcaaaattcagaaataccttgaagaacagcagagccttcgattttgcacaagaacagtgtaagagagtttcagaaccaccacatgatgagacattctatatatatgtttctccagactgaggtatagacatgcagtgaaaagcaaaggtacacattcttgggaatagttaacaatctcccaaattgaggtgaagattggagctgatggtgaacaagcaacgaatatactgcataattgcgttcatatcagtgtaaaatgggcacagctaacctgaaaaacaaaactcaaatgcatattataaaagctgactatgtcacaaataaagtagggaaagatggttacagctgtattatatgggtacttttggttcaattgctgcttagagccgaaagagatcaaaggactccagtccactacccacagaacccgggcactgctctcgagatgttctcgaaaggacaattatcttgcttaattaaatagtgaccaaatacgcatagcttcattgtgaattggccactcgctaattttatatttgtgtttctaatcattccatagtgtgcaccaaggaaccaatggaattgtatggtctacaactctatattcgtgtttcttgacttagcaggtttacaatggaacgctttgaaaggacagggtcaactgtttcttgcaagctggttgatgaaaaatatgctgattgacaatacacgcgagtccaatttgttgctatctgtttattgctgaatgatactgttattgataaattcctgtatgcatgtcttgatgaagtaatgtttatttgcgttcactctatttgtatcgaagacttggagtttcggtacggattca

SEQ ID NO: 62521 - DNA, 282 bp, Zea Mays
gtccagcccggtgatctcaagtccttacccaacatctccttgcggtttctgtgcaattgcttcgccctgctatacaatcgaagacaagggactctgaaatttggctgtcgactgattctgctagtttcgttctcatgaaataaaatatatataaaaatactgctgctgccgccgcggtctttgtggtttggagtgtgctttaagtttaagcaagcgtcctaggatgacgcgcccggcatatatgtgtagacagaggtgctccatggagcaggggtgccgttt

SEQ ID NO: 62522 - DNA, 300 bp, Zea Mays
atgaaacaagtgttccaacaatatatttctatatatcatatagaaataatagtagtaacacaaccacacttgaagctacactttaaccaaacttcaaagtattcaacaaaacagcaagggactagggacacatgatcttagtctctaggaatgttggacagcaaagaacaaaaacagtaaggaatgaaatagcgtcttggccaagacgccaacacaggcacataggatcttggagtcttcgtttcttggactcttggtcttggagtttggacaaccacacagcacttggagtcttggtct

SEQ ID NO: 62523 - DNA, 753 bp, Zea Mays
atgagaagagatcgccaaattttaaaggatgtgatagaagactttgctggaggtgtaggggcgagctcggagtttgtcatgcacactttgaatgtcaattgtgccaagtttggaaggcgagcatcaaggatcctcatcactggtggggaggatttgaaggtcaatctttgggctatagggaaacccggtgccctcctgagtctatcaggctttataagtccagttgagtcagtaagctttgactcttctgaagttacgataggtgctggtgcagcaagtggaacgataaaaatatggaatattgaggaggcgaaagttgttcgaactttcactggacacagatcaagctgtgcatctcttgatttccatccttttggagaattcttagccactgggtcttcaaatacaaacatgaaaatatggaatactcgacagaagagatgcatccacacatacaagggtcatacccaacgaattaatgtgcttaaatttactcatgatggccgatggattgtttctggtggggctgataactcagtgaaggtctgggatttgacggctggaaaactcatgcatgatttttgtcttcatgaaggtccagtcaactgcttagatgttcacccctatgagtttttattggctacaggttcagttgataagactgttaaattttgggaccttggaacttttgagttgatcagttcttctggacccgaggttttcttttcctaggatataattaaccttttcttg

SEQ ID NO: 62524 - DNA, 1418 bp, Zea Mays
ccttttcgaaccctcgagtccccaaacaaatctctcttccctcctcacgctgctcccaaactggactacttatctttttcatgatttcttttaatttataattaatggcgaggagagagagacacaatgtgtgtgcgcgcgcgtgattagagagaggcctatatttcatttccgacccgcggccactcgcacgcttctgcttccgttttccctctctcattcaaaaactcgccacctctctacctctaagtctctaaccgccgtgtgtccccttcccctctcgctcggccaggccaccagctgccaggtccggcggcaatgggcaaggcggcgcgctggttccgcagcttcctgggcaagaaggaccaggcaaccaccaaaggccagaggcggcagcaggaccaggctctgcctcctccggccagcgccaagcgctggagcttcggcaagtcgtcgcgggactcggcggaagcggcggcggcggcgacagccgccgccgcggtcgtctcgcccgacgcaggcaacgcggcgatcgcgcgcgccgcggaggccgcgtggctcaggtccgccgcgtgcgccgagacggaccgggaccgggagcagagcaagcacgccatcgccgtggccgccgccaccgccgccgcggcggacgcggcggtggccgcggctcaggcggccgtcgccgtcgtgcgcctcaccagcaagggacgcccgccgtctcccgtcgtcctcgccgccgtcaggatccagacggtgttccggggattcttggcgaagaaggcgttgcgcgcgctcaaggcgctcgtgaagctgcaggcgctggtgcgtggctacctcgtgcgcaggcaggcggccgccacgctgcagagcatgcaggctctcgtccgcgcgcaggcggccgtgcgcgagaggcgcgccgccctccaccaccagcccgtccggccgcgctactcgctgcaagagcggtacgcggacgacacgcggagcgagcacggggtggcggcgtacagcagccgccggctgtcggcgagcgtcgagtccccgtcgtacggctacgaccggagccccaagatcgtggaggtggaccccggccgccccaagtcgcggtcgtcctcgcgccgcgccagcgccccgctgctggacgcccgcagcagcggcagcggcggcggcgaggagtggtgcgccaacaaccccgcgtcctcgccgctgccgtgctacctgccctccgggccgcggcgcatcgccgtgccgacctcgcgccagttcccggactacgactggtgcgtgctggagaaggcacggccggccacggcgcagagcacgccgcggtacctgcaagcgcacgcgccggccaccccgaccaagtccgtcgcgggctactcgccgtcgctcaacgcctgcccgaactacatgtcgag

SEQ ID NO: 62525 - DNA, 1313 bp, Zea Mays
cagatagtcggatgatgcttgcagcatgaaggccagaacagggctcaaggagcttaggatcctaaaaaatgtaaaagcattggaggaggctgatcggttgaagcaagaaactgataggttggctaaagaggttgaacaacttcagagtggcaggtttgcagatgtcgaagaattggtatatctgaaatggataaatgcctgcctacggtatgagctgagaaacaaggatgccccatcagggaagactgttgcacgagatcttagcaagaccctgagccccaagtctgaattgaaggccaaacagctgataatggaatatgccaatgtgggtgcggaggacagtcacttggggcatgtcgaattcggttcagagtgctcttcctcacgggcttcgtcaggtgaaccggatgatgtgtcaattgatattgcttccatgacaaagcatactaataaaaaccccaaaaagaagaagttcttctctaagcttcggaaactggtgctgggaaaagggaaagagaaccgtgaaatttctactctggagaggagagtgtctatttcaagttgttccttcgatgacttcactggaagggattcacatgatagctattcttcgttcatggcagaaccaaacatgcctgatagtcgacggcatggtgatcatggctttggtacacattcttctttggacagcgcaaaatctagtcctcttggcacagaaattgtaggtgaaagaagtgaccattctgtggtgaagagtgtatcttctagagaggaaaaggtaaatgcattcggtcccagcattggccttgatagtagcaaggccatacctgaggatgttgagatccataaatttgctgatgcgctgatcacatcaaggtcaggttccatgtcatcaagaagatcggcatccttccgacactgatataggagtcatctgctactgacccctctgcctggatgtatatttctgccagttcttgatggggggagttataggagatgttactggaatataagttgtcaatactttatttttttgtaccattgcgtatagggtgtagtttacttacctttaataccaactcctactacctgggctcgtcatgtgtaccataaaatggcacatttcaatggcaaacacaagacaattgtaacaccctaaatccatcaattaaggtaacctagattatattattaatttctcgtagaaaggaaaatatttatgtttacaaataataaaatggtgttatgaataaatcgatcaatctcttagaagataaaattttacaagtgtttgatgcactcatgccaaa

SEQ ID NO: 62526 - DNA, 2323 bp, Zea Mays
aattatttgaatttggcacggctccgggctcctctcgtggcgcaaatggacgcctttttgtgaccgacgacaagcagcggcgttggtgggccgagcgccggggacgccaaggacttgccccaacttttcctcagagtgggcgcggccgtcacgctctccgtagccggtctgctcttctcgcggcgccagcggccgccccggcagctcctgccgccgccgccgcgtcctccctcggagtcggatgatgcttgcagcatgaaggccagaacagggctcaaggagcttaggatcctaaaaaatgaggataccaaggcaaaaattatcagtgggaactctgtgcacacgaccactaccactacgacaattaccaccaccgcattagtaccattggcccctaaatgcagaagccttgctgatgatgaaggctatctccttccggagttcaatgacatggttctcagagaatttggccaagatatagatagcattccatccacacctgcagcgagagtaagggaagatgtatcgaatgaccatgaagtccacaaacttagagatttggtgagatcactgcaagaaagggagaagactctggagctacagcttctggagtgttacggtttgcaggagcaagatgctgcggtgagggagcttgagaatcagctgaagattaacaacgttgaatcaaagttgtacttgctgaagattgaatctttacagactgaaaaccagaggctgcaaacacagctctcagagaactcaaaaatattctctgagcttgaggcgacaagaacaaaatgcaagtttctgaagaagaagtttatatcggatgcagaacaggcaaaggagcaaatcatttctcttcagaaaatggtcgactcattgcagaacaaacagactgatgaggagaaaaaatttattgagtttgaaaataaactgaagagactagaggagctggaaaaagaggcaacagagctaagagcggcaaattcaaggctgcagcaggagaatgcacatcttattaggcgactggaggttacacgcctaccccctgtacccaagcccaaaactagtatggaggtaaaagcattggaggaggctgatcggttgaagcaagaaactgataggttggctaaagaggttgaacaacttcagagtggcaggtttgcagatgtcgaagaattggtatatctgaaatggataaatgcctgcctacggtatgagctgagaaacaaggatgccccatcagggaagactgttgcacgagatcttagcaagaccctgagccccaagtctgaattgaaggccaaacagctgataatggaatatgccaatgtgggtgcggaggacagtcacttggggcatgtcgaattcggttcagagtgctcttcctcacgggcttcgtcaggtgaaccggatgatgtgtcaattgatattgcttccatgacaaagcatactaataaaaaccccaaaaagaagaagttcttctctaagcttcggaaactggtgctgggaaaagggaaagagaaccgtgaaatttctactctggagaggagagtgtctatttcaagttgttccttcgatgacttcactggaagggattcacatgatagctattcttcgttcatggcagaaccaaacatgcctgatagtcgacggcatggtgatcatggctttggtacacattcttctttggacagcgcaaaatctagtcctcttggcacagaaattgtaggtgaaagaagtgaccattctgtggtgaagagtgtatcttctagagaggaaaaggtaaatgcattcggtcccagcattggccttgatagtagcaaggccatacctgaggatgttgagatccataaatttgctgatgcgctgatcacatcaaggtcaggttccatgtcatcaagaagatcggcatccttccgacactgatataggagtcatctgctactgacccctctgcctggatgtatatttctgccagttcttgatggggggagttataggagatgttactggaatataagttgtcaatactttatttttttgtaccattgcgtatagggtgtagtttacttacctttaataccaactcctactacctgggctcgtcatgtgtaccataaaatggcacatttcaatggcaaacacaagacaattgtaacaccctaaatccatcaattaaggtaacctagattatattattaatttctcgtagaaaggaaaatatttatgtttacaaataataaaatggtgttatgaataaatcgatcaatctcttagaagataaaattttacaagtgtttgatgcactcatgccaaa

SEQ ID NO: 62527 - DNA, 2405 bp, Zea Mays
ctttctggttttctgcaaaaaatttatccctccaagaacagattcttcgccactaccttgtggtctcgttagagtcccaaattatttgaatttggcacggctccgggctcctctcgtggcgcaaatggacgcctttttgtgaccgacgacaagcagcagcggcgttggtgggccgagcgccggggacgccaaggacttgccccaacttttcctcagagtgggcgcggccgtcacgctctccgtagccggtctgctcttctcgcggcgccagcggccgccccggcagctcctgccgccgccgccgcgtcctccctcggagtcggatgatgcttgcagcatgaaggccagaacagggctcaaggagcttaggatcctaaaaaatgaggataccaaggcaaaaattatcagtgggaactctgtgcacacgaccactaccactacgacaattaccaccaccgcattagtaccattggcccctaaatgcagaagccttgctgatgatgaaggctatctccttccggagttcaatgacatggttctcagagaatttggccaagatatagatagcattccatccacacctgcagcgagagtaagggaagatgtatcgaatgaccatgaagtccacaaacttagagatttggtgagatcactgcaagaaagggagaagactctggagctacagcttctggagtgttacggtttgcaggagcaagatgctgcggtgagggagcttgagaatcagctgaagattaacaacgttgaatcaaagttgtacttgctgaagattgaatctttacagactgaaaaccagaggctgcaaacacagctctcagagaactcaaaaatattctctgagcttgaggcgacaagaacaaaatgcaagtttctgaagaagaagtttatatcggatgcagaacaggcaaaggagcaaatcatttctcttcagaaaatggtcgactcattgcagaacaaacagactgatgaggagaaaaaatttattgagtttgaaaataaactgaagagactagaggagctggaaaaagaggcaacagagctaagagcggcaaattcaaggctgcagcaggagaatgcacatcttattaggcgactggaggttacacgcctaccccctgtacccaagcccaaaactagtatggaggtaaaagcattggaggaggctgatcggttgaagcaagaaactgataggttggctaaagaggttgaacaacttcagagtggcaggtttgcagatgtcgaagaattggtatatctgaaatggataaatgcctgcctacggtatgagctgagaaacaaggatgccccatcagggaagactgttgcacgagatcttagcaagaccctgagccccaagtctgaattgaaggccaaacagctgataatggaatatgccaatgtgggtgcggaggacagtcacttggggcatgtcgaattcggttcagagtgctcttcctcacgggcttcgtcaggtgaaccggatgatgtgtcaattgatattgcttccatgacaaagcatactaataaaaaccccaaaaagaagaagttcttctctaagcttcggaaactggtgctgggaaaagggaaagagaaccgtgaaatttctactctggagaggagagtgtctatttcaagttgttccttcgatgacttcactggaagggattcacatgatagctattcttcgttcatggcagaaccaaacatgcctgatagtcgacggcatggtgatcatggctttggtacacattcttctttggacagcgcaaaatctagtcctcttggcacagaaattgtaggtgaaagaagtgaccattctgtggtgaagagtgtatcttctagagaggaaaaggtaaatgcattcggtcccagcattggccttgatagtagcaaggccatacctgaggatgttgagatccataaatttgctgatgcgctgatcacatcaaggtcaggttccatgtcatcaagaagatcggcatccttccgacactgatataggagtcatctgctactgacccctctgcctggatgtatatttctgccagttcttgatggggggagttataggagatgttactggaatataagttgtcaatactttatttttttgtaccattgcgtatagggtgtagtttacttacctttaataccaactcctactacctgggctcgtcatgtgtaccataaaatggcacatttcaatggcaaacacaagacaattgtaacaccctaaatccatcaattaaggtaacctagattatattattaatttctcgtagaaaggaaaatatttatgtttacaaataataaaatggtgttatgaataaatcgatcaatctcttagaagataaaattttacaagtgtttgatgcactcatgccaaa

SEQ ID NO: 62528 - DNA, 2409 bp, Zea Mays
ttaacggcgatgtctcgctgccgtgccgtggagggagatgagcaggccacttcgctttgccgtggagggagatgagccgtttgtggaatcagcgagaaagtgacgggagagggcaatgcagagaggccaggccaagaaccccgaataaaggaaggtgcgacaggtggctggcactgtggcgcaagcggatgttgcgtcgtctctccgttgctctcgctcaaggaggccgcgggggcgggccaactagttttcggattccagcgtcgtttggagttgtcctgtcgtgtcttccggtaaacaacaagctagcgagctgaaaagagtcggatgatgcttgcagcatgaaggccagaacagggctcaaggagcttaggatcctaaaaaatgaggataccaaggcaaaaattatcagtgggaactctgtgcacacgaccactaccactacgacaattaccaccaccgcattagtaccattggcccctaaatgcagaagccttgctgatgatgaaggctatctccttccggagttcaatgacatggttctcagagaatttggccaagatatagatagcattccatccacacctgcagcgagagtaagggaagatgtatcgaatgaccatgaagtccacaaacttagagatttggtgagatcactgcaagaaagggagaagactctggagctacagcttctggagtgttacggtttgcaggagcaagatgctgcggtgagggagcttgagaatcagctgaagattaacaacgttgaatcaaagttgtacttgctgaagattgaatctttacagactgaaaaccagaggctgcaaacacagctctcagagaactcaaaaatattctctgagcttgaggcgacaagaacaaaatgcaagtttctgaagaagaagtttatatcggatgcagaacaggcaaaggagcaaatcatttctcttcagaaaatggtcgactcattgcagaacaaacagactgatgaggagaaaaaatttattgagtttgaaaataaactgaagagactagaggagctggaaaaagaggcaacagagctaagagcggcaaattcaaggctgcagcaggagaatgcacatcttattaggcgactggaggttacacgcctaccccctgtacccaagcccaaaactagtatggaggtaaaagcattggaggaggctgatcggttgaagcaagaaactgataggttggctaaagaggttgaacaacttcagagtggcaggtttgcagatgtcgaagaattggtatatctgaaatggataaatgcctgcctacggtatgagctgagaaacaaggatgccccatcagggaagactgttgcacgagatcttagcaagaccctgagccccaagtctgaattgaaggccaaacagctgataatggaatatgccaatgtgggtgcggaggacagtcacttggggcatgtcgaattcggttcagagtgctcttcctcacgggcttcgtcaggtgaaccggatgatgtgtcaattgatattgcttccatgacaaagcatactaataaaaaccccaaaaagaagaagttcttctctaagcttcggaaactggtgctgggaaaagggaaagagaaccgtgaaatttctactctggagaggagagtgtctatttcaagttgttccttcgatgacttcactggaagggattcacatgatagctattcttcgttcatggcagaaccaaacatgcctgatagtcgacggcatggtgatcatggctttggtacacattcttctttggacagcgcaaaatctagtcctcttggcacagaaattgtaggtgaaagaagtgaccattctgtggtgaagagtgtatcttctagagaggaaaaggtaaatgcattcggtcccagcattggccttgatagtagcaaggccatacctgaggatgttgagatccataaatttgctgatgcgctgatcacatcaaggtcaggttccatgtcatcaagaagatcggcatccttccgacactgatataggagtcatctgctactgacccctctgcctggatgtatatttctgccagttcttgatggggggagttataggagatgttactggaatataagttgtcaatactttatttttttgtaccattgcgtatagggtgtagtttacttacctttaataccaactcctactacctgggctcgtcatgtgtaccataaaatggcacatttcaatggcaaacacaagacaattgtaacaccctaaatccatcaattaaggtaacctagattatattattaatttctcgtagaaaggaaaatatttatgtttacaaataataaaatggtgttatgaataaatcgatcaatctcttagaagataaaattttacaagtgtttgatgcactcatgccaaa

SEQ ID NO: 62529 - DNA, 1826 bp, Zea Mays
ttaacggcgatgtctcgctgccgtgccgtggagggagatgagcaggccacttcgctttgccgtggagggagatgagccgtttgtggaatcagcgagaaagtgacgggagagggcaatgcagagaggccaggccaagaaccccgaataaaggaaggtgcgacaggtggctggcactgtggcgcaagcggatgttgcgtcgtctctccgttgctctcgctcaaggaggccgcgggggcgggccaactagttttcggattccagcgtcgtttggagttgtcctgtcgtgtcttccggtaaacaacaagctagcgagctgaaaagacagcgtcagatgcccaaacctggtgattgcagcagcagcggcgttggtgggccgagcgccggggacgccaaggacttgccccaacttttcctcagagtgggcgcggccgtcacgctctccgtagccggtctgctcttctcgcggcgccagcggccgccccggcagctcctgccgccgccgccgcgtcctccctcggagtcggatgatgcttgcagcatgaaggccagaacagggctcaaggagcttaggatcctaaaaaatgtaaaagcattggaggaggctgatcggttgaagcaagaaactgataggttggctaaagaggttgaacaacttcagagtggcaggtttgcagatgtcgaagaattggtatatctgaaatggataaatgcctgcctacggtatgagctgagaaacaaggatgccccatcagggaagactgttgcacgagatcttagcaagaccctgagccccaagtctgaattgaaggccaaacagctgataatggaatatgccaatgtgggtgcggaggacagtcacttggggcatgtcgaattcggttcagagtgctcttcctcacgggcttcgtcaggtgaaccggatgatgtgtcaattgatattgcttccatgacaaagcatactaataaaaaccccaaaaagaagaagttcttctctaagcttcggaaactggtgctgggaaaagggaaagagaaccgtgaaatttctactctggagaggagagtgtctatttcaagttgttccttcgatgacttcactggaagggattcacatgatagctattcttcgttcatggcagaaccaaacatgcctgatagtcgacggcatggtgatcatggctttggtacacattcttctttggacagcgcaaaatctagtcctcttggcacagaaattgtaggtgaaagaagtgaccattctgtggtgaagagtgtatcttctagagaggaaaaggtaaatgcattcggtcccagcattggccttgatagtagcaaggccatacctgaggatgttgagatccataaatttgctgatgcgctgatcacatcaaggtcaggttccatgtcatcaagaagatcggcatccttccgacactgatataggagtcatctgctactgacccctctgcctggatgtatatttctgccagttcttgatggggggagttataggagatgttactggaatataagttgtcaatactttatttttttgtaccattgcgtatagggtgtagtttacttacctttaataccaactcctactacctgggctcgtcatgtgtaccataaaatggcacatttcaatggcaaacacaagacaattgtaacaccctaaatccatcaattaaggtaacctagattatattattaatttctcgtagaaaggaaaatatttatgtttacaaataataaaatggtgttatgaataaatcgatcaatctcttagaagataaaattttacaagtgtttgatgcactcatgccaaa

SEQ ID NO: 62530 - DNA, 1617 bp, Zea Mays
tactggcgcgtggcacctttcatataggaggagtcagtgaagggcaaggtttctctggtgagaatggaaccatcacaggaaaggattgcccaaaaggtctttatggaacattttgcaaggaatgtccctcaggaacatacaagaatattactggatcatctaagtccatgtgctcaccatgccctccaaatgagctacctcgccgtgctgtatacataagcgtccgaggaggtgttgctgaacccccatgcccatacaaatgcgtgtctgatagatatagcatgcctcactgttttactgcccttgaagagctgatatacacgtttggtggaccttggttgtttggtctgcttctgtctggccttcttgttttattagctcttgttttgagtattgctcggatgaagtttgttggtactgatgagttgcctggaccagcaccaactcaacagagctcccaaattgatcactcttttcccttccttgaatcactgaatgaggtattggaaacaaacagggcagaagaatctcactgtcatgtgcacaggatgtatttcatgggcccaaacaccttcagtgaaccttggcatctcccacacaccccgccagagcagatttcagagattgtgtacgaagatgcatttaacaaatttgttgatgagatcaatgctcttgcagcctatcagtggtgggaaggttcagtttttagcatcctatgtatactttcatttcccctggcatggtcgtggcaacagtggcgcaggagaaagaaattacaaaaactacgtgaatttgttcgttctgaatatgatcattcatgtttacggtcctgccgttcgcgtgcactttacgaggggctaaaggttgtggcttttgtatgtggatttctgcattacaagtcatcaagcaaaaaacatccaagcatgcagccgtggagttttggtggggaggaaaccagctggtcgctattccctataggacttgttctatgcaagtgcattcaagcaaggcttgttgattggcatgtatctatcttggagatccaggatcgtgcagtttatagcaatgacccaacaatattttggcagtgaaagcatttcgatttacaggagttctcatgaggagagcttaatgcaactcaagtttttgtgggagttgataaaaggaaggctatggagttagtctgttctttgtccgcccagtcaggggaagcatgtacaaagtagatgctggtaattgcctgcctatatagacttaatgacttacagtgcatggtcaaccttttgtccagtcactcacccagctttgttttccttgtacataggaaacgggtttaattagttgaccgattcgttgtaggatttaggatttagacaccatagaattatagattacccaaggtaatctcaaagagatggtggaaaacatatatacttcttttgtttaaagctttgtcttttgcattgatgttgagctgggaaacgggtgaggcatcaaatagagcttttttcccctctgttaagattaagacaaatgttaacgtgctgatgttttattcaagatctggttgccatatgttcccgtgatgatccctgcttctctattgttatagttctt

SEQ ID NO: 62531 - DNA, 3016 bp, Zea Mays
gttggagcagtactggcgcgtggcacctttcatataggaggagtcagtgaagggcaaggtttctctggtgagaatggaaccatcacaggaaaggattgcccaaaaggtctttatggaacattttgcaaggaatgtccctcaggaacatacaagaatattactggatcatctaagtccatgtgctcaccatgccctccaaatgagctacctcgccgtgctgtatacataagcgtccgaggaggtgttgctgaacccccatgcccatacaaatgcgtgtctgatagatatagcatgcctcactgttttactgcccttgaagagctgatatacacgtttggtggaccttggttgtttggtctgcttctgtctggccttcttgttttattagctcttgttttgagtattgctcggatgaagtttgttggtactgatgagttgcctggaccagcaccaactcaacagagctcccaaattgatcactcttttcccttccttgaatcactgaatgaggtattggaaacaaacagggcagaagaatctcactgtcatgtgcacaggatgtatttcatgggcccaaacaccttcagtgaaccttggcatctcccacacaccccgccagagcagatttcagagattgtgtacgaagatgcatttaacaaatttgttgatgagatcaatgctcttgcagcctatcagtggtgggaaggttcagtttttagcatcctatgtatactttcatttcccctggcatggtcgtggcaacagtggcgcaggagaaagaaattacaaaaactacgtgaatttgttcgttctgaatatgatcattcatgtttacggtcctgccgttcgcgtgcactttacgaggggctaaaggtagctgctactccagatttaatgctgggttatttagatttcttccttggtggggatgagaaaaggactgatcttcctcctcggcttcatcaaaggtttccaatgtccctgatctttggaggtgatggaagctatatggctccattttcacttcatagcgacagagtggtcacaactcttataagtcaggctgtgccatcatctatatggcatcgtcttgtagctggattgaatgcccagttgcgtttggttcgccgtggaaatctaaacacatcacttctccctgtgctcaaatggctagaaagtcatgcaaatcctgaattgaacacgtaccgtgtgcgtgttgaccttgcatggtttcaaactacagcattaggttaccttcagtttggtcttgtccttcatgctgtcgggggagtggtggctgctgaactccaggatggctgtacaagtaaaaccgatcagcattcagtgtgagtcatttcatacttacctgggcatttgtattctgcccctggtcgtcatatctccctaatcacttccttaacagaaaccagaatacatgcactgactctcaaatgggccactcaaggaccaatgatgttctgcgtaaaaggataactggcaccattctcaatgttgacaacttaaggatgcttggtggcaggagaggtttcttttaccttctctctcttatcttgcacaatacaaaaccagttggacatcaggaccttgtcggcttagtcatctcaatactgcttcttgcagatttcagcttagtcttgcttactttcctccaactatattcatattctatggtcgatgttctgttagtcttgttcattcttcctcttgggatactagcaccatttccagctgggataaatgctctttttagtcatgaacagcggcggtcagctggtcttgctcgtgtctatgccttgtggaatattacatcactggttaatgttgtaagtactcctccatcattgtctgtacctggattttgctctaacaagttcattaggttgccaagttcagattcatagggagttgtaatcattgctgtttgcttgagcatttgttggggattcaatattgccattaagagttcaagcatgggcatcgatagaggctgaatgctggaaccttattcctacccccagatttgtatcatgtaatactcattgcagcgctgtttttctcagtggtttgtcaggttgaaatgtgatctggctggttttgttttgaacttttcctgattttccatttacatacttgcacatgctgtacattttttcacatgaagggtcattactgactttcttcactgtagatacaggaatcatgttttatggtttttacgtacaattgctctatcactcgcaggttgtggcttttgtatgtggatttctgcattacaagtcatcaagcaaaaaacatccaagcatgcagccgtggagttttggtggggaggaaaccagctggtcgctattccctataggacttgttctatgcaagtgcattcaagcaaggcttgttgattggcatgtatctatcttggagatccaggatcgtgcagtttatagcaatgacccaacaatattttggcagtgaaagcatttcgatttacaggagttctcatgaggagagcttaatgcaactcaagtttttgtgggagttgataaaaggaaggctatggagttagtctgttctttgtccgcccagtcaggggaagcatgtacaaagtagatgctggtaattgcctgcctatatagacttaatgacttacagtgcatggtcaaccttttgtccagtcactcacccagctttgttttccttgtacataggaaacgggtttaattagttgaccgattcgttgtaggatttaggatttagacaccatagaattatagattacccaaggtaatctcaaagagatggtggaaaacatatatacttcttttgtttaaagctttgtcttttgcattgatgttgagctgggaaacgggtgaggcatcaaatagagcttttttcccctctgttaagattaagacaaatgttaacgtgctgatgttttattcaagatctggttgccatatgttcccgtgatgatccctgcttctctattgttatagttctt

SEQ ID NO: 62532 - DNA, 3189 bp, Zea Mays
gtaaacccatccggtccaggagatttatccgagggcagataatttatagcattttttttctcgaacatctaagtttgtagcccctcctaacacccacaggtccctttcctcctcggttctcttgatggcttcattaaggcagggagaaaggccgtcaaaaacacaggcgtttcgtctcttctatttgcaggctgccgaggtggcattggaagaggaaaaatgttaagcagtgggtttagtggtgggggtgggcatggtggtaaaggcggtgatggcatttataatggtggtcatgtagagggtggatctgcgtatggtcatgctgatttaccatgtgaacttggcagtggcagcggtaatgtcagtggatcttcaactgctggtggtggtataatagtgatgggttctttggaacaatctctgccgaacctctccctttctggctcgattgaggcaaatggtggtaattttactggtttgatgtctcatgccacaattggaggacctggtggcggttctggtggtacaattcttctttttgtgcggacattactcttgaagaaggactctgtactttctagtgttgggggagttggtggcaatggcagtggtggaggtggagggggtcggattcacttccactggtttgatattcccactggagatgattatattccttttgcaaccattaaaggaacaatacttgcaagaggaggagtcagtgaagggcaaggtttctctggtgagaatggaaccatcacaggaaaggattgcccaaaaggtctttatggaacattttgcaaggaatgtccctcaggaacatacaagaatattactggatcatctaagtccatgtgctcaccatgccctccaaatgagctacctcgccgtgctgtatacataagcgtccgaggaggtgttgctgaacccccatgcccatacaaatgcgtgtctgatagatatagcatgcctcactgttttactgcccttgaagagctgatatacacgtttggtggaccttggttgtttggtctgcttctgtctggccttcttgttttattagctcttgttttgagtattgctcggatgaagtttgttggtactgatgagttgcctggaccagcaccaactcaacagagctcccaaattgatcactcttttcccttccttgaatcactgaatgaggtattggaaacaaacagggcagaagaatctcactgtcatgtgcacaggatgtatttcatgggcccaaacaccttcagtgaaccttggcatctcccacacaccccgccagagcagatttcagagattgtgtacgaagatgcatttaacaaatttgttgatgagatcaatgctcttgcagcctatcagtggtgggaaggttcagtttttagcatcctatgtatactttcatttcccctggcatggtcgtggcaacagtggcgcaggagaaagaaattacaaaaactacgtgaatttgttcgttctgaatatgatcattcatgtttacggtcctgccgttcgcgtgcactttacgaggggctaaaggtagctgctactccagatttaatgctgggttatttagatttcttccttggtggggatgagaaaaggactgatcttcctcctcggcttcatcaaaggtttccaatgtccctgatctttggaggtgatggaagctatatggctccattttcacttcatagcgacagagtggtcacaactcttataagtcaggctgtgccatcatctatatggcatcgtcttgtagctggattgaatgcccagttgcgtttggttcgccgtggaaatctaaacacatcacttctccctgtgctcaaatggctagaaagtcatgcaaatcctgaattgaacacgtaccgtgtgcgtgttgaccttgcatggtttcaaactacagcattaggttaccttcagtttggtcttgtccttcatgctgtcgggggagtggtggctgctgaactccaggatggctgtacaagtaaaaccgatcagcattcagtaatacatgcactgactctcaaatgggccactcaaggaccaatgatgttctgcgtaaaaggataactggcaccattctcaatgttgacaacttaaggatgcttggtggcaggagaggtttcttttaccttctctctcttatcttgcacaatacaaaaccagttggacatcaggaccttgtcggcttagtcatctcaatactgcttcttgcagatttcagcttagtcttgcttactttcctccaactatattcatattctatggtcgatgttctgttagtcttgttcattcttcctcttgggatactagcaccatttccagctgggataaatgctctttttagtcatgaacagcggcggtcagctggtcttgctcgtgtctatgccttgtggaatattacatcactggttaatgttgttgtggcttttgtatgtggatttctgcattacaagtcatcaagcaaaaaacatccaagcatgcagccgtggagttttggtggggaggaaaccagctggtcgctattccctataggacttgttctatgcaagtgcattcaagcaaggcttgttgattggcatgtatctatcttggagatccaggatcgtgcagtttatagcaatgacccaacaatattttggcagtgaaagcatttcgatttacaggagttctcatgaggagagcttaatgcaactcaagtttttgtgggagttgataaaaggaaggctatggagttagtctgttctttgtccgcccagtcaggggaagcatgtacaaagtagatgctggtaattgcctgcctatatagacttaatgacttacagtgcatggtcaaccttttgtccagtcactcacccagctttgttttccttgtacataggaaacgggtttaattagttgaccgattcgttgtaggatttaggatttagacaccatagaattatagattacccaaggtaatctcaaagagatggtggaaaacatatatacttcttttgtttaaagctttgtcttttgcattgatgttgagctgggaaacgggtgaggcatcaaatagagcttttttcccctctgttaagattaagacaaatgttaacgtgctgatgttttattcaagatctggttgccatatgttcccgtgatgatccctgcttctctattgttatagttctt

SEQ ID NO: 62533 - DNA, 3614 bp, Zea Mays
gtaaacccatccggtccaggagatttatccgagggcagataatttatagcattttttttctcgaacatctaagtttgtagcccctcctaacacccacaggtccctttcctcctcggttctcttgatggcttcattaaggcagggagaaaggccgtcaaaaacacaggcgtttcgtctcttctatttgcaggctgccgaggtggcattggaagaggaaaaatgttaagcagtgggtttagtggtgggggtgggcatggtggtaaaggcggtgatggcatttataatggtggtcatgtagagggtggatctgcgtatggtcatgctgatttaccatgtgaacttggcagtggcagcggtaatgtcagtggatcttcaactgctggtggtggtataatagtgatgggttctttggaacaatctctgccgaacctctccctttctggctcgattgaggcaaatggtggtaattttactggtttgatgtctcatgccacaattggaggacctggtggcggttctggtggtacaattcttctttttgtgcggacattactcttgaagaaggactctgtactttctagtgttgggggagttggtggcaatggcagtggtggaggtggagggggtcggattcacttccactggtttgatattcccactggagatgattatattccttttgcaaccattaaaggaacaatacttgcaagaggaggagtcagtgaagggcaaggtttctctggtgagaatggaaccatcacaggaaaggattgcccaaaaggtctttatggaacattttgcaaggaatgtccctcaggaacatacaagaatattactggatcatctaagtccatgtgctcaccatgccctccaaatgagctacctcgccgtgctgtatacataagcgtccgaggaggtgttgctgaacccccatgcccatacaaatgcgtgtctgatagatatagcatgcctcactgttttactgcccttgaagagctgatatacacgtttggtggaccttggttgtttggtctgcttctgtctggccttcttgttttattagctcttgttttgagtattgctcggatgaagtttgttggtactgatgagttgcctggaccagcaccaactcaacagagctcccaaattgatcactcttttcccttccttgaatcactgaatgaggtattggaaacaaacagggcagaagaatctcactgtcatgtgcacaggatgtatttcatgggcccaaacaccttcagtgaaccttggcatctcccacacaccccgccagagcagatttcagagattgtgtacgaagatgcatttaacaaatttgttgatgagatcaatgctcttgcagcctatcagtggtgggaaggttcagtttttagcatcctatgtatactttcatttcccctggcatggtcgtggcaacagtggcgcaggagaaagaaattacaaaaactacgtgaatttgttcgttctgaatatgatcattcatgtttacggtcctgccgttcgcgtgcactttacgaggggctaaaggtagctgctactccagatttaatgctgggttatttagatttcttccttggtggggatgagaaaaggactgatcttcctcctcggcttcatcaaaggtttccaatgtccctgatctttggaggtgatggaagctatatggctccattttcacttcatagcgacagagtggtcacaactcttataagtcaggctgtgccatcatctatatggcatcgtcttgtagctggattgaatgcccagttgcgtttggttcgccgtggaaatctaaacacatcacttctccctgtgctcaaatggctagaaagtcatgcaaatcctgaattgaacacgtaccgtgtgcgtgttgaccttgcatggtttcaaactacagcattaggttaccttcagtttggtcttgtccttcatgctgtcgggggagtggtggctgctgaactccaggatggctgtacaagtaaaaccgatcagcattcagtaaaccagaatacatgcactgactctcaaatgggccactcaaggaccaatgatgttctgcgtaaaaggataactggcaccattctcaatgttgacaacttaaggatgcttggtggcaggagaggtttcttttaccttctctctcttatcttgcacaatacaaaaccagttggacatcaggaccttgtcggcttagtcatctcaatactgcttcttgcagatttcagcttagtcttgcttactttcctccaactatattcatattctatggtcgatgttctgttagtcttgttcattcttcctcttgggatactagcaccatttccagctgggataaatgctctttttagtcatgaacagcggcggtcagctggtcttgctcgtgtctatgccttgtggaatattacatcactggttaatgttgtaagtactcctccatcattgtctgtacctggattttgctctaacaagttcattaggttgccaagttcagattcatagggagttgtaatcattgctgtttgcttgagcatttgttggggattcaatattgccattaagagttcaagcatgggcatcgatagaggctgaatgctggaaccttattcctacccccagatttgtatcatgtaatactcattgcagcgctgtttttctcagtggtttgtcaggttgaaatgtgatctggctggttttgttttgaacttttcctgattttccatttacatacttgcacatgctgtacattttttcacatgaagggtcattactgactttcttcactgtagatacaggaatcatgttttatggtttttacgtacaattgctctatcactcgcaggttgtggcttttgtatgtggatttctgcattacaagtcatcaagcaaaaaacatccaagcatgcagccgtggagttttggtggggaggaaaccagctggtcgctattccctataggacttgttctatgcaagtgcattcaagcaaggcttgttgattggcatgtatctatcttggagatccaggatcgtgcagtttatagcaatgacccaacaatattttggcagtgaaagcatttcgatttacaggagttctcatgaggagagcttaatgcaactcaagtttttgtgggagttgataaaaggaaggctatggagttagtctgttctttgtccgcccagtcaggggaagcatgtacaaagtagatgctggtaattgcctgcctatatagacttaatgacttacagtgcatggtcaaccttttgtccagtcactcacccagctttgttttccttgtacataggaaacgggtttaattagttgaccgattcgttgtaggatttaggatttagacaccatagaattatagattacccaaggtaatctcaaagagatggtggaaaacatatatacttcttttgtttaaagctttgtcttttgcattgatgttgagctgggaaacgggtgaggcatcaaatagagcttttttcccctctgttaagattaagacaaatgttaacgtgctgatgttttattcaagatctggttgccatatgttcccgtgatgatccctgcttctctattgttatagttctt

SEQ ID NO: 62534 - DNA, 3385 bp, Zea Mays
aaaaaaagctgtgaacaagactgataggtctaaaatctttgacctgatcagctccatctttctttggaatttaagtgatgaaagcagaatttagcttgtgaaaattatcaaatcttccattccaatccgccatcaccgcagccataagctcatctttaataatggaccaacaagtcttatagaatctgccagtaaacccatccggtccaggagatttatccgagggcagataatttatagcattttttttctcgaacatctaagtttgtagcccctcctaacacccacaggtccctttcctcctcggttctcttgatggcttcattaaggcagggagaaaggccgtcaaaaacacaggcgtttcgtctcttctatttgcaggctgccgaggtggcattggaagaggaaaaatgttaagcagtgggtttagtggtgggggtgggcatggtggtaaaggcggtgatggcatttataatggtggtcatgtagagggtggatctgcgtatggtcatgctgatttaccatgtgaacttggcagtggcagcggtaatgtcagtggatcttcaactgctggtggtggtataatagtgatgggttctttggaacaatctctgccgaacctctccctttctggctcgattgaggcaaatggtggtaattttactggtttgatgtctcatgccacaattggaggacctggtggcggttctggtggtacaattcttctttttgtgcggacattactcttgaagaaggactctgtactttctagtgttgggggagttggtggcaatggcagtggtggaggtggagggggtcggattcacttccactggtttgatattcccactggagatgattatattccttttgcaaccattaaaggaacaatacttgcaagaggaggagtcagtgaagggcaaggtttctctggtgagaatggaaccatcacaggaaaggattgcccaaaaggtctttatggaacattttgcaaggaatgtccctcaggaacatacaagaatattactggatcatctaagtccatgtgctcaccatgccctccaaatgagctacctcgccgtgctgtatacataagcgtccgaggaggtgttgctgaacccccatgcccatacaaatgcgtgtctgatagatatagcatgcctcactgttttactgcccttgaagagctgatatacacgtttggtggaccttggttgtttggtctgcttctgtctggccttcttgttttattagctcttgttttgagtattgctcggatgaagtttgttggtactgatgagttgcctggaccagcaccaactcaacagagctcccaaattgatcactcttttcccttccttgaatcactgaatgaggtattggaaacaaacagggcagaagaatctcactgtcatgtgcacaggatgtatttcatgggcccaaacaccttcagtgaaccttggcatctcccacacaccccgccagagcagatttcagagattgtgtacgaagatgcatttaacaaatttgttgatgagatcaatgctcttgcagcctatcagtggtgggaaggttcagtttttagcatcctatgtatactttcatttcccctggcatggtcgtggcaacagtggcgcaggagaaagaaattacaaaaactacgtgaatttgttcgttctgaatatgatcattcatgtttacggtcctgccgttcgcgtgcactttacgaggggctaaaggtagctgctactccagatttaatgctgggttatttagatttcttccttggtggggatgagaaaaggactgatcttcctcctcggcttcatcaaaggtttccaatgtccctgatctttggaggtgatggaagctatatggctccattttcacttcatagcgacagagtggtcacaactcttataagtcaggctgtgccatcatctatatggcatcgtcttgtagctggattgaatgcccagttgcgtttggttcgccgtggaaatctaaacacatcacttctccctgtgctcaaatggctagaaagtcatgcaaatcctgaattgaacacgtaccgtgtgcgtgttgaccttgcatggtttcaaactacagcattaggttaccttcagtttggtcttgtccttcatgctgtcgggggagtggtggctgctgaactccaggatggctgtacaagtaaaaccgatcagcattcaaaaccagaatacatgcactgactctcaaatgggccactcaaggaccaatgatgttctgcgtaaaaggataactggcaccattctcaatgttgacaacttaaggatgcttggtggcaggagaggtttcttttaccttctctctcttatcttgcacaatacaaaaccagttggacatcaggaccttgtcggcttagtcatctcaatactgcttcttgcagatttcagcttagtcttgcttactttcctccaactatattcatattctatggtcgatgttctgttagtcttgttcattcttcctcttgggatactagcaccatttccagctgggataaatgctctttttagtcatgaacagcggcggtcagctggtcttgctcgtgtctatgccttgtggaatattacatcactggttaatgttgttgtggcttttgtatgtggatttctgcattacaagtcatcaagcaaaaaacatccaagcatgcagccgtggagttttggtggggaggaaaccagctggtcgctattccctataggacttgttctatgcaagtgcattcaagcaaggcttgttgattggcatgtatctatcttggagatccaggatcgtgcagtttatagcaatgacccaacaatattttggcagtgaaagcatttcgatttacaggagttctcatgaggagagcttaatgcaactcaagtttttgtgggagttgataaaaggaaggctatggagttagtctgttctttgtccgcccagtcaggggaagcatgtacaaagtagatgctggtaattgcctgcctatatagacttaatgacttacagtgcatggtcaaccttttgtccagtcactcacccagctttgttttccttgtacataggaaacgggtttaattagttgaccgattcgttgtaggatttaggatttagacaccatagaattatagattacccaaggtaatctcaaagagatggtggaaaacatatatacttcttttgtttaaagctttgtcttttgcattgatgttgagctgggaaacgggtgaggcatcaaatagagcttttttcccctctgttaagattaagacaaatgttaacgtgctgatgttttattcaagatctggttgccatatgttcccgtgatgatccctgcttctctattgttatagttctt

SEQ ID NO: 62535 - DNA, 3647 bp, Zea Mays
cgataatgttgtagcatcaaataaatcttataaaatgttccaaatgtttagtgtaaaaaaagctgtgaacaagactgataggtctaaaatctttgacctgatcagctccatctttctttggaatttaagtgatgaaagcagaatttagcttgtgaaaattatcaaatcttccattccaatccgccatcaccgcagccataagctcatctttaataatggaccaacaagtcttatagaatctgccagtaaacccatccggtccaggagatttatccgagggcagataatttatagcattttttttctcgaacatctaagtttgtagcccctcctaacacccacaggtccctttcctcctcggttctcttgatggcttcattaaggcagggagaaaggccgtcaaaaacacaggcgtttcgtctcttctatttgcaggctgccgaggtggcattggaagaggaaaaatgttaagcagtgggtttagtggtgggggtgggcatggtggtaaaggcggtgatggcatttataatggtggtcatgtagagggtggatctgcgtatggtcatgctgatttaccatgtgaacttggcagtggcagcggtaatgtcagtggatcttcaactgctggtggtggtataatagtgatgggttctttggaacaatctctgccgaacctctccctttctggctcgattgaggcaaatggtggtaattttactggtttgatgtctcatgccacaattggaggacctggtggcggttctggtggtacaattcttctttttgtgcggacattactcttgaagaaggactctgtactttctagtgttgggggagttggtggcaatggcagtggtggaggtggagggggtcggattcacttccactggtttgatattcccactggagatgattatattccttttgcaaccattaaaggaacaatacttgcaagaggaggagtcagtgaagggcaaggtttctctggtgagaatggaaccatcacaggaaaggattgcccaaaaggtctttatggaacattttgcaaggaatgtccctcaggaacatacaagaatattactggatcatctaagtccatgtgctcaccatgccctccaaatgagctacctcgccgtgctgtatacataagcgtccgaggaggtgttgctgaacccccatgcccatacaaatgcgtgtctgatagatatagcatgcctcactgttttactgcccttgaagagctgatatacacgtttggtggaccttggttgtttggtctgcttctgtctggccttcttgttttattagctcttgttttgagtattgctcggatgaagtttgttggtactgatgagttgcctggaccagcaccaactcaacagagctcccaaattgatcactcttttcccttccttgaatcactgaatgaggtattggaaacaaacagggcagaagaatctcactgtcatgtgcacaggatgtatttcatgggcccaaacaccttcagtgaaccttggcatctcccacacaccccgccagagcagatttcagagattgtgtacgaagatgcatttaacaaatttgttgatgagatcaatgctcttgcagcctatcagtggtgggaaggttcagtttttagcatcctatgtatactttcatttcccctggcatggtcgtggcaacagtggcgcaggagaaagaaattacaaaaactacgtgaatttgttcgttctgaatatgatcattcatgtttacggtcctgccgttcgcgtgcactttacgaggggctaaaggtagctgctactccagatttaatgctgggttatttagatttcttccttggtggggatgagaaaaggactgatcttcctcctcggcttcatcaaaggtttccaatgtccctgatctttggaggtgatggaagctatatggctccattttcacttcatagcgacagagtggtcacaactcttataagtcaggctgtgccatcatctatatggcatcgtcttgtagctggattgaatgcccagttgcgtttggttcgccgtggaaatctaaacacatcacttctccctgtgctcaaatggctagaaagtcatgcaaatcctgaattgaacacgtaccgtgtgcgtgttgaccttgcatggtttcaaactacagcattaggttaccttcagtttggtcttgtccttcatgctgtcgggggagtggtggctgctgaactccaggatggctgtacaagtaaaaccgatcagcattcagtaaaccagaatacatgcactgactctcaaatgggccactcaaggaccaatgatgttctgcgtaaaaggataactggcaccattctcaatgttgacaacttaaggatgcttggtggcaggagaggtttcttttaccttctctctcttatcttgcacaatacaaaaccagttggacatcaggaccttgtcggcttagtcatctcaatactgcttcttgcagatttcagcttagtcttgcttactttcctccaactatattcatattctatggtcgatgttctgttagtcttgttcattcttcctcttgggatactagcaccatttccagctgggataaatgctctttttagtcatgaacagcggcggtcagctggtcttgctcgtgtctatgccttgtggaatattacatcactggttaatgttgtaagtactcctccatcattgtctgtacctggattttgctctaacaagttcattaggttgccaagttcagattcatagggagttgtaatcattgctgtttgcttgagcatttgttggggattcaatattgccattaagagttcaagcatgggcatcgatagaggctgaatgctggaaccttattcctacccccagatttgtatcatgttgtggcttttgtatgtggatttctgcattacaagtcatcaagcaaaaaacatccaagcatgcagccgtggagttttggtggggaggaaaccagctggtcgctattccctataggacttgttctatgcaagtgcattcaagcaaggcttgttgattggcatgtatctatcttggagatccaggatcgtgcagtttatagcaatgacccaacaatattttggcagtgaaagcatttcgatttacaggagttctcatgaggagagcttaatgcaactcaagtttttgtgggagttgataaaaggaaggctatggagttagtctgttctttgtccgcccagtcaggggaagcatgtacaaagtagatgctggtaattgcctgcctatatagacttaatgacttacagtgcatggtcaaccttttgtccagtcactcacccagctttgttttccttgtacataggaaacgggtttaattagttgaccgattcgttgtaggatttaggatttagacaccatagaattatagattacccaaggtaatctcaaagagatggtggaaaacatatatacttcttttgtttaaagctttgtcttttgcattgatgttgagctgggaaacgggtgaggcatcaaatagagcttttttcccctctgttaagattaagacaaatgttaacgtgctgatgttttattcaagatctggttgccatatgttcccgtgatgatccctgcttctctattgttatagttctt

SEQ ID NO: 62536 - DNA, 4905 bp, Zea Mays
agcggaggtcgaaccatcaccaaacccgagccccgaccgcccacctcgccgtcgccgccgcaggcgatcagccgccgccgcactaatccctgccttgtccttatcataaaaccgcggcgctggagctctgatgcttcccaccccatggtcttccacatttccctcgcccgccactggcttcctccttctccttgccctcctccccgtcgcatcggggacctcagtccctaccctaggaggtttcgatcgtggagaggcggccggcgcggacgcatattcgatccttacgtttcacgactacacgccgcctccgccccccgttctgccgccgccaccggcggccccggcggcgacctgcgcgggggacctccacggcgtgggagaccttgacacccagtgcgtggtccatgagtcggtgaggctgggtggtggggtgttcatcagtggcaacggcagcctcctaatccttgatggcgtcgcggttacctgcgagcggcctgggtgcgtcgtctctgccaacctctccggcgatctcctcctcgggaacaggtcccgcgtcgtggccgggtgggtttccctcgcggcggccaacatcacactcggcgaggacgctgttattgacaccaccgcgcttggcggtgacccgccggaccagaccagtggtgtacccactgggacgtatggggatggcggtggacatggcggccgtggcgccagctgcttcgttaagaaggggcaagcacaagaggactcatggggtggtgattcctacgcttggtctgcactgaagaccccaaataactatggaagcaaagggggatccactaccgtcgagaaggactatggtggtgggggtggcggtgtcgtgtggttgttcgctgaagagattgtgatgaatggaacagttcttgctgatggtggagacggtggcaccaagggtgggggtggctctggggggagcatctatctgaaggcttcaacaatgcaaggaggtggcaaaataagtgcttgtggaggcaatggtttagctggtggaggtggaggacgtgtttccatcgatgttttcagtaggcatgacgacacacaaatttttgtccatggggggaagagttcaggatgcttggacaatgcgggagcagctggaacactttatgaagcagtacctaagagtattactgttagcaacaataacttgagcacacaaacggatacagtttttctagaccccccatatgagccactctggacaaatgtttttgtcagaaattgtgccaaagtttctcttcccttacggtggagccgtattcaggctcaaggacagattcttttatctggtgctactctaacttttggcctgacacattatccatattcagaatttgagctgttggctgaggaacttcttatgagtgattccacaatcaaggtctttggcgctttacgaatgtcggtaaagatgctccttatgtggaactcaagaatgactattgatggtggccgagaactaggtgtgggaacttcattactagaaggtagcaatttgatagtgctgaaggaagcatctgtcatacattcaaatgctaatctagggattcatggtcaaggagttctaaatttatctggtcaaggagatacaatagaggcacaacgccttattttatcactgttttacaacattttgggccccaaaactgaattgcgaagatgagagttgccctatggaaatctttcatccacctgaggattgcaacttgaactcttcattgccttttactttacagatatgccgtgttgaagatattgatgtttctggccttgttcaaggaactgtagttaattttaacagagcaagaagtgtcactgttcagacatctgggaccataagtgcaacaggattaggctgccgaggtggcattggaagaggaaaaatgttaagcagtgggtttagtggtgggggtgggcatggtggtaaaggcggtgatggcatttataatggtggtcatgtagagggtggatctgcgtatggtcatgctgatttaccatgtgaacttggcagtggcagcggtaatgtcagtggatcttcaactgctggtggtggtataatagtgatgggttctttggaacaatctctgccgaacctctccctttctggctcgattgaggcaaatggtggtaattttactggtttgatgtctcatgccacaattggaggacctggtggcggttctggtggtacaattcttctttttgtgcggacattactcttgaagaaggactctgtactttctagtgttgggggagttggtggcaatggcagtggtggaggtggagggggtcggattcacttccactggtttgatattcccactggagatgattatattccttttgcaaccattaaaggaacaatacttgcaagaggaggagtcagtgaagggcaaggtttctctggtgagaatggaaccatcacaggaaaggattgcccaaaaggtctttatggaacattttgcaaggaatgtccctcaggaacatacaagaatattactggatcatctaagtccatgtgctcaccatgccctccaaatgagctacctcgccgtgctgtatacataagcgtccgaggaggtgttgctgaacccccatgcccatacaaatgcgtgtctgatagatatagcatgcctcactgttttactgcccttgaagagctgatatacacgtttggtggaccttggttgtttggtctgcttctgtctggccttcttgttttattagctcttgttttgagtattgctcggatgaagtttgttggtactgatgagttgcctggaccagcaccaactcaacagagctcccaaattgatcactcttttcccttccttgaatcactgaatgaggtattggaaacaaacagggcagaagaatctcactgtcatgtgcacaggatgtatttcatgggcccaaacaccttcagtgaaccttggcatctcccacacaccccgccagagcagatttcagagattgtgtacgaagatgcatttaacaaatttgttgatgagatcaatgctcttgcagcctatcagtggtgggaaggttcagtttttagcatcctatgtatactttcatttcccctggcatggtcgtggcaacagtggcgcaggagaaagaaattacaaaaactacgtgaatttgttcgttctgaatatgatcattcatgtttacggtcctgccgttcgcgtgcactttacgaggggctaaaggtagctgctactccagatttaatgctgggttatttagatttcttccttggtggggatgagaaaaggactgatcttcctcctcggcttcatcaaaggtttccaatgtccctgatctttggaggtgatggaagctatatggctccattttcacttcatagcgacagagtggtcacaactcttataagtcaggctgtgccatcatctatatggcatcgtcttgtagctggattgaatgcccagttgcgtttggttcgccgtggaaatctaaacacatcacttctccctgtgctcaaatggctagaaagtcatgcaaatcctgaattgaacacgtaccgtgtgcgtgttgaccttgcatggtttcaaactacagcattaggttaccttcagtttggtcttgtccttcatgctgtcgggggagtggtggctgctgaactccaggatggctgtacaagtaaaaccgatcagcattcagtaaaccagaatacatgcactgactctcaaatgggccactcaaggaccaatgatgttctgcgtaaaaggataactggcaccattctcaatgttgacaacttaaggatgcttggtggcaggagaggtttcttttaccttctctctcttatcttgcacaatacaaaaccagttggacatcaggaccttgtcggcttagtcatctcaatactgcttcttgcagatttcagcttagtcttgcttactttcctccaactatattcatattctatggtcgatgttctgttagtcttgttcattcttcctcttgggatactagcaccatttccagctgggataaatgctctttttagtcatgaacagcggcggtcagctggtcttgctcgtgtctatgccttgtggaatattacatcactggttaatgttgttgtggcttttgtatgtggatttctgcattacaagtcatcaagcaaaaaacatccaagcatgcagccgtggagttttggtggggaggaaaccagctggtcgctattccctataggacttgttctatgcaagtgcattcaagcaaggcttgttgattggcatgtatctatcttggagatccaggatcgtgcagtttatagcaatgacccaacaatattttggcagtgaaagcatttcgatttacaggagttctcatgaggagagcttaatgcaactcaagtttttgtgggagttgataaaaggaaggctatggagttagtctgttctttgtccgcccagtcaggggaagcatgtacaaagtagatgctggtaattgcctgcctatatagacttaatgacttacagtgcatggtcaaccttttgtccagtcactcacccagctttgttttccttgtacataggaaacgggtttaattagttgaccgattcgttgtaggatttaggatttagacaccatagaattatagattacccaaggtaatctcaaagagatggtggaaaacatatatacttcttttgtttaaagctttgtcttttgcattgatgttgagctgggaaacgggtgaggcatcaaatagagcttttttcccctctgttaagattaagacaaatgttaacgtgctgatgttttattcaagatctggttgccatatgttcccgtgatgatccctgcttctctattgttatagttctt

SEQ ID NO: 62537 - DNA, 5061 bp, Zea Mays
agcggaggtcgaaccatcaccaaacccgagccccgaccgcccacctcgccgtcgccgccgcaggcgatcagccgccgccgcactaatccctgccttgtccttatcataaaaccgcggcgctggagctctgatgcttcccaccccatggtcttccacatttccctcgcccgccactggcttcctccttctccttgccctcctccccgtcgcatcggggacctcagtccctaccctaggaggtttcgatcgtggagaggcggccggcgcggacgcatattcgatccttacgtttcacgactacacgccgcctccgccccccgttctgccgccgccaccggcggccccggcggcgacctgcgcgggggacctccacggcgtgggagaccttgacacccagtgcgtggtccatgagtcggtgaggctgggtggtggggtgttcatcagtggcaacggcagcctcctaatccttgatggcgtcgcggttacctgcgagcggcctgggtgcgtcgtctctgccaacctctccggcgatctcctcctcgggaacaggtcccgcgtcgtggccgggtgggtttccctcgcggcggccaacatcacactcggcgaggacgctgttattgacaccaccgcgcttggcggtgacccgccggaccagaccagtggtgtacccactgggacgtatggggatggcggtggacatggcggccgtggcgccagctgcttcgttaagaaggggcaagcacaagaggactcatggggtggtgattcctacgcttggtctgcactgaagaccccaaataactatggaagcaaagggggatccactaccgtcgagaaggactatggtggtgggggtggcggtgtcgtgtggttgttcgctgaagagattgtgatgaatggaacagttcttgctgatggtggagacggtggcaccaagggtgggggtggctctggggggagcatctatctgaaggcttcaacaatgcaaggaggtggcaaaataagtgcttgtggaggcaatggtttagctggtggaggtggaggacgtgtttccatcgatgttttcagtaggcatgacgacacacaaatttttgtccatggggggaagagttcaggatgcttggacaatgcgggagcagctggaacactttatgaagcagtacctaagagtattactgttagcaacaataacttgagcacacaaacggatacagtttttctagaccccccatatgagccactctggacaaatgtttttgtcagaaattgtgccaaagtttctcttcccttacggtggagccgtattcaggctcaaggacagattcttttatctggtgctactctaacttttggcctgacacattatccatattcagaatttgagctgttggctgaggaacttcttatgagtgattccacaatcaaggtctttggcgctttacgaatgtcggtaaagatgctccttatgtggaactcaagaatgactattgatggtggccgagaactaggtgtgggaacttcattactagaaggtagcaatttgatagtgctgaaggaagcatctgtcatacattcaaatgctaatctagggattcatggtcaaggagttctaaatttatctggtcaaggagatacaatagaggcacaacgccttattttatcactgttttacaacattttggttggacctggagctgttctaaggggcccacttataaatggaagtcgtgatgagatggccccaaaactgaattgcgaagatgagagttgccctatggaaatctttcatccacctgaggattgcaacttgaactcttcattgccttttactttacagatatgccgtgttgaagatattgatgtttctggccttgttcaaggaactgtagttaattttaacagagcaagaagtgtcactgttcagacatctgggaccataagtgcaacaggattaggctgccgaggtggcattggaagaggaaaaatgttaagcagtgggtttagtggtgggggtgggcatggtggtaaaggcggtgatggcatttataatggtggtcatgtagagggtggatctgcgtatggtcatgctgatttaccatgtgaacttggcagtggcagcggtaatgtcagtggatcttcaactgctggtggtggtataatagtgatgggttctttggaacaatctctgccgaacctctccctttctggctcgattgaggcaaatggtggtaattttactggtttgatgtctcatgccacaattggaggacctggtggcggttctggtggtacaattcttctttttgtgcggacattactcttgaagaaggactctgtactttctagtgttgggggagttggtggcaatggcagtggtggaggtggagggggtcggattcacttccactggtttgatattcccactggagatgattatattccttttgcaaccattaaaggaacaatacttgcaagaggaggagtcagtgaagggcaaggtttctctggtgagaatggaaccatcacaggaaaggattgcccaaaaggtctttatggaacattttgcaaggaatgtccctcaggaacatacaagaatattactggatcatctaagtccatgtgctcaccatgccctccaaatgagctacctcgccgtgctgtatacataagcgtccgaggaggtgttgctgaacccccatgcccatacaaatgcgtgtctgatagatatagcatgcctcactgttttactgcccttgaagagctgatatacacgtttggtggaccttggttgtttggtctgcttctgtctggccttcttgttttattagctcttgttttgagtattgctcggatgaagtttgttggtactgatgagttgcctggaccagcaccaactcaacagagctcccaaattgatcactcttttcccttccttgaatcactgaatgaggtattggaaacaaacagggcagaagaatctcactgtcatgtgcacaggatgtatttcatgggcccaaacaccttcagtgaaccttggcatctcccacacaccccgccagagcagatttcagagattgtgtacgaagatgcatttaacaaatttgttgatgagatcaatgctcttgcagcctatcagtggtgggaaggttcagtttttagcatcctatgtatactttcatttcccctggcatggtcgtggcaacagtggcgcaggagaaagaaattacaaaaactacgtgaatttgttcgttctgaatatgatcattcatgtttacggtcctgccgttcgcgtgcactttacgaggggctaaaggtagctgctactccagatttaatgctgggttatttagatttcttccttggtggggatgagaaaaggactgatcttcctcctcggcttcatcaaaggtttccaatgtccctgatctttggaggtgatggaagctatatggctccattttcacttcatagcgacagagtggtcacaactcttataagtcaggctgtgccatcatctatatggcatcgtcttgtagctggattgaatgcccagttgcgtttggttcgccgtggaaatctaaacacatcacttctccctgtgctcaaatggctagaaagtcatgcaaatcctgaattgaacacgtaccgtgtgcgtgttgaccttgcatggtttcaaactacagcattaggttaccttcagtttggtcttgtccttcatgctgtcgggggagtggtggctgctgaactccaggatggctgtacaagtaaaaccgatcagcattcagtaaaccagaatacatgcactgactctcaaatgggccactcaaggaccaatgatgttctgcgtaaaaggataactggcaccattctcaatgttgacaacttaaggatgcttggtggcaggagaggtttcttttaccttctctctcttatcttgcacaatacaaaaccagttggacatcaggtgactttaccattttcacagctatagtaacatagctgcagtgtgcacataacaggattttctgcgttttgaagtcaccatggttcttttgctttcaactgcaggaccttgtcggcttagtcatctcaatactgcttcttgcagatttcagcttagtcttgcttactttcctccaactatattcatattctatggtcgatgttctgttagtcttgttcattcttcctcttgggatactagcaccatttccagctgggataaatgctctttttagtcatgaacagcggcggtcagctggtcttgctcgtgtctatgccttgtggaatattacatcactggttaatgttgttgtggcttttgtatgtggatttctgcattacaagtcatcaagcaaaaaacatccaagcatgcagccgtggagttttgggaggaaaccagctggtcgctattccctataggacttgttctatgcaagtgcattcaagcaaggcttgttgattggcatgtatctatcttggagatccaggatcgtgcagtttatagcaatgacccaacaatattttggcagtgaaagcatttcgatttacaggagttctcatgaggagagcttaatgcaactcaagtttttgtgggagttgataaaaggaaggctatggagttagtctgttctttgtccgcccagtcaggggaagcatgtacaaagtagatgctggtaattgcctgcctatatagacttaatgacttacagtgcatggtcaaccttttgtccagtcactcacccagctttgttttccttgtacataggaaacgggtttaattagttgaccgattcgttgtaggatttaggatttagacaccatagaattatagattacccaaggtaatctcaaagagatggtggaaaacatatatacttcttttgtttaaagctttgtcttttgcattgatgttgagctgggaaacgggtgaggcatcaaatagagcttttttcccctctgttaagattaagacaaatgttaacgtgctgatgttttattcaagatctggttgccatatgttcccgtgatgatccctgcttctctattgttatagttctt

SEQ ID NO: 62538 - DNA, 4898 bp, Zea Mays
gcggagcggaggtcgaaccatcaccaaacccgagccccgaccgcccacctcgccgtcgccgccgcaggcgatcagccgccgccgcactaatccctgccttgtccttatcataaaaccgcggcgctggagctctgatgcttcccaccccatggtcttccacatttccctcgcccgccactggcttcctccttctccttgccctcctccccgtcgcatcggggacctcagtccctaccctaggaggtttcgatcgtggagaggcggccggcgcggacgcatattcgatccttacgtttcacgactacacgccgcctccgccccccgttctgccgccgccaccggcggccccggcggcgacctgcgcgggggacctccacggcgtgggagaccttgacacccagtgcgtggtccatgagtcggtgaggctgggtggtggggtgttcatcagtggcaacggcagcctcctaatccttgatggcgtcgcggttacctgcgagcggcctgggtgcgtcgtctctgccaacctctccggcgatctcctcctcgggaacaggtcccgcgtcgtggccgggtgggtttccctcgcggcggccaacatcacactcggcgaggacgctgttattgacaccaccgcgcttggcggtgacccgccggaccagaccagtggtgtacccactgggacgtatggggatggcggtggacatggcggccgtggcgccagctgcttcgttaagaaggggcaagcacaagaggactcatggggtggtgattcctacgcttggtctgcactgaagaccccaaataactatggaagcaaagggggatccactaccgtcgagaaggactatggtggtgggggtggcggtgtcgtgtggttgttcgctgaagagattgtgatgaatggaacagttcttgctgatggtggagacggtggcaccaagggtgggggtggctctggggggagcatctatctgaaggcttcaacaatgcaaggaggtggcaaaataagtgcttgtggaggcaatggtttagctggtggaggtggaggacgtgtttccatcgatgttttcagtaggcatgacgacacacaaatttttgtccatggggggaagagttcaggatgcttggacaatgcgggagcagctggaacactttatgaagcagtacctaagagtattactgttagcaacaataacttgagcacacaaacggatacagtttttctagaccccccatatgagccactctggacaaatgtttttgtcagaaattgtgccaaagtttctcttcccttacggtggagccgtattcagaatttgagctgttggctgaggaacttcttatgagtgattccacaatcaaggtctttggcgctttacgaatgtcggtaaagatgctccttatgtggaactcaagaatgactattgatggtggccgagaactaggtgtgggaacttcattactagaaggtagcaatttgatagtgctgaaggaagcatctgtcatacattcaaatgctaatctagggattcatggtcaaggagttctaaatttatctggtcaaggagatacaatagaggcacaacgccttattttatcactgttttacaacattttggttggacctggagctgttctaaggggcccacttataaatggaagtcgtgatgagatggccccaaaactgaattgcgaagatgagagttgccctatggaaatctttcatccacctgaggattgcaacttgaactcttcattgccttttactttacagatatgccgtgttgaagatattgatgtttctggccttgttcaaggaactgtagttaattttaacagagcaagaagtgtcactgttcagacatctgggaccataagtgcaacaggattaggctgccgaggtggcattggaagaggaaaaatgttaagcagtgggtttagtggtgggggtgggcatggtggtaaaggcggtgatggcatttataatggtggtcatgtagagggtggatctgcgtatggtcatgctgatttaccatgtgaacttggcagtggcagcggtaatgtcagtggatcttcaactgctggtggtggtataatagtgatgggttctttggaacaatctctgccgaacctctccctttctggctcgattgaggcaaatggtggtaattttactggtttgatgtctcatgccacaattggaggacctggtggcggttctggtggtacaattcttctttttgtgcggacattactcttgaagaaggactctgtactttctagtgttgggggagttggtggcaatggcagtggtggaggtggagggggtcggattcacttccactggtttgatattcccactggagatgattatattccttttgcaaccattaaaggaacaatacttgcaagaggaggagtcagtgaagggcaaggtttctctggtgagaatggaaccatcacaggaaaggattgcccaaaaggtctttatggaacattttgcaaggaatgtccctcaggaacatacaagaatattactggatcatctaagtccatgtgctcaccatgccctccaaatgagctacctcgccgtgctgtatacataagcgtccgaggaggtgttgctgaacccccatgcccatacaaatgcgtgtctgatagatatagcatgcctcactgttttactgcccttgaagagctgatatacacgtttggtggaccttggttgtttggtctgcttctgtctggccttcttgttttattagctcttgttttgagtattgctcggatgaagtttgttggtactgatgagttgcctggaccagcaccaactcaacagagctcccaaattgatcactcttttcccttccttgaatcactgaatgaggtattggaaacaaacagggcagaagaatctcactgtcatgtgcacaggatgtatttcatgggcccaaacaccttcagtgaaccttggcatctcccacacaccccgccagagcagatttcagagattgtgtacgaagatgcatttaacaaatttgttgatgagatcaatgctcttgcagcctatcagtggtgggaaggttcagtttttagcatcctatgtatactttcatttcccctggcatggtcgtggcaacagtggcgcaggagaaagaaattacaaaaactacgtgaatttgttcgttctgaatatgatcattcatgtttacggtcctgccgttcgcgtgcactttacgaggggctaaaggtagctgctactccagatttaatgctgggttatttagatttcttccttggtggggatgagaaaaggactgatcttcctcctcggcttcatcaaaggtttccaatgtccctgatctttggaggtgatggaagctatatggctccattttcacttcatagcgacagagtggtcacaactcttataagtcaggctgtgccatcatctatatggcatcgtcttgtagctggattgaatgcccagttgcgtttggttcgccgtggaaatctaaacacatcacttctccctgtgctcaaatggctagaaagtcatgcaaatcctgaattgaacacgtaccgtgtgcgtgttgaccttgcatggtttcaaactacagcattaggttaccttcagtttggtcttgtccttcatgctgtcgggggagtggtggctgctgaactccaggatggctgtacaagtaaaaccgatcagcattcagtaaaccagaatacatgcactgactctcaaatgggccactcaaggaccaatgatgttctgcgtaaaaggataactggcaccattctcaatgttgacaacttaaggatgcttggtggcaggagaggtttcttttaccttctctctcttatcttgcacaatacaaaaccagttggacatcaggaccttgtcggcttagtcatctcaatactgcttcttgcagatttcagcttagtcttgcttactttcctccaactatattcatattctatggtcgatgttctgttagtcttgttcattcttcctcttgggatactagcaccatttccagctgggataaatgctctttttagtcatgaacagcggcggtcagctggtcttgctcgtgtctatgccttgtggaatattacatcactggttaatgttgttgtggcttttgtatgtggatttctgcattacaagtcatcaagcaaaaaacatccaagcatgcagccgtggagttttggtggggaggaaaccagctggtcgctattccctataggacttgttctatgcaagtgcattcaagcaaggcttgttgattggcatgtatctatcttggagatccaggatcgtgcagtttatagcaatgacccaacaatattttggcagtgaaagcatttcgatttacaggagttctcatgaggagagcttaatgcaactcaagtttttgtgggagttgataaaaggaaggctatggagttagtctgttctttgtccgcccagtcaggggaagcatgtacaaagtagatgctggtaattgcctgcctatatagacttaatgacttacagtgcatggtcaaccttttgtccagtcactcacccagctttgttttccttgtacataggaaacgggtttaattagttgaccgattcgttgtaggatttaggatttagacaccatagaattatagattacccaaggtaatctcaaagagatggtggaaaacatatatacttcttttgtttaaagctttgtcttttgcattgatgttgagctgggaaacgggtgaggcatcaaatagagcttttttcccctctgttaagattaagacaaatgttaacgtgctgatgttttattcaagatctggttgccatatgttcccgtgatgatccctgcttctctattgttatagttctt

SEQ ID NO: 62539 - DNA, 5061 bp, Zea Mays
aaaggcccacctattatctcaaatcttaaagcaaaactgccggctgccgctgccatccccaattcgttaaccgaagagtggaaaacaaacaagccccagcggagcggaggtcgaaccatcaccaaacccgagccccgaccgcccacctcgccgtcgccgccgcaggcgatcagccgccgccgcactaatccctgccttgtccttatcataaaaccgcggcgctggagctctgatgcttcccaccccatggtcttccacatttccctcgcccgccactggcttcctccttctccttgccctcctccccgtcgcatcggggacctcagtccctaccctaggaggtttcgatcgtggagaggcggccggcgcggacgcatattcgatccttacgtttcacgactacacgccgcctccgccccccgttctgccgccgccaccggcggccccggcggcgacctgcgcgggggacctccacggcgtgggagaccttgacacccagtgcgtggtccatgagtcggtgaggctgggtggtggggtgttcatcagtggcaacggcagcctcctaatccttgatggcgtcgcggttacctgcgagcggcctgggtgcgtcgtctctgccaacctctccggcgatctcctcctcgggaacaggtcccgcgtcgtggccgggtgggtttccctcgcggcggccaacatcacactcggcgaggacgctgttattgacaccaccgcgcttggcggtgacccgccggaccagaccagtggtgtacccactgggacgtatggggatggcggtggacatggcggccgtggcgccagctgcttcgttaagaaggggcaagcacaagaggactcatggggtggtgattcctacgcttggtctgcactgaagaccccaaataactatggaagcaaagggggatccactaccgtcgagaaggactatggtggtgggggtggcggtgtcgtgtggttgttcgctgaagagattgtgatgaatggaacagttcttgctgatggtggagacggtggcaccaagggtgggggtggctctggggggagcatctatctgaaggcttcaacaatgcaaggaggtggcaaaataagtgcttgtggaggcaatggtttagctggtggaggtggaggacgtgtttccatcgatgttttcagtaggcatgacgacacacaaatttttgtccatggggggaagagttcaggatgcttggacaatgcgggagcagctggaacactttatgaagcagtacctaagagtattactgttagcaacaataacttgagcacacaaacggatacagtttttctagaccccccatatgagccactctggacaaatgtttttgtcagaaattgtgccaaagtttctcttcccttacggtggagccgtattcaggctcaaggacagattcttttatctggtgctactctaacttttggcctgacacattatccatattcagaatttgagctgttggctgaggaacttcttatgagtgattccacaatcaaggtctttggcgctttacgaatgtcggtaaagatgctccttatgtggaactcaagaatgactattgatggtggccgagaactaggtgtgggaacttcattactagaaggtagcaatttgatagtgctgaaggaagcatctgtcatacattcaaatgctaatctagggattcatggtcaaggagttctaaatttatctggtcaaggagatacaatagaggcacaacgccttattttatcactgttttacaacattttggttggacctggagctgttctaaggggcccacttataaatggaagtcgtgatgagatggccccaaaactgaattgcgaagatgagagttgccctatggaaatctttcatccacctgaggattgcaacttgaactcttcattgccttttactttacagatatgccgtgttgaagatattgatgtttctggccttgttcaaggaactgtagttaattttaacagagcaagaagtgtcactgttcagacatctgggaccataagtgcaacaggattaggctgccgaggtggcattggaagaggaaaaatgttaagcagtgggtttagtggtgggggtgggcatggtggtaaaggcggtgatggcatttataatggtggtcatgtagagggtggatctgcgtatggtcatgctgatttaccatgtgaacttggcagtggcagcggtaatgtcagtggatcttcaactgctggtggtggtataatagtgatgggttctttggaacaatctctgccgaacctctccctttctggctcgattgaggcaaatggtggtaattttactggtttgatgtctcatgccacaattggaggacctggtggcggttctggtggtacaattcttctttttgtgcggacattactcttgaagaaggactctgtactttctagtgttgggggagttggtggcaatggcagtggtggaggtggagggggtcggattcacttccactggtttgatattcccactggagatgattatattccttttgcaaccattaaaggaacaatacttgcaagaggaggagtcagtgaagggcaaggtttctctggtgagaatggaaccatcacaggaaaggattgcccaaaaggtctttatggaacattttgcaaggaatgtccctcaggaacatacaagaatattactggatcatctaagtccatgtgctcaccatgccctccaaatgagctacctcgccgtgctgtatacataagcgtccgaggaggtgttgctgaacccccatgcccatacaaatgcgtgtctgatagatatagcatgcctcactgttttactgcccttgaagagctgatatacacgtttggtggaccttggttgtttggtctgcttctgtctggccttcttgttttattagctcttgttttgagtattgctcggatgaagtttgttggtactgatgagttgcctggaccagcaccaactcaacagagctcccaaattgatcactcttttcccttccttgaatcactgaatgaggtattggaaacaaacagggcagaagaatctcactgtcatgtgcacaggatgtatttcatgggcccaaacaccttcagtgaaccttggcatctcccacacaccccgccagagcagatttcagagattgtgtacgaagatgcatttaacaaatttgttgatgagatcaatgctcttgcagcctatcagtggtgggaaggttcagtttttagcatcctatgtatactttcatttcccctggcatggtcgtggcaacagtggcgcaggagaaagaaattacaaaaactacgtgaatttgttcgttctgaatatgatcattcatgtttacggtcctgccgttcgcgtgcactttacgaggggctaaaggtagctgctactccagatttaatgctgggttatttagatttcttccttggtggggatgagaaaaggactgatcttcctcctcggcttcatcaaaggtttccaatgtccctgatctttggaggtgatggaagctatatggctccattttcacttcatagcgacagagtggtcacaactcttataagtcaggctgtgccatcatctatatggcatcgtcttgtagctggattgaatgcccagttgcgtttggttcgccgtggaaatctaaacacatcacttctccctgtgctcaaatggctagaaagtcatgcaaatcctgaattgaacacgtaccgtgtgcgtgttgaccttgcatggtttcaaactacagcattaggttaccttcagtttggtcttgtccttcatgctgtcgggggagtggtggctgctgaactccaggatggctgtacaagtaaaaccgatcagcattcaaaaccagaatacatgcactgactctcaaatgggccactcaaggaccaatgatgttctgcgtaaaaggataactggcaccattctcaatgttgacaacttaaggatgcttggtggcaggagaggtttcttttaccttctctctcttatcttgcacaatacaaaaccagttggacatcaggaccttgtcggcttagtcatctcaatactgcttcttgcagatttcagcttagtcttgcttactttcctccaactatattcatattctatggtcgatgttctgttagtcttgttcattcttcctcttgggatactagcaccatttccagctgggataaatgctctttttagtcatgaacagcggcggtcagctggtcttgctcgtgtctatgccttgtggaatattacatcactggttaatgttgttgtggcttttgtatgtggatttctgcattacaagtcatcaagcaaaaaacatccaagcatgcagccgtggagttttggtggggaggaaaccagctggtcgctattccctataggacttgttctatgcaagtgcattcaagcaaggcttgttgattggcatgtatctatcttggagatccaggatcgtgcagtttatagcaatgacccaacaatattttggcagtgaaagcatttcgatttacaggagttctcatgaggagagcttaatgcaactcaagtttttgtgggagttgataaaaggaaggctatggagttagtctgttctttgtccgcccagtcaggggaagcatgtacaaagtagatgctggtaattgcctgcctatatagacttaatgacttacagtgcatggtcaaccttttgtccagtcactcacccagctttgttttccttgtacataggaaacgggtttaattagttgaccgattcgttgtaggatttaggatttagacaccatagaattatagattacccaaggtaatctcaaagagatggtggaaaacatatatacttcttttgtttaaagctttgtcttttgcattgatgttgagctgggaaacgggtgaggcatcaaatagagcttttttcccctctgttaagattaagacaaatgttaacgtgctgatgttttattcaagatctggttgccatatgttcccgtgatgatccctgcttctctattgttatagttctt

SEQ ID NO: 62540 - DNA, 5445 bp, Zea Mays
aaaggcccacctattatctcaaatcttaaagcaaaactgccggctgccgctgccatccccaattcgttaaccgaagagtggaaaacaaacaagccccagcggagcggaggtcgaaccatcaccaaacccgagccccgaccgcccacctcgccgtcgccgccgcaggcgatcagccgccgccgcactaatccctgccttgtccttatcataaaaccgcggcgctggagctctgatgcttcccaccccatggtcttccacatttccctcgcccgccactggcttcctccttctccttgccctcctccccgtcgcatcggggacctcagtccctaccctaggaggtttcgatcgtggagaggcggccggcgcggacgcatattcgatccttacgtttcacgactacacgccgcctccgccccccgttctgccgccgccaccggcggccccggcggcgacctgcgcgggggacctccacggcgtgggagaccttgacacccagtgcgtggtccatgagtcggtgaggctgggtggtggggtgttcatcagtggcaacggcagcctcctaatccttgatggcgtcgcggttacctgcgagcggcctgggtgcgtcgtctctgccaacctctccggcgatctcctcctcgggaacaggtcccgcgtcgtggccgggtgggtttccctcgcggcggccaacatcacactcggcgaggacgctgttattgacaccaccgcgcttggcggtgacccgccggaccagaccagtggtgtacccactgggacgtatggggatggcggtggacatggcggccgtggcgccagctgcttcgttaagaaggggcaagcacaagaggactcatggggtggtgattcctacgcttggtctgcactgaagaccccaaataactatggaagcaaagggggatccactaccgtcgagaaggactatggtggtgggggtggcggtgtcgtgtggttgttcgctgaagagattgtgatgaatggaacagttcttgctgatggtggagacggtggcaccaagggtgggggtggctctggggggagcatctatctgaaggcttcaacaatgcaaggaggtggcaaaataagtgcttgtggaggcaatggtttagctggtggaggtggaggacgtgtttccatcgatgttttcagtaggcatgacgacacacaaatttttgtccatggggggaagagttcaggatgcttggacaatgcgggagcagctggaacactttatgaagcagtacctaagagtattactgttagcaacaataacttgagcacacaaacggatacagtttttctagaccccccatatgagccactctggacaaatgtttttgtcagaaattgtgccaaagtttctcttcccttacggtggagccgtattcaggctcaaggacagattcttttatctggtgctactctaacttttggcctgacacattatccatattcagaatttgagctgttggctgaggaacttcttatgagtgattccacaatcaaggtctttggcgctttacgaatgtcggtaaagatgctccttatgtggaactcaagaatgactattgatggtggccgagaactaggtgtgggaacttcattactagaaggtagcaatttgatagtgctgaaggaagcatctgtcatacattcaaatgctaatctagggattcatggtcaaggagttctaaatttatctggtcaaggagatacaatagaggcacaacgccttattttatcactgttttacaacattttggttggacctggagctgttctaaggggcccacttataaatggaagtcgtgatgagatggccccaaaactgaattgcgaagatgagagttgccctatggaaatctttcatccacctgaggattgcaacttgaactcttcattgccttttactttacagatatgccgtgttgaagatattgatgtttctggccttgttcaaggaactgtagttaattttaacagagcaagaagtgtcactgttcagacatctgggaccataagtgcaacaggattagggctaaaaagaggagtgtccacgatgctctcacaacaaggaactgggtgcatgacattcgaggtgctatcaccctaagtgttctgtctgattttctcaaagtttggaacctcactgcagactgggccttacatccggaccatgaggataagcacatctggctgctctcaagctcaggctgccgaggtggcattggaagaggaaaaatgttaagcagtgggtttagtggtgggggtgggcatggtggtaaaggcggtgatggcatttataatggtggtcatgtagagggtggatctgcgtatggtcatgctgatttaccatgtgaacttggcagtggcagcggtaatgtcagtggatcttcaactgctggtggtggtataatagtgatgggttctttggaacaatctctgccgaacctctccctttctggctcgattgaggcaaatggtggtaattttactggtttgatgtctcatgccacaattggaggacctggtggcggttctggtggtacaattcttctttttgtgcggacattactcttgaagaaggactctgtactttctagtgttgggggagttggtggcaatggcagtggtggaggtggagggggtcggattcacttccactggtttgatattcccactggagatgattatattccttttgcaaccattaaaggaacaatacttgcaagaggaggagtcagtgaagggcaaggtttctctggtgagaatggaaccatcacaggaaaggattgcccaaaaggtctttatggaacattttgcaaggaatgtccctcaggaacatacaagaatattactggatcatctaagtccatgtgctcaccatgccctccaaatgagctacctcgccgtgctgtatacataagcgtccgaggaggtgttgctgaacccccatgcccatacaaatgcgtgtctgatagatatagcatgcctcactgttttactgcccttgaagagctgatatacacgtttggtggaccttggttgtttggtctgcttctgtctggccttcttgttttattagctcttgttttgagtattgctcggatgaagtttgttggtactgatgagttgcctggaccagcaccaactcaacagagctcccaaattgatcactcttttcccttccttgaatcactgaatgaggtattggaaacaaacagggcagaagaatctcactgtcatgtgcacaggatgtatttcatgggcccaaacaccttcagtgaaccttggcatctcccacacaccccgccagagcagatttcagagattgtgtacgaagatgcatttaacaaatttgttgatgagatcaatgctcttgcagcctatcagtggtgggaaggttcagtttttagcatcctatgtatactttcatttcccctggcatggtcgtggcaacagtggcgcaggagaaagaaattacaaaaactacgtgaatttgttcgttctgaatatgatcattcatgtttacggtcctgccgttcgcgtgcactttacgaggggctaaaggtagctgctactccagatttaatgctgggttatttagatttcttccttggtggggatgagaaaaggactgatcttcctcctcggcttcatcaaaggtttccaatgtccctgatctttggaggtgatggaagctatatggctccattttcacttcatagcgacagagtggtcacaactcttataagtcaggctgtgccatcatctatatggcatcgtcttgtagctggattgaatgcccagttgcgtttggttcgccgtggaaatctaaacacatcacttctccctgtgctcaaatggctagaaagtcatgcaaatcctgaattgaacacgtaccgtgtgcgtgttgaccttgcatggtttcaaactacagcattaggttaccttcagtttggtcttgtccttcatgctgtcgggggagtggtggctgctgaactccaggatggctgtacaagtaaaaccgatcagcattcagtaaaccagaatacatgcactgactctcaaatgggccactcaaggaccaatgatgttctgcgtaaaaggataactggcaccattctcaatgttgacaacttaaggatgcttggtggcaggagaggtttcttttaccttctctctcttatcttgcacaatacaaaaccagttggacatcaggaccttgtcggcttagtcatctcaatactgcttcttgcagatttcagcttagtcttgcttactttcctccaactatattcatattctatggtcgatgttctgttagtcttgttcattcttcctcttgggatactagcaccatttccagctgggataaatgctctttttagtcatgaacagcggcggtcagctggtcttgctcgtgtctatgccttgtggaatattacatcactggttaatgttgtaagtactcctccatcattgtctgtacctggattttgctctaacaagttcattaggttgccaagttcagattcatagggagttgtaatcattgctgtttgcttgagcatttgttggggattcaatattgccattaagagttcaagcatgggcatcgatagaggctgaatgctggaaccttattcctacccccagatttgtatcatgttgtggcttttgtatgtggatttctgcattacaagtcatcaagcaaaaaacatccaagcatgcagccgtggagttttggtggggaggaaaccagctggtcgctattccctataggacttgttctatgcaagtgcattcaagcaaggcttgttgattggcatgtatctatcttggagatccaggatcgtgcagtttatagcaatgacccaacaatattttggcagtgaaagcatttcgatttacaggagttctcatgaggagagcttaatgcaactcaagtttttgtgggagttgataaaaggaaggctatggagttagtctgttctttgtccgcccagtcaggggaagcatgtacaaagtagatgctggtaattgcctgcctatatagacttaatgacttacagtgcatggtcaaccttttgtccagtcactcacccagctttgttttccttgtacataggaaacgggtttaattagttgaccgattcgttgtaggatttaggatttagacaccatagaattatagattacccaaggtaatctcaaagagatggtggaaaacatatatacttcttttgtttaaagctttgtcttttgcattgatgttgagctgggaaacgggtgaggcatcaaatagagcttttttcccctctgttaagattaagacaaatgttaacgtgctgatgttttattcaagatctggttgccatatgttcccgtgatgatccctgcttctctattgttatagttctt

SEQ ID NO: 62541 - DNA, 5239 bp, Zea Mays
aaaggcccacctattatctcaaatcttaaagcaaaactgccggctgccgctgccatccccaattcgttaaccgaagagtggaaaacaaacaagccccagcggagcggaggtcgaaccatcaccaaacccgagccccgaccgcccacctcgccgtcgccgccgcaggcgatcagccgccgccgcactaatccctgccttgtccttatcataaaaccgcggcgctggagctctgatgcttcccaccccatggtcttccacatttccctcgcccgccactggcttcctccttctccttgccctcctccccgtcgcatcggggacctcagtccctaccctaggaggtttcgatcgtggagaggcggccggcgcggacgcatattcgatccttacgtttcacgactacacgccgcctccgccccccgttctgccgccgccaccggcggccccggcggcgacctgcgcgggggacctccacggcgtgggagaccttgacacccagtgcgtggtccatgagtcggtgaggctgggtggtggggtgttcatcagtggcaacggcagcctcctaatccttgatggcgtcgcggttacctgcgagcggcctgggtgcgtcgtctctgccaacctctccggcgatctcctcctcgggaacaggtcccgcgtcgtggccgggtgggtttccctcgcggcggccaacatcacactcggcgaggacgctgttattgacaccaccgcgcttggcggtgacccgccggaccagaccagtggtgtacccactgggacgtatggggatggcggtggacatggcggccgtggcgccagctgcttcgttaagaaggggcaagcacaagaggactcatggggtggtgattcctacgcttggtctgcactgaagaccccaaataactatggaagcaaagggggatccactaccgtcgagaaggactatggtggtgggggtggcggtgtcgtgtggttgttcgctgaagagattgtgatgaatggaacagttcttgctgatggtggagacggtggcaccaagggtgggggtggctctggggggagcatctatctgaaggcttcaacaatgcaaggaggtggcaaaataagtgcttgtggaggcaatggtttagctggtggaggtggaggacgtgtttccatcgatgttttcagtaggcatgacgacacacaaatttttgtccatggggggaagagttcaggatgcttggacaatgcgggagcagctggaacactttatgaagcagtacctaagagtattactgttagcaacaataacttgagcacacaaacggatacagtttttctagaccccccatatgagccactctggacaaatgtttttgtcagaaattgtgccaaagtttctcttcccttacggtggagccgtattcaggctcaaggacagattcttttatctggtgctactctaacttttggcctgacacattatccatattcagaatttgagctgttggctgaggaacttcttatgagtgattccacaatcaaggtctttggcgctttacgaatgtcggtaaagatgctccttatgtggaactcaagaatgactattgatggtggccgagaactaggtgtgggaacttcattactagaaggtagcaatttgatagtgctgaaggaagcatctgtcatacattcaaatgctaatctagggattcatggtcaaggagttctaaatttatctggtcaaggagatacaatagaggcacaacgccttattttatcactgttttacaacattttggttggacctggagctgttctaaggggcccacttataaatggaagtcgtgatgagatggccccaaaactgaattgcgaagatgagagttgccctatggaaatctttcatccacctgaggattgcaacttgaactcttcattgccttttactttacagatatgccgtgttgaagatattgatgtttctggccttgttcaaggaactgtagttaattttaacagagcaagaagtgtcactgttcagacatctgggaccataagtgcaacaggattagggctaaaaagaggagtgtccacgatgctctcacaacaaggaactgggtgcatgacattcgaggtgctatcaccctaagtgttctgtctgattttctcaaagtttggaacctcactgcagactgggccttacatccggaccatgaggataagcacatctggctgctctcaagctcaggctgccgaggtggcattggaagaggaaaaatgttaagcagtgggtttagtggtgggggtgggcatggtggtaaaggcggtgatggcatttataatggtggtcatgtagagggtggatctgcgtatggtcatgctgatttaccatgtgaacttggcagtggcagcggtaatgtcagtggatcttcaactgctggtggtggtataatagtgatgggttctttggaacaatctctgccgaacctctccctttctggctcgattgaggcaaatggtggtaattttactggtttgatgtctcatgccacaattggaggacctggtggcggttctggtggtacaattcttctttttgtgcggacattactcttgaagaaggactctgtactttctagtgttgggggagttggtggcaatggcagtggtggaggtggagggggtcggattcacttccactggtttgatattcccactggagatgattatattccttttgcaaccattaaaggaacaatacttgcaagaggaggagtcagtgaagggcaaggtttctctggtgagaatggaaccatcacaggaaaggattgcccaaaaggtctttatggaacattttgcaaggaatgtccctcaggaacatacaagaatattactggatcatctaagtccatgtgctcaccatgccctccaaatgagctacctcgccgtgctgtatacataagcgtccgaggaggtgttgctgaacccccatgcccatacaaatgcgtgtctgatagatatagcatgcctcactgttttactgcccttgaagagctgatatacacgtttggtggaccttggttgtttggtctgcttctgtctggccttcttgttttattagctcttgttttgagtattgctcggatgaagtttgttggtactgatgagttgcctggaccagcaccaactcaacagagctcccaaattgatcactcttttcccttccttgaatcactgaatgaggtattggaaacaaacagggcagaagaatctcactgtcatgtgcacaggatgtatttcatgggcccaaacaccttcagtgaaccttggcatctcccacacaccccgccagagcagatttcagagattgtgtacgaagatgcatttaacaaatttgttgatgagatcaatgctcttgcagcctatcagtggtgggaaggttcagtttttagcatcctatgtatactttcatttcccctggcatggtcgtggcaacagtggcgcaggagaaagaaattacaaaaactacgtgaatttgttcgttctgaatatgatcattcatgtttacggtcctgccgttcgcgtgcactttacgaggggctaaaggtagctgctactccagatttaatgctgggttatttagatttcttccttggtggggatgagaaaaggactgatcttcctcctcggcttcatcaaaggtttccaatgtccctgatctttggaggtgatggaagctatatggctccattttcacttcatagcgacagagtggtcacaactcttataagtcaggctgtgccatcatctatatggcatcgtcttgtagctggattgaatgcccagttgcgtttggttcgccgtggaaatctaaacacatcacttctccctgtgctcaaatggctagaaagtcatgcaaatcctgaattgaacacgtaccgtgtgcgtgttgaccttgcatggtttcaaactacagcattaggttaccttcagtttggtcttgtccttcatgctgtcgggggagtggtggctgctgaactccaggatggctgtacaagtaaaaccgatcagcattcagtaaaccagaatacatgcactgactctcaaatgggccactcaaggaccaatgatgttctgcgtaaaaggataactggcaccattctcaatgttgacaacttaaggatgcttggtggcaggagaggtttcttttaccttctctctcttatcttgcacaatacaaaaccagttggacatcaggaccttgtcggcttagtcatctcaatactgcttcttgcagatttcagcttagtcttgcttactttcctccaactatattcatattctatggtcgatgttctgttagtcttgttcattcttcctcttgggatactagcaccatttccagctgggataaatgctctttttagtcatgaacagcggcggtcagctggtcttgctcgtgtctatgccttgtggaatattacatcactggttaatgttgttgtggcttttgtatgtggatttctgcattacaagtcatcaagcaaaaaacatccaagcatgcagccgtggagttttggtggggaggaaaccagctggtcgctattccctataggacttgttctatgcaagtgcattcaagcaaggcttgttgattggcatgtatctatcttggagatccaggatcgtgcagtttatagcaatgacccaacaatattttggcagtgaaagcatttcgatttacaggagttctcatgaggagagcttaatgcaactcaagtttttgtgggagttgataaaaggaaggctatggagttagtctgttctttgtccgcccagtcaggggaagcatgtacaaagtagatgctggtaattgcctgcctatatagacttaatgacttacagtgcatggtcaaccttttgtccagtcactcacccagctttgttttccttgtacataggaaacgggtttaattagttgaccgattcgttgtaggatttaggatttagacaccatagaattatagattacccaaggtaatctcaaagagatggtggaaaacatatatacttcttttgtttaaagctttgtcttttgcattgatgttgagctgggaaacgggtgaggcatcaaatagagcttttttcccctctgttaagattaagacaaatgttaacgtgctgatgttttattcaagatctggttgccatatgttcccgtgatgatccctgcttctctattgttatagttctt

SEQ ID NO: 62542 - DNA, 5481 bp, Zea Mays
aaaggcccacctattatctcaaatcttaaagcaaaactgccggctgccgctgccatccccaattcgttaaccgaagagtggaaaacaaacaagccccagcggagcggaggtcgaaccatcaccaaacccgagccccgaccgcccacctcgccgtcgccgccgcaggcgatcagccgccgccgcactaatccctgccttgtccttatcataaaaccgcggcgctggagctctgatgcttcccaccccatggtcttccacatttccctcgcccgccactggcttcctccttctccttgccctcctccccgtcgcatcggggacctcagtccctaccctaggaggtttcgatcgtggagaggcggccggcgcggacgcatattcgatccttacgtttcacgactacacgccgcctccgccccccgttctgccgccgccaccggcggccccggcggcgacctgcgcgggggacctccacggcgtgggagaccttgacacccagtgcgtggtccatgagtcggtgaggctgggtggtggggtgttcatcagtggcaacggcagcctcctaatccttgatggcgtcgcggttacctgcgagcggcctgggtgcgtcgtctctgccaacctctccggcgatctcctcctcgggaacaggtcccgcgtcgtggccgggtgggtttccctcgcggcggccaacatcacactcggcgaggacgctgttattgacaccaccgcgcttggcggtgacccgccggaccagaccagtggtgtacccactgggacgtatggggatggcggtggacatggcggccgtggcgccagctgcttcgttaagaaggggcaagcacaagaggactcatggggtggtgattcctacgcttggtctgcactgaagaccccaaataactatggaagcaaagggggatccactaccgtcgagaaggactatggtggtgggggtggcggtgtcgtgtggttgttcgctgaagagattgtgatgaatggaacagttcttgctgatggtggagacggtggcaccaagggtgggggtggctctggggggagcatctatctgaaggcttcaacaatgcaaggaggtggcaaaataagtgcttgtggaggcaatggtttagctggtggaggtggaggacgtgtttccatcgatgttttcagtaggcatgacgacacacaaatttttgtccatggggggaagagttcaggatgcttggacaatgcgggagcagctggaacactttatgaagcagtacctaagagtattactgttagcaacaataacttgagcacacaaacggatacagtttttctagaccccccatatgagccactctggacaaatgtttttgtcagaaattgtgccaaagtttctcttcccttacggtggagccgtattcaggctcaaggacagattcttttatctggtgctactctaacttttggcctgacacattatccatattcagaatttgagctgttggctgaggaacttcttatgagtgattccacaatcaaggtctttggcgctttacgaatgtcggtaaagatgctccttatgtggaactcaagaatgactattgatggtggccgagaactaggtgtgggaacttcattactagaaggtagcaatttgatagtgctgaaggaagcatctgtcatacattcaaatgctaatctagggattcatggtcaaggagttctaaatttatctggtcaaggagatacaatagaggcacaacgccttattttatcactgttttacaacattttggttggacctggagctgttctaaggggcccacttataaatggaagtcgtgatgagatggccccaaaactgaattgcgaagatgagagttgccctatggaaatctttcatccacctgaggattgcaacttgaactcttcattgccttttactttacagatatgccgtgttgaagatattgatgtttctggccttgttcaaggaactgtagttaattttaacagagcaagaagtgtcactgttcagacatctgggaccataagtgcaacaggattaggctgccgaggtggcattggaagaggaaaaatgttaagcagtgggtttagtggtgggggtgggcatggtggtaaaggcggtgatggcatttataatggtggtcatgtagagggtggatctgcgtatggtcatgctgatttaccatgtgaacttggcagtggcagcggtaatgtcagtggatcttcaactgctggtggtggtataatagtgatgggttctttggaacaatctctgccgaacctctccctttctggctcgattgaggcaaatggtggtaattttactggtttgatgtctcatgccacaattggaggacctggtggcggttctggtggtacaattcttctttttgtgcggacattactcttgaagaaggactctgtactttctagtgttgggggagttggtggcaatggcagtggtggaggtggagggggtcggattcacttccactggtttgatattcccactggagatgattatattccttttgcaaccattaaaggaacaatacttgcaagaggaggagtcagtgaagggcaaggtttctctggtgagaatggaaccatcacaggaaaggattgcccaaaaggtctttatggaacattttgcaaggaatgtccctcaggaacatacaagaatattactggatcatctaagtccatgtgctcaccatgccctccaaatgagctacctcgccgtgctgtatacataagcgtccgaggaggtgttgctgaacccccatgcccatacaaatgcgtgtctgatagatatagcatgcctcactgttttactgcccttgaagagctgatatacacgtttggtggaccttggttgtttggtctgcttctgtctggccttcttgttttattagctcttgttttgagtattgctcggatgaagtttgttggtactgatgagttgcctggaccagcaccaactcaacagagctcccaaattgatcactcttttcccttccttgaatcactgaatgaggtattggaaacaaacagggcagaagaatctcactgtcatgtgcacaggatgtatttcatgggcccaaacaccttcagtgaaccttggcatctcccacacaccccgccagagcagatttcagagattgtgtacgaagatgcatttaacaaatttgttgatgagatcaatgctcttgcagcctatcagtggtgggaaggttcagtttttagcatcctatgtatactttcatttcccctggcatggtcgtggcaacagtggcgcaggagaaagaaattacaaaaactacgtgaatttgttcgttctgaatatgatcattcatgtttacggtcctgccgttcgcgtgcactttacgaggggctaaaggtagctgctactccagatttaatgctgggttatttagatttcttccttggtggggatgagaaaaggactgatcttcctcctcggcttcatcaaaggtttccaatgtccctgatctttggaggtgatggaagctatatggctccattttcacttcatagcgacagagtggtcacaactcttataagtcaggctgtgccatcatctatatggcatcgtcttgtagctggattgaatgcccagttgcgtttggttcgccgtggaaatctaaacacatcacttctccctgtgctcaaatggctagaaagtcatgcaaatcctgaattgaacacgtaccgtgtgcgtgttgaccttgcatggtttcaaactacagcattaggttaccttcagtttggtcttgtccttcatgctgtcgggggagtggtggctgctgaactccaggatggctgtacaagtaaaaccgatcagcattcagtaaaccagaatacatgcactgactctcaaatgggccactcaaggaccaatgatgttctgcgtaaaaggataactggcaccattctcaatgttgacaacttaaggatgcttggtggcaggagaggtttcttttaccttctctctcttatcttgcacaatacaaaaccagttggacatcaggaccttgtcggcttagtcatctcaatactgcttcttgcagatttcagcttagtcttgcttactttcctccaactatattcatattctatggtcgatgttctgttagtcttgttcattcttcctcttgggatactagcaccatttccagctgggataaatgctctttttagtcatgaacagcggcggtcagctggtcttgctcgtgtctatgccttgtggaatattacatcactggttaatgttgtaagtactcctccatcattgtctgtacctggattttgctctaacaagttcattaggttgccaagttcagattcatagggagttgtaatcattgctgtttgcttgagcatttgttggggattcaatattgccattaagagttcaagcatgggcatcgatagaggctgaatgctggaaccttattcctacccccagatttgtatcatgtaatactcattgcagcgctgtttttctcagtggtttgtcaggttgaaatgtgatctggctggttttgttttgaacttttcctgattttccatttacatacttgcacatgctgtacattttttcacatgaagggtcattactgactttcttcactgtagatacaggaatcatgttttatggtttttacgtacaattgctctatcactcgcaggttgtggcttttgtatgtggatttctgcattacaagtcatcaagcaaaaaacatccaagcatgcagccgtggagttttggtggggaggaaaccagctggtcgctattccctataggacttgttctatgcaagtgcattcaagcaaggcttgttgattggcatgtatctatcttggagatccaggatcgtgcagtttatagcaatgacccaacaatattttggcagtgaaagcatttcgatttacaggagttctcatgaggagagcttaatgcaactcaagtttttgtgggagttgataaaaggaaggctatggagttagtctgttctttgtccgcccagtcaggggaagcatgtacaaagtagatgctggtaattgcctgcctatatagacttaatgacttacagtgcatggtcaaccttttgtccagtcactcacccagctttgttttccttgtacataggaaacgggtttaattagttgaccgattcgttgtaggatttaggatttagacaccatagaattatagattacccaaggtaatctcaaagagatggtggaaaacatatatacttcttttgtttaaagctttgtcttttgcattgatgttgagctgggaaacgggtgaggcatcaaatagagcttttttcccctctgttaagattaagacaaatgttaacgtgctgatgttttattcaagatctggttgccatatgttcccgtgatgatccctgcttctctattgttatagttctt

SEQ ID NO: 62543 - DNA, 5269 bp, Zea Mays
aaaggcccacctattatctcaaatcttaaagcaaaactgccggctgccgctgccatccccaattcgttaaccgaagagtggaaaacaaacaagccccagcggagcggaggtcgaaccatcaccaaacccgagccccgaccgcccacctcgccgtcgccgccgcaggcgatcagccgccgccgcactaatccctgccttgtccttatcataaaaccgcggcgctggagctctgatgcttcccaccccatggtcttccacatttccctcgcccgccactggcttcctccttctccttgccctcctccccgtcgcatcggggacctcagtccctaccctaggaggtttcgatcgtggagaggcggccggcgcggacgcatattcgatccttacgtttcacgactacacgccgcctccgccccccgttctgccgccgccaccggcggccccggcggcgacctgcgcgggggacctccacggcgtgggagaccttgacacccagtgcgtggtccatgagtcggtgaggctgggtggtggggtgttcatcagtggcaacggcagcctcctaatccttgatggcgtcgcggttacctgcgagcggcctgggtgcgtcgtctctgccaacctctccggcgatctcctcctcgggaacaggtcccgcgtcgtggccgggtgggtttccctcgcggcggccaacatcacactcggcgaggacgctgttattgacaccaccgcgcttggcggtgacccgccggaccagaccagtggtgtacccactgggacgtatggggatggcggtggacatggcggccgtggcgccagctgcttcgttaagaaggggcaagcacaagaggactcatggggtggtgattcctacgcttggtctgcactgaagaccccaaataactatggaagcaaagggggatccactaccgtcgagaaggactatggtggtgggggtggcggtgtcgtgtggttgttcgctgaagagattgtgatgaatggaacagttcttgctgatggtggagacggtggcaccaagggtgggggtggctctggggggagcatctatctgaaggcttcaacaatgcaaggaggtggcaaaataagtgcttgtggaggcaatggtttagctggtggaggtggaggacgtgtttccatcgatgttttcagtaggcatgacgacacacaaatttttgtccatggggggaagagttcaggatgcttggacaatgcgggagcagctggaacactttatgaagcagtacctaagagtattactgttagcaacaataacttgagcacacaaacggatacagtttttctagaccccccatatgagccactctggacaaatgtttttgtcagaaattgtgccaaagtttctcttcccttacggtggagccgtattcaggctcaaggacagattcttttatctggtgctactctaacttttggcctgacacattatccatattcagaatttgagctgttggctgaggaacttcttatgagtgattccacaatcaaggtctttggcgctttacgaatgtcggtaaagatgctccttatgtggaactcaagaatgactattgatggtggccgagaactaggtgtgggaacttcattactagaaggtagcaatttgatagtgctgaaggaagcatctgtcatacattcaaatgctaatctagggattcatggtcaaggagttctaaatttatctggtcaaggagatacaatagaggcacaacgccttattttatcactgttttacaacattttggttggacctggagctgttctaaggggcccacttataaatggaagtcgtgatgagatggccccaaaactgaattgcgaagatgagagttgccctatggaaatctttcatccacctgaggattgcaacttgaactcttcattgccttttactttacagatatgccgtgttgaagatattgatgtttctggccttgttcaaggaactgtagttaattttaacagagcaagaagtgtcactgttcagacatctgggaccataagtgcaacaggattaggctgccgaggtggcattggaagaggaaaaatgttaagcagtgggtttagtggtgggggtgggcatggtggtaaaggcggtgatggcatttataatggtggtcatgtagagggtggatctgcgtatggtcatgctgatttaccatgtgaacttggcagtggcagcggtaatgtcagtggatcttcaactgctggtggtggtataatagtgatgggttctttggaacaatctctgccgaacctctccctttctggctcgattgaggcaaatggtggtaattttactggtttgatgtctcatgccacaattggaggacctggtggcggttctggtggtacaattcttctttttgtgcggacattactcttgaagaaggactctgtactttctagtgttgggggagttggtggcaatggcagtggtggaggtggagggggtcggattcacttccactggtttgatattcccactggagatgattatattccttttgcaaccattaaaggaacaatacttgcaagaggaggagtcagtgaagggcaaggtttctctggtgagaatggaaccatcacaggaaaggattgcccaaaaggtctttatggaacattttgcaaggaatgtccctcaggaacatacaagaatattactggatcatctaagtccatgtgctcaccatgccctccaaatgagctacctcgccgtgctgtatacataagcgtccgaggaggtgttgctgaacccccatgcccatacaaatgcgtgtctgatagatatagcatgcctcactgttttactgcccttgaagagctgatatacacgtttggtggaccttggttgtttggtctgcttctgtctggccttcttgttttattagctcttgttttgagtattgctcggatgaagtttgttggtactgatgagttgcctggaccagcaccaactcaacagagctcccaaattgatcactcttttcccttccttgaatcactgaatgaggtattggaaacaaacagggcagaagaatctcactgtcatgtgcacaggatgtatttcatgggcccaaacaccttcagtgaaccttggcatctcccacacaccccgccagagcagatttcagagattgtgtacgaagatgcatttaacaaatttgttgatgagatcaatgctcttgcagcctatcagtggtgggaaggttcagtttttagcatcctatgtatactttcatttcccctggcatggtcgtggcaacagtggcgcaggagaaagaaattacaaaaactacgtgaatttgttcgttctgaatatgatcattcatgtttacggtcctgccgttcgcgtgcactttacgaggggctaaaggtagctgctactccagatttaatgctgggttatttagatttcttccttggtggggatgagaaaaggactgatcttcctcctcggcttcatcaaaggtttccaatgtccctgatctttggaggtgatggaagctatatggctccattttcacttcatagcgacagagtggtcacaactcttataagtcaggctgtgccatcatctatatggcatcgtcttgtagctggattgaatgcccagttgcgtttggttcgccgtggaaatctaaacacatcacttctccctgtgctcaaatggctagaaagtcatgcaaatcctgaattgaacacgtaccgtgtgcgtgttgaccttgcatggtttcaaactacagcattaggttaccttcagtttggtcttgtccttcatgctgtcgggggagtggtggctgctgaactccaggatggctgtacaagtaaaaccgatcagcattcagtaaaccagaatacatgcactgactctcaaatgggccactcaaggaccaatgatgttctgcgtaaaaggataactggcaccattctcaatgttgacaacttaaggatgcttggtggcaggagaggtttcttttaccttctctctcttatcttgcacaatacaaaaccagttggacatcaggaccttgtcggcttagtcatctcaatactgcttcttgcagatttcagcttagtcttgcttactttcctccaactatattcatattctatggtcgatgttctgttagtcttgttcattcttcctcttgggatactagcaccatttccagctgggataaatgctctttttagtcatgaacagcggcggtcagctggtcttgctcgtgtctatgccttgtggaatattacatcactggttaatgttgtaagtactcctccatcattgtctgtacctggattttgctctaacaagttcattaggttgccaagttcagattcatagggagttgtaatcattgctgtttgcttgagcatttgttggggattcaatattgccattaagagttcaagcatgggcatcgatagaggctgaatgctggaaccttattcctacccccagatttgtatcatgttgtggcttttgtatgtggatttctgcattacaagtcatcaagcaaaaaacatccaagcatgcagccgtggagttttggtggggaggaaaccagctggtcgctattccctataggacttgttctatgcaagtgcattcaagcaaggcttgttgattggcatgtatctatcttggagatccaggatcgtgcagtttatagcaatgacccaacaatattttggcagtgaaagcatttcgatttacaggagttctcatgaggagagcttaatgcaactcaagtttttgtgggagttgataaaaggaaggctatggagttagtctgttctttgtccgcccagtcaggggaagcatgtacaaagtagatgctggtaattgcctgcctatatagacttaatgacttacagtgcatggtcaaccttttgtccagtcactcacccagctttgttttccttgtacataggaaacgggtttaattagttgaccgattcgttgtaggatttaggatttagacaccatagaattatagattacccaaggtaatctcaaagagatggtggaaaacatatatacttcttttgtttaaagctttgtcttttgcattgatgttgagctgggaaacgggtgaggcatcaaatagagcttttttcccctctgttaagattaagacaaatgttaacgtgctgatgttttattcaagatctggttgccatatgttcccgtgatgatccctgcttctctattgttatagttctt

SEQ ID NO: 62544 - DNA, 5063 bp, Zea Mays
aaaggcccacctattatctcaaatcttaaagcaaaactgccggctgccgctgccatccccaattcgttaaccgaagagtggaaaacaaacaagccccagcggagcggaggtcgaaccatcaccaaacccgagccccgaccgcccacctcgccgtcgccgccgcaggcgatcagccgccgccgcactaatccctgccttgtccttatcataaaaccgcggcgctggagctctgatgcttcccaccccatggtcttccacatttccctcgcccgccactggcttcctccttctccttgccctcctccccgtcgcatcggggacctcagtccctaccctaggaggtttcgatcgtggagaggcggccggcgcggacgcatattcgatccttacgtttcacgactacacgccgcctccgccccccgttctgccgccgccaccggcggccccggcggcgacctgcgcgggggacctccacggcgtgggagaccttgacacccagtgcgtggtccatgagtcggtgaggctgggtggtggggtgttcatcagtggcaacggcagcctcctaatccttgatggcgtcgcggttacctgcgagcggcctgggtgcgtcgtctctgccaacctctccggcgatctcctcctcgggaacaggtcccgcgtcgtggccgggtgggtttccctcgcggcggccaacatcacactcggcgaggacgctgttattgacaccaccgcgcttggcggtgacccgccggaccagaccagtggtgtacccactgggacgtatggggatggcggtggacatggcggccgtggcgccagctgcttcgttaagaaggggcaagcacaagaggactcatggggtggtgattcctacgcttggtctgcactgaagaccccaaataactatggaagcaaagggggatccactaccgtcgagaaggactatggtggtgggggtggcggtgtcgtgtggttgttcgctgaagagattgtgatgaatggaacagttcttgctgatggtggagacggtggcaccaagggtgggggtggctctggggggagcatctatctgaaggcttcaacaatgcaaggaggtggcaaaataagtgcttgtggaggcaatggtttagctggtggaggtggaggacgtgtttccatcgatgttttcagtaggcatgacgacacacaaatttttgtccatggggggaagagttcaggatgcttggacaatgcgggagcagctggaacactttatgaagcagtacctaagagtattactgttagcaacaataacttgagcacacaaacggatacagtttttctagaccccccatatgagccactctggacaaatgtttttgtcagaaattgtgccaaagtttctcttcccttacggtggagccgtattcaggctcaaggacagattcttttatctggtgctactctaacttttggcctgacacattatccatattcagaatttgagctgttggctgaggaacttcttatgagtgattccacaatcaaggtctttggcgctttacgaatgtcggtaaagatgctccttatgtggaactcaagaatgactattgatggtggccgagaactaggtgtgggaacttcattactagaaggtagcaatttgatagtgctgaaggaagcatctgtcatacattcaaatgctaatctagggattcatggtcaaggagttctaaatttatctggtcaaggagatacaatagaggcacaacgccttattttatcactgttttacaacattttggttggacctggagctgttctaaggggcccacttataaatggaagtcgtgatgagatggccccaaaactgaattgcgaagatgagagttgccctatggaaatctttcatccacctgaggattgcaacttgaactcttcattgccttttactttacagatatgccgtgttgaagatattgatgtttctggccttgttcaaggaactgtagttaattttaacagagcaagaagtgtcactgttcagacatctgggaccataagtgcaacaggattaggctgccgaggtggcattggaagaggaaaaatgttaagcagtgggtttagtggtgggggtgggcatggtggtaaaggcggtgatggcatttataatggtggtcatgtagagggtggatctgcgtatggtcatgctgatttaccatgtgaacttggcagtggcagcggtaatgtcagtggatcttcaactgctggtggtggtataatagtgatgggttctttggaacaatctctgccgaacctctccctttctggctcgattgaggcaaatggtggtaattttactggtttgatgtctcatgccacaattggaggacctggtggcggttctggtggtacaattcttctttttgtgcggacattactcttgaagaaggactctgtactttctagtgttgggggagttggtggcaatggcagtggtggaggtggagggggtcggattcacttccactggtttgatattcccactggagatgattatattccttttgcaaccattaaaggaacaatacttgcaagaggaggagtcagtgaagggcaaggtttctctggtgagaatggaaccatcacaggaaaggattgcccaaaaggtctttatggaacattttgcaaggaatgtccctcaggaacatacaagaatattactggatcatctaagtccatgtgctcaccatgccctccaaatgagctacctcgccgtgctgtatacataagcgtccgaggaggtgttgctgaacccccatgcccatacaaatgcgtgtctgatagatatagcatgcctcactgttttactgcccttgaagagctgatatacacgtttggtggaccttggttgtttggtctgcttctgtctggccttcttgttttattagctcttgttttgagtattgctcggatgaagtttgttggtactgatgagttgcctggaccagcaccaactcaacagagctcccaaattgatcactcttttcccttccttgaatcactgaatgaggtattggaaacaaacagggcagaagaatctcactgtcatgtgcacaggatgtatttcatgggcccaaacaccttcagtgaaccttggcatctcccacacaccccgccagagcagatttcagagattgtgtacgaagatgcatttaacaaatttgttgatgagatcaatgctcttgcagcctatcagtggtgggaaggttcagtttttagcatcctatgtatactttcatttcccctggcatggtcgtggcaacagtggcgcaggagaaagaaattacaaaaactacgtgaatttgttcgttctgaatatgatcattcatgtttacggtcctgccgttcgcgtgcactttacgaggggctaaaggtagctgctactccagatttaatgctgggttatttagatttcttccttggtggggatgagaaaaggactgatcttcctcctcggcttcatcaaaggtttccaatgtccctgatctttggaggtgatggaagctatatggctccattttcacttcatagcgacagagtggtcacaactcttataagtcaggctgtgccatcatctatatggcatcgtcttgtagctggattgaatgcccagttgcgtttggttcgccgtggaaatctaaacacatcacttctccctgtgctcaaatggctagaaagtcatgcaaatcctgaattgaacacgtaccgtgtgcgtgttgaccttgcatggtttcaaactacagcattaggttaccttcagtttggtcttgtccttcatgctgtcgggggagtggtggctgctgaactccaggatggctgtacaagtaaaaccgatcagcattcagtaaaccagaatacatgcactgactctcaaatgggccactcaaggaccaatgatgttctgcgtaaaaggataactggcaccattctcaatgttgacaacttaaggatgcttggtggcaggagaggtttcttttaccttctctctcttatcttgcacaatacaaaaccagttggacatcaggaccttgtcggcttagtcatctcaatactgcttcttgcagatttcagcttagtcttgcttactttcctccaactatattcatattctatggtcgatgttctgttagtcttgttcattcttcctcttgggatactagcaccatttccagctgggataaatgctctttttagtcatgaacagcggcggtcagctggtcttgctcgtgtctatgccttgtggaatattacatcactggttaatgttgttgtggcttttgtatgtggatttctgcattacaagtcatcaagcaaaaaacatccaagcatgcagccgtggagttttggtggggaggaaaccagctggtcgctattccctataggacttgttctatgcaagtgcattcaagcaaggcttgttgattggcatgtatctatcttggagatccaggatcgtgcagtttatagcaatgacccaacaatattttggcagtgaaagcatttcgatttacaggagttctcatgaggagagcttaatgcaactcaagtttttgtgggagttgataaaaggaaggctatggagttagtctgttctttgtccgcccagtcaggggaagcatgtacaaagtagatgctggtaattgcctgcctatatagacttaatgacttacagtgcatggtcaaccttttgtccagtcactcacccagctttgttttccttgtacataggaaacgggtttaattagttgaccgattcgttgtaggatttaggatttagacaccatagaattatagattacccaaggtaatctcaaagagatggtggaaaacatatatacttcttttgtttaaagctttgtcttttgcattgatgttgagctgggaaacgggtgaggcatcaaatagagcttttttcccctctgttaagattaagacaaatgttaacgtgctgatgttttattcaagatctggttgccatatgttcccgtgatgatccctgcttctctattgttatagttctt

SEQ ID NO: 62545 - DNA, 1315 bp, Zea Mays
cttgatttccttggaaatttcatccaccgccagcattactattacgtggccaaaatccctgaagcggcatgtcttactcccacacgtccttatcttcctctagacttatccccatcgtttctagcttctagtttatccgttgtcggcattatcttttcatggacgcacgtctccatgttgcctgtcggccttatctccatccctcatcacctctgcgagcacaagttttagcgcctgccctcagtccagctcgccagcagctctctgccctcctccctcaagccctagccgagtttttccatggtgccctgaatgccagcccctttactcgatgcccctgctaggttccatggccgtcgctgtcccagccatctccttggtggccgacctcgcccctgcaacctcgcctcgctggatctcctcagggcgccgggatgctgcttcctacacgtcgtgcggctccctggtgcttgctctcgcccttggctatggaacagcaacagccatagagcctcttcgtgtcgcgccctcgacgtgctcgacgtaatgtcgcagcaggttacacttgatctgtgcactccggtcacgatgtcgtcgaatcccaaaacacctgaggcagttgggtggagaagaataaagaaagctctcgcgcatcacacacctagcgctcgacggaatgattgagtttgaatcgtcgccgttttccgttatttggtttagtatggtacgttcattgatctcgtaatgtggaggacaacaactggaatgatctcaaggtgatgctgatggacgaagctaaagtggatgaatcaaacaagcaccaggatgagagatgctcaccaagtggtcatcatctaaccacactaacctagtgttatcccaggcaagccccggtgcatttgccaccccttgttgttataaaacttttatcacttatatgttgcattaggtgataggagttgtgtgaataaacaattgatgcattaccatttccttggaatttgattactattccttgattcctgtttataaaagagaactaaagatgcttagtcctgcttagataattaaaaggttgttctttttaataaagatgatgtgttacacgggatatgggaaatttttgtgaaaaagaaattgggatggtgaatccatatggccatgatggattcaacatccagaaaaagtacctctgtcaggtaccaaggattgggaaatggtttaactaaaatgagaccagacgttgagcaagaaaggtcgcccgtctgtgtcgattaaggaccgttccgattgttggcctgctgatctaggaccc

SEQ ID NO: 62546 - DNA, 1300 bp, Zea Mays
cttgatttccttggaaatttcatccaccgccagcattactattacgtggccaaaatccctgaagcggcatgtcttactcccacacgtccttatcttcctctagacttatccccatcgtttctagcttctagtttatccgttgtcggcattatcttttcatggacgcacgtctccatgttgcctgtcggccttatctccatccctcatcacctctgcgagcacaagttttagcgcctgccctcagtccagctcgccagcagctctctgccctcctccctcaagccctagccgagtttttccatggtgccctgaatgccagcccctttactcgatgcccctgctaggttccatggccgtcgctgtcccagccatctccttggtggccgacctcgcccctgcaacctcgcctcgctggatctcctcagggcgccgggatgctgcttcctacacgtcgtgcggctccctggtgcttgctctcgcccttggctatggaacagcaacagccatagagcctcttcgtgtcgcgccctcgacgtgctcgacgtaatgtcgcagcaggttacacttgatctgtgcactccggtcacgatgtcgtcgaatcccattgggtggagaagaataaagaaagctctcgcgcatcacacacctagcgctcgacggaatgattgagtttgaatcgtcgccgttttccgttatttggtttagtatggtacgttcattgatctcgtaatgtggaggacaacaactggaatgatctcaaggtgatgctgatggacgaagctaaagtggatgaatcaaacaagcaccaggatgagagatgctcaccaagtggtcatcatctaaccacactaacctagtgttatcccaggcaagccccggtgcatttgccaccccttgttgttataaaacttttatcacttatatgttgcattaggtgataggagttgtgtgaataaacaattgatgcattaccatttccttggaatttgattactattccttgattcctgtttataaaagagaactaaagatgcttagtcctgcttagataattaaaaggttgttctttttaataaagatgatgtgttacacgggatatgggaaatttttgtgaaaaagaaattgggatggtgaatccatatggccatgatggattcaacatccagaaaaagtacctctgtcaggtaccaaggattgggaaatggtttaactaaaatgagaccagacgttgagcaagaaaggtcgcccgtctgtgtcgattaaggaccgttccgattgttggcctgctgatctaggaccc

SEQ ID NO: 62547 - DNA, 482 bp, Zea Mays
cgccgcaaccatgccgtgacaacattagaagtttgacggggtcgctgcactcgcgcccatattccacagttgttcggtggacaaggaggagttagggtcattcaacaacgattgaggatcgaacgcaggcacacactcgggtgtgagcgtcaccaggggccaatgaattgttcgccggagattgcagagcaccaccgagcctttttgctcgtggacggagcacgtcgcatcacgatcgtggacgtgcaagtaattgaggaacccggaactcaacagggggaaaactctgagcagaagttcgttgaaggtgaagagcaggtggccctagaggaagattactacgaagagttcgacgaggtctaggagtcatctcttaatcgacttgatggcgtcaaggaaataatattagtttgctttatttattatcagttattttgtaagacattctcgttatgtaataaagtttatgacatttatctcta

SEQ ID NO: 62548 - DNA, 1431 bp, Zea Mays
ctttctctctctaccgcccacctctctccacctcctctccccaagccgcgccaccaggagttcagcagccgccagaagctgccatccagcccctgccccgcacctgcgcacccgccgaaccgcccggccaccccgagcccccacccgacctagccgcgtagcccctgtcggcgtgcaagtctgaccccgaccggcttgccctttccccgcccaagggtacacggtcgccgccacctgccctaagccgcagaagggagcgttcgccgcccgggtgctgtctcaacagaggcacaggtggacgggcaggttcgaggcgcattctctgggacaagcactgcctagccgcgctccacaacaagaagaaaggcaggcaaggtgtgtactgtgagctgctacttctttccaagtatcatcatcatcaagaatccatccatccgttttcatcctgttcggtattctctcccaaaagaggaacaaaccggtcttaaatcttaataagaggattaagcagcaatggtagtactacgaccataaacaaaacccaatactaggaacccaactgaggtcctttgtgtcctatgcaaggatgctgaattcctgatgcatctgcccagtaccacagtacagcgatccctttttttctctttgaaagtgcgccgaatttctttaaggctgacataatgatcatgctttgtttatctccttttttttcttcaatctttggcgatggtggtccccttggcgccggtgatctgcatgtgcctgtgatctactgctggctgcatcacctcaatagtctacctgggtaagtcccactcccacagcaagccctctgctctcgaatatatctcttggtgttggatgcaacgtgctattttccatttcttaatgattactaggttgatgttggatcaagttccactgacaattttttgagagtaaaggaaagaaaatattggacggcactgatgttaccctgtaaccgtacaatttattatccattttttttgccttttcacatcattgataatggctaagatgctttaatgttatgttccaggtctcatttatagattcttgggtattatcattgagtcctatgagacgagcatttctcaaggcgatgaggaaatctaacaatcattaattaaggtaggtgtactcttgaactgcagatacatatatctggttgatggcctgggaagaataagatggcaaagctctggatctgcaacacaagaagaactgtcgtcactaatagcgtgtacctccattttgttagatgaaaaatgagatggggtggctgatctttgctattttgtaacttttggtacaagatattttgtgaatgatcatctctggagcttttgtgaatgatctagctagctataagtaaatggtctaattgtgaatgatattataattgtgatg

SEQ ID NO: 62549 - DNA, 2369 bp, Zea Mays
gtgttttctccaagcattgtgttgattgagacgaagaaacaagcaactcatgtagcatgatggagaccaaattggttgaaaacgaggcagcaatgtcgatgctaagggaaaactatgagaaaagaatattggatgaacaagtaaaactgaagaaagaagctagaaagtttcaggaggaggaagccttcctgcaagatcagttggcttcatctagaagaaccgtaacatctttaactgaggaagttcaaagggagaaggagctagtagagcagcttaaccttgagatagatcgacttaagagcagtattgcagaagcagaggaagacaaacatttgtctgaaggcaaattgaaggaaaatatggaagtgcttgatattttgtatggcaaggtaaatctgcttagccaagaggtaaatggcaaggacgaacacatcagggagctgagctcatcactttctgccaaggaaaaggactacgagaacctaaatgtgatctgcaatcaagccaaagaggacctagagcaggcaaattcccaaataaagcaagtggagaaagatgttcgtacagctaaagatgatctcaaatcgaaggcgtcacttattaactcactgaatgagaaagttcaaacattatacactgaaaagggtgaagtggaagaaaaactaagtgctctagtgagtcagtatacatacctgaaatctgcttctgaagagagggcttctcacgattctgaactattagttcagaaagatgatatgctcaatcagcttgaagaaaaactttctgctgcattaagtgactctagcaaagacagaactcgaattgccgagttgaacaatgaattggtcaccaccagaacaatactagataatgaagttgttgccaataaaaaattgtcagaccttgttcagttcactgaagaggcactaacaggttccagaaatgaggtgtttaaactctctgaagagcttgacgcagtaaagagatcaaatcaggatttgatgactcagatttcaaaactaacagatgaggccagtgaagtgaggcaggctctggctaacaaaatagagcaggcagagtcagtttatgcaactctttcagatgagctggcgtctgtaagggaagtacttaaaaagtcagaaggagaactcgagatcacctcgaagcagttagttttggtttcagaagcacatagtgaccttaataaagaattgctggatgcatataagcagttagagtccacgcaaagtgagctagtgaaagagcgtaaaatcaatgctactcttaacatggagcttgaggctttggtgaaacaatcagtgatagagtccgaagcaagaaaaactcttcaagtcgacttggatgaggccactagatcactaaatgaggtgaataagagtacactctgtctgtctaagcagctggaaacaactaattccaagatttctgctattaaagaggagaaagatatgctgtcaaagttccttgaggaacaaaagaaaagtacggttgaagctcaggaaaacatggaggatgctcagaataccataaaaaggcttgggactgagagggagagttttgaagtaaggtctaagaaacttgaagaagagttggccacagcgaaaggtgagatattgcgtttgaggagacatattagtacaggtgggtctccgaacacccaagttctttcggaagcaggtgcagcgccaattagcagtcgagcactgaaacagcaacccatgaatgatcatgttcaaaatatcaatggtgctgatgctgtagcgtcacgttcgcctaaacggatttataggaggaaacgcaaaccagcagcataaggattatctgaatgccaaggggctagtttgggaactccatttttccaaggatttttaatttctcaaggaaaaatgaactaatttctcttgaaaaaaaaattccttgaaaaaatagggttcacaaactagccttaaaagcaaaagctggcgttctttttattcctctattattcaccttgttataacatcttgtgaactcccattcttcgaaaggtagacctccttacagtattatcttcggtggtgctggctcttccgcgcatccctactgaaaccgagaaccttatgtagtcacatacggtttgatgggatttagaatccatgttaccgtgtgacctgtgtacacctttaactgagttggttagatgatctaagtagcattaatgggtacaaaacaatttttttgaggatcgactcagccgaaactgctttggccgtttcttaaaaccggccaggctggagtagtgaaatttcaactttctcattgtattcgttttgtcaaattgattgaaaaaaccatctcgtttggagttc

SEQ ID NO: 62550 - DNA, 2286 bp, Zea Mays
ctgctctcttctgctgcctctccagtttttgattcgctgcacgccaaaacgagcgcaagagagatataggggagaaatgcaaacgcagcggcgggggcagtgacacagtggcattttactgcgcctgcgcctgtgcgcctgcgcctgtgcgcccaccagtcacaaggcccatatcctcctccgctccttcctctccgtctctcccctccagcattgcggtggagagggaagcaagaggtatcggagatagagagagaaagggcgaaaaacagaagggaacagcaacggagcagctgatcaggggctgacgcgcgcgacaatgctgctcaagagggtggcggcggacgacggctccggcgccggcgccggcgccggcgtagggaggccacggctcttcgccatgccaaggctgctggtcgggctcgaggcgcccaggtgcggcgcaccagactgcgactcgccgatgacggcgcgcagcccgacgtcgccgctcgatctcaggcccttcgcctcgctgctccgctcgccgcgctcacccagaaccaggagctgggattcgcaccgccttggcctcggcggcctcgtcgacgacacgctcgccgaacccgtcgcatgcgccaggagccgcctgctcggcctcgggccccaagcgcggcagccgttcaagctgccgcaacgcctcgccaagcccctggccacccagccgagggactgctcccacgcatcctcggagctcgggaatgtggggaccgctgccggctgcaagccgctgccgtgcagcaggtcctacggggatgtgaagtctggtccagaggtcaccgtgcccggcggcgctccgcccggcgcgagcagccaccctgccgatgttggcaagttccccgcgccggggtccctgccggtgtccatcggcggcccgcgctggtacatcgggtccgtgtccgcgacggaggtggagcagtccgaggactacacctgcatcatcgcgcacggtcctaacccgaagaccactcgcatcttcggggactgcatcttggagccctgcactcctagtgtgtctgacggtgacggcatggatgccatggaagtcaaggaaggagcagagtcctactggttggtcaagtgcttcgatgccagcgagcctggagagttcttagactcctgcatctcttgctagaagaagctggatggcaatgacccctgcgtttatcgtggtgtgagggcattctgccgtgggaactggaggaatcaggaagtccttgctgagcaggaagacaacattccagctgtgtccttcagctcggctggctcatcatcttccttcaacgatgaagtagtcatggctgaaatggttgtggtggctgcaccagttgacgtccactaccctgaatctggcaaaccagggtagctgatcaataatgtcaattgtcgcagttttcatcttcgccgccatcattattttgctggttttgtaagttaagttccagcatttggtagcattgatcattttatgagaattgaggctccatctagaatttgctgagatgtgatctctcagcctttagaacggagagcttccatgccttaagcattgtaattttgaaccgaggctattggcaatgcaggttccccaattttcatcctctcttttttggtttgttcctcagtggcaatgacgatatctgcatgctgtaagttgcagcaacatcttttgataatgccattgagctgtgttgtgaaatctaccgcttctgctctcgaggaatggtgattactagggacactggcacgatgatagattgacagacagttagaaatcttggtgttacacttagagatgtcagtgtttacgcagtctaaattttgcaatgatctgacgcggagcaatgatgcagggcaggagcagacacaggtactatcaatggttgatcgctattgataatttattgtctgtttgctacaggttgcactgtgtgtgaggttggatcatttggattcatatgttcgtggagacatgtgatcgacaagaattcggtggcagaaacttcagtttggcagattatgtagagcataattttgattcattcttaggccttttttgtttgtgccagattggtgggttggaacgattactaaccagattgtttctctaatttatataaactttgattagctggaacgattctgggtgcaatccgacagaaatgaacaaggccttagacaatcacatcactgacatatttggtcacttgttttcatttactgtataaaataaaaaacaagacaata

SEQ ID NO: 62551 - DNA, 1919 bp, Zea Mays
gacaagctctatgctcataaattagtgaaatgggtgtttagtggagtagcagatatgtatacttgtgactactagctaccttcctagttaatgatgggtttcctttctcagttgcgttgtcatggaaacaagaatcccagaacagtgcaccccaacagacccttgtattcccaaaggggaatgcaattccgagcattaaatctctaacgttctataaattgagtacatttgaagttgatgttttgtatgtgggtacaggcgactcgcaaattccacaaaagataagcacttacacgattggccctttccaaccctccaaatgtgagaagaccaagctgaaagttaaagtgtgtctcagcatccatggcattgtcacagtggattcagcaatgatgctggaggaggatgtggaagttccagtctcatctgctaatgaagctctaaaggatactacaaagatggacacggatgatgcaccaagtgatcatgtttctggaactgatgcgaatatgcatgagcatagaagtgctgacactactgaggctcctgctgaaaatggagcacaagattctgaggaaaaatctgttccaatggaaactgatgcaaaggttgagccatcgaaaaggaaaattaagaaaacttctgttccgatccatgagttggtctacggcgcattgtctgccactgacctgcagaaggctgtagagaaagagtatgagatggctctgcaggacagagtaatggaagagaccaaagaaaagaaaaatgctgtggaagcttatgtctatgacatgcgtaacaagctgtacgacaagtataacgattttgtcacacccgaggagaaggaagggttgattgcaaagcttcaggaggttgaagattggctgtatgaagatggtgaggatgagacaaagggagtatatatttctaaactggaagagcttaaaaagattggcgatccaattgaggcacggcacaaggagtggacggaaaggggttcctctgtagatcaactggtgtattgtatcaatagtttcagagaggctgcatcgtccagtgaccagaagtttgaccatatcgacatatctgagaaacagaaggtcatcaatgaatgctctgaagcagagaactggttaagagagaggaaacagcagcaggatgccctaccgaagcatgctaatcctgtgctgctcgtatcggatctgaagaagaaagctgaaacacttgaccggttctgcaaaccgatcatgacaaaaccaaagccggctccaaagccacagactccgccaccacaacctgaaacccaagcatctgagcctcaaacaccagagcaacaacaaagccggtctggcggaactggtgagccgaggagtgagggaggtgtgcagcaggcctccggtgagcaaatggacatggacaatcctgaatctgctgatgctgccgcataagtttggttgccatctctatcttatgatcgatcaaaattttctgttagtgtctggtaggtggatgagttaaggcgacactagcattctcacaagcgatttcgttttaggcagttggattgaggtatatgcatcttgtccagcgttgtttagaaaaaaagttaggcaaaatatagcaagttttacataaacgttacatgatcgaaatgcaccatcggctataatcggatgtcgtggatgattcggtcaattataatttgcacttagattccttgagttaggctgcgtcacagctcaggtcatacatgtttctttgaagactacatgttctcgacagaacggaaagctattggtttttgtgcggatagaatttaagccttttttacgtggtgcacgttgtgaagtaattgctttgagtctcttgtgagctggtttaaccgtttatgttatcctttatctttgcctatgtacgag

SEQ ID NO: 62552 - DNA, 928 bp, Zea Mays
ctcagatgtggccctagatccaccttcctccctgacctcctcgccaccgctgctcgcccctctcctagctcctcctagtcctagatccatctaaatcgtcggtggcaaccagtagcagtagccccactcgctcctcgttgtggcgtctttcccctcctcttcgtgctctaccttctcgtcgccgcacacactcctccgatctagcccgtagctatcgtgtgtttgcagttcacggcgtcccgccgcgccgctccctcctccccacattgcccgtggcctttccctcccatcgccatcgtcgcatgtgttggagcgctccaccggcctgccacgttctagccagcatcggagcaccccctatcttgcctggatgccctgacgcggcgacgcctagcgcaatgcccatctccagcaagccagcagtcgaccacgacccgatcccagcaagcggcagccgcatcacgtagcagtccagtgtccccgccttgctccagcaccagcaagcagctactgcgtccggtcaggtggccaacacctgtctacaggaaaaagaatattgaagttttttaggagttgaaatcaattcatcgatttccagacaaagactcggcctaatacaaacaataattatttacttgcctaggtcaggtattaaataaaccaacaactattccatttcatgcacttctatcagattagtttcattgtttgaatgataattttgtgtaccaattttaaagatcgaggacctcgggtgcgctcagaagctgttcgacggaatgtcgatattcagaacctctagctcaaactagcggaacacataatttgtgtttatttggcttaaagtttgtaggcgaagttagttacatagcattttgcaggacatgtacagttcaaatcataaatccatatatattgtttttagcac

SEQ ID NO: 62553 - DNA, 2662 bp, Zea Mays
ataaaagttgatgaccgccgagccctcgaagtgtccaagaagtacacaactgcgcaagcactccacttcaagctcccaccttcaccggggcaccatcggtggcggactggcggtggggcacacaaaccgttcctcccgtgctcgtcatctcccttgtctcttcatcgttccttccgtcagcccgcacatctcacctgcgcgcgcgccatgggacctgcgtgcaaaaccgcagcgcggccgcgcgtgctgctgctgtgcagcccgtgcatggggcacctcatccccttcgcggagctcgcgcggcgcctcgtggccgaccacggcctctccaccacgctcctcttcgcctcggctacatccccgccctcggagcagtacctcgcggtggccgccgccgtccccgacgccgtcgacctcatcgcgctgccggcaccgccgccagacgcgctgcctcccgccacggccgcgcgcgagcgcgcggagctcgccgtcgcctccaacgtgccacgcgtccgggagatcgcgcgggagctgggcgcggcggcgccgctcgtcgcgctcgtggtggacatggtcggcgcggcggcggcgcgcgacgtggcggcggagctgggcgtcccgttctacgccttcttcacgtccccgtggatgacgctttcgctgctcctccgcctccccgagatcgacgcagcccgcgccggggagcaccgggacgccgcggagccgatccggctccccggctgcgtgccgatccacgcccacgagctgccgacgtccatgctcgccgaccggagcagcagcgcgtacgccgggttcttgtccatggccaagggcgtcgcgggagtcgatggcgtccttgtgaacacgtttcgtgaactggagcccgcggtgggcggcgacggtcgtctgcagctgccggtgtacccggttgggccattggtttggaccaggccggccggcgtggacacggaccacgagtgcatgagctggctggacgggcagccacgtggctccgtggcgtatgtgtcgttcggcagtggcggcacgattacatggcagcagacggctgagctggcgctggggctggagcttagccagtgtaggttcatctgggctatcaagaggccacaccagagctcaacaatcgcggcgttcttcgggactcaaagaggcgatgagcacagccccttggattttttacctgaagggttcatggagaggactagagggatggggttggtggcccagtcttgggcgccacaaacagctatacttggccacccttccattgggtgcttcgtcacgcattgcgggtggaactcggtcctagagagtgtgatcaacggtgttcctatggttgcttggccactctacgccgagcagaacatgaatgctgcgatgatggaggtccaggttggtgtggcattgcgggctaaggtcggagctgatcgatttataaggaaggacgaagttgcgaatgcgattcgacgtgcgattgtaggggaggaagctgaaaggctgaggaagcgatcaagcgagcttagacgccaatcagcgcaagctctgagcaaggatggttgttctactcgtgctctagcacaaattgcaaatgcatggaaatgcgctagcagaaaatgaagaaaactcggcgttatgtttgcagctctatcaattatcgatggtaattttgtgctagatgacgtatttattgaatatgtctatttgtcacctagaacgataaaccaataatttatcatatgaatatgactaagtttggatttccttccttggggacgagcttggaccgcgatcagcccaaggaaggagagcaaggcgccagtgtggaaggacagtaactttccggtctcaagcctcacattcgagctcgagctcgcccattgctcgttcccaagtgcctatccccatccggcttcatgtagggccactctcttccctggattggctgctgtcgccgccgccggcggccagtcttagcaccagcagggacctcgtctcctgcagccgccatctgggctgctcgccatcaccatgtcatcgtcaagggtcctcccgcttcagaccatgttgcaaatattgtcggatgatgttacaaggagcaagtcacagaggtccttcgcctttaagaggtgggctcggggcaggtgttatcgttgcctcgctcacgaccaccaaatcaactcatgcaagaactccttctgttgcatccgttgtcgctgccccggtcatcgggagcggcattatcgctttcggtcttcctcttcctgtccatcgagttaactgctccgtgcaatgtgaccatcctcaacaaacgagtacttgtgctaaggacaccagtgcaaacgccacagcctttgtccttggcgagaagcccacaaggatatctggtacaaagattcatagagagacgaaccttagcactaatgaggcggtcgcagggacatttgaagcagattctcgccaaatgatgtccaccgagcagaccattgaggtgccttcggataccttcacattgcttcaggctataacctctgttgaagatgttgttttggtggaggatgcatcatatgatgaggaagctactttggttatgcaaactacttttgatggccccatctttattaccaccatcgactatggttaa

SEQ ID NO: 62554 - DNA, 1301 bp, Zea Mays
gtgctcgtgtgtgagctggtgaggcgggatcggggcgtggcggccttagatctacgggaatggggttgcttgccgcgtgaatcagtcggtgaggatccagttgggtgagggctctgctggtcaggtcacaaggaacatgcttgcaaatgagggtgtccgttctttctacaagggtttgtccgccggattgctgaggcaagcgacgtacacgactgctcgtcttggatcctttagggttctaactaacaaagcagttgaaaagaatgaagggaagccattgcctctatttcagaaagcttttattggtctgactgctggtgcaattggtgcttgtgttggtagtcctgctgatctggcactcattagaatgcaagccgattcgaccctgccagttgcacaacgacgcaactataagaatgctttccatgcactctaccgtatcagtggtgatgagggagtccttgcgctttggaagggtgcaggtccaactgtggtgagagctatggcactcaatatgggtatgcttgcttcctatgaccagagtgtcgagctatttagggacaaatttggcgcaggagaaatttctactgttgttggagccagcgctgtttctggattctttgcctcagcatgcagtttgccctttgactatgtgaagacacagattcagaagatgcaacctgatgcgaatggcaagtacccatacacagggtctttggactgtgctgtgaagaccttcaagagcggtggcccattcaagttctacactggtttcccggtgtactgcgtcaggattgcaccccatgtcatgatgacctggatattcttgaatcagatccagaagtttgagaagaagatcggcatataggattcccatcggacggatacagggttgacagttctatgctattactgcttgactctgtaataacattccagctgctttcgcaccatggtagttggttttggtagagacaagtctgttacaattttttaccttagctttccaattattgtgttgcaataatcgaattaattgttgctgggggatttttttggggggttgggagggtggcatgcttttgttggctgggatgtagccataaggagagggggatactgcctagttatgtcattgaatggaattggaccatattttatacagatttttaccttcagttcttttaaacttattacatttgggactttttttttgtaatggaaacgatgggaattgatctactgtgagattatgttctcggcctgctcgagattgtacctgataaggtaacggtgtgaca

SEQ ID NO: 62555 - DNA, 2431 bp, Zea Mays
cgctatccaccccactgctggctgtccctgccctcgggttccacgcagaggaagtgaatcacccattgcacttttccgcgcggaggaaggtgaatcactcattccactcccaaacctcccgaaaaccctcgtcgtcttcctcccaaatcactcactcgcttgatctctcctctccgaacccggcaacccctagaactagggttccagcgacccaatgacggacggcagcgacgagtacaagcgcgacgagtcggtgatcctgctggtcatcgtctccctcgccgcgctctcgctcctatccctcatcgccgccttcgcctactactgctacattacgcgcaaggtctcccgccgccttcagtcactccatctccccaaacgttccagctctcctcctcctcctcctcctccccgggctctgccgccgccgcaacagcaggggaaggacagcccgttcagcagctccgccagcgatggggccgctgcggcggcggcggcgatgtcggttgtggttgctggggagaggggcgtgcaggtgttcagctaccgtcagctccacgcggccatgggcgggttcggccgggcgcacatggttgggcagggcagcttcgggaccgtgtaccgcggggtgctccccgacgggaggaaggtcgcggtcaagctcatggaccgcccagggaagcagggcgaagaggagttcgagatggaggtggagttgctgagtaggctccgatcgccgtatttattgggccttattggccattgttcagaaggtgggcaccgtctactggtatacgagttcatggccaatgggggtctacatgagcatctctacccaaccagaggttcctgtggtggaatctcaaaattggactgggacacaagaatgagaattgcacttgaggcagccaaaggtttggaatatcttcatgagcgtgttaatccacctgttatacatagagacttcaagagtagcaatattctcctggacaaggacttccatgcaagagtttcagactttggtctagccaaacttggatctgatagagctggtggccatgtctcaactcgagttttgggcacacaaggctatgttgcaccagaatacgcattgactgggcatttgactaccaaatcagatgtgtacagctacggtgttgtgcttttggaattacttactggcagagtaccagttgatatgaagaggcctcctggagaaggtgttttagtaaactgggcattgcctatgctcactgaccgagaaaaagttgtgcggatcttggatccagcattggaaggtcaatactccttgaaagatgctgtccaagtggctgctattgctgccatgtgtgttcaaccagaggctgactacaggccattaatggctgatgttgtccaatcgctggttccacttgtcaagaaccgttctaatcagaaagcttgcaaccccaacgtgcaatcgtccaagccacttgactaggaaagcgtgtgttcgatctgcagtttgtgctcgtctttctggaacccttctcgtctataactaactatggctgagacagatattcacaagctcctaaactatgattttgtctgcgggtgctcttctgattttgtaggtccgtctgagcaggtaggttgtctgaacggtcctgagagcttatttgggtttgaagggaagtttctgtcatgtacaattagctgcccgcggtgatggtgggttgttggattagtacttgtggttgtgtggagttcgtcatcagatgaaaatggagcatattgcaacaaaaaaggtgaaaaaaagtctgaaacaagaggacatcacaaattcacaatgttgttcagtttaccaggactcatgtgttcagacaccaaacgttcatgacagacatgtttggacatgattaatgtggttgatgactttgaagccaaatggttgttggttgatggtgaattaccgaaccacatttcttggtgttcccgcaagtgtcctcaggcgcttcaacaaatggttgctccgttgtaaggaccagcgagcaatggataaggaatagaacaatcgttccaacaaatggctagcaagaccagtgaagcacggtgtggcgggcttggctggcggaaggggaagcattcaaaggagagatgtcgtccgtacctacctccttttcgtattcggtgcagccacaagggctcgtgaattccatgctctattaaattggaaaaattccttttcatctaagtagaaggatcctgtattttttactagaaattctgttctcttgaagggctagtttgggaacctaatttttccaaaggatttctatttttccaagagaaattagttcattttccattagaaaaatataaatctcttgaaaaatggtattctcaaactagcccgaaaagtttttatttggggaaaaccaaaataaaa

SEQ ID NO: 62556 - DNA, 2105 bp, Zea Mays
cgctatccaccccactgctggctgtccctgccctcgggttccacgcagaggaagtgaatcacccattgcacttttccgcgcggaggaaggtggagttgctgagtaggctccgatcgccgtatttattgggccttattggccattgttcagaaggtgggcaccgtctactggtatacgagttcatggccaatgggggtctacatgagcatctctacccaaccagaggttcctgtggtggaatctcaaaattggactgggacacaagaatgagaattgcacttgaggcagccaaaggtttggaatatcttcatgagcgtgttaatccacctgttatacatagagacttcaagagtagcaatattctcctggacaaggacttccatgcaagagtttcagactttggtctagccaaacttggatctgatagagctggtggccatgtctcaactcgagttttgggcacacaaggctatgttgcaccagaatacgcattgactgggcatttgactaccaaatcagatgtgtacagctacggtgttgtgcttttggaattacttactggcagagtaccagttgatatgaagaggcctcctggagaaggtgttttagtaaactgggcattgcctatgctcactgaccgagaaaaagttgtgcggatcttggatccagcattggaaggtcaatactccttgaaagatgctgtccaagtggctgctattgctgccatgtgtgttcaaccagaggctgactacaggccattaatggctgatgttgtccaatcgctggttccacttgtcaagaaccgttctaatcagaaagcttgcaaccccaacgtgcaatcgtccaagccacttgactaggaaagcgtgtgttcgatctgcagtttgtgctcgtctttctggaacccttctcgtctataactaactatggctgagacagatattcacaagctcctaaactatgattttgtctgcgggtgctcttctgattttgtaggtccgtctgagcaggtaggttgtctgaacggtcctgagagcttatttgggtttgaagggaagtttctgtcatgtacaattagctgcccgcggtgatggtgggttgttggattagtacttgtggttgtgtggagttcgtcatcagatggtaggtttggtatgagctggcagaactgtttgtagagtactgcactaatttccttttggcttatttatgttagggaagcagctttagaagatcattgtgcgcttgtacagaggtcttaactgttaagctgctaagtgttatgtatccttgccagtagtgagtgttatccttgtattgtagtattactaatgtatagcacgtttctggattggttctgacttcattgttgtttgagcaacgtaccttctttttaccatgttttgttgatttttgttaaactttcaactgattcagaaaatggagcatattgcaacaaaaaaggtgaaaaaaagtctgaaacaagaggacatcacaaattcacaatgttgttcagtttaccaggactcatgtgttcagacaccaaacgttcatgacagacatgtttggacatgattaatgtggttgatgactttgaagccaaatggttgttggttgatggtgaattaccgaaccacatttcttggtgttcccgcaagtgtcctcaggcgcttcaacaaatggttgctccgttgtaaggaccagcgagcaatggataaggaatagaacaatcgttccaacaaatggctagcaagaccagtgaagcacggtgtggcgggcttggctggcggaaggggaagcattcaaaggagagatgtcgtccgtacctacctccttttcgtattcggtgcagccacaagggctcgtgaattccatgctctattaaattggaaaaattccttttcatctaagtagaaggatcctgtattttttactagaaattctgttctcttgaagggctagtttgggaacctaatttttccaaaggatttctatttttccaagagaaattagttcattttccattagaaaaatataaatctcttgaaaaatggtattctcaaactagcccgaaaagtttttatttggggaaaaccaaaataaaa

SEQ ID NO: 62557 - DNA, 1621 bp, Zea Mays
caccagcgtggtagagtctgctcaacaccaaacttcgacgactgcgccggccgtcggccgtcgctgccgccctattttgaccccatcgccggcgacgataatcgccagctgaaggacaataactatcatggatgctactgcaaattcagatgtgcaaagggctgaggaatttaaacttaaggcgaatgatgccttcaaggcaaacaagttctcgcaggctatagagctttacagtcaagccattgagctgaatagttcaaatgcagtttactgggcaaaccgtgcatttgcacacacaaaattagaggaatacggaagtgctgtgcaggatgctacaaaagccatcgaaattgattctagatattcaaaaggttattatagacgaggcgcagcttatcttgccatgggaaagttcaaggaagccctgaaggattttcagcaggttaaaaaaatctgcccaaatgatccagatgctacaagaaagttgaaagagtgcgagaaagctgtccaaaagatccgttttgaagaagcaatatctgctggggatgatgagaggcggtccgtggcagactctattgactaccatatcatagaagtagagccacattatgcgggaccgagaattgatggggaagaaataacgatagagtttgtcaaagcaatgttggatgaatttaagaagcagaaatgcatacataaaagatatgcttaccagattgtgctaaaaaccttggatttgctgcgatcgatgccttcccttgttgatgtggatgttccaaacggtggacattttacagtttgcggtgatgtgcatggccagtactttgatttgctcaacatatttgacctcaatggccttccatcagaagaaaatccttacctcttcaatggcgattttgtggaccgaggatctttctccgttgaagtcatactcaccctttttgctttcaagtgcctctacccaaaagctatgtaccttgcaagaggaaatcatgaaagcaagagcatgaacaaaatatatggctttgagggggaagtgaggtcaaagctgggtgagaagtttgttgaactttttgctgaagtcttttgttggttacctcttgcccatgtcatcaacaacaaggtctttgtggttcatggagggctatttagtgttgatggggttaagctttcagacattaggtccattgatcgtttttgtgaaccacctgaagaaggtctaatgtgtgaattactatggagtgaccctcagcctcagcttggaagaggtccaagtaaacgtggtgttgctctttcctttggcgcagatgtgactaagaagtttttacaggaaaataacctggatcttattgtccggtctcatgaagtaaaggatgaaggccatgaaattgaacatgatggaaagcttataacagtcttctctgcgcctaattactgtgaccagatgggcaacaagggtgcatttattcgcttcacagctccagaaatgaaaccagatattgttactttctcagctgtgcgatccctctcacgcatgagtttgcatagcatttatggaccacaatagtttgctccctctttaaacatgaatactaggttcaatggatcaattaaatctctg

SEQ ID NO: 62558 - DNA, 932 bp, Zea Mays
ctaaactggatttaattcctgggcgaggtctaatgtgtgaattactatggagtgaccctcagcctcagcttggaagaggtccaagtaaacgtggtgttgctctttcctttggcgcagatgtgactaagaagtttttacaggaaaataacctggatcttattgtccggtctcatgaagtaaaggatgaaggccatgaaattgaacatgatggaaagcttataacagtcttctctgcgcctaattactgtgaccagatgggcaacaagggtgcatttattcgcttcacagctccagaaatgaaaccagatattgttactttctcagctgtgccacatcctgatgtgaagccgatggcatatgcaaataacttcctcaggatgtttcaatgacggaatataacaacattgtttagcaatttttatcagatgagtctgttgtgtgtcagctcccaaatcacatttcttggctaggtttaagtatatgctcccttgtacaacaaatcaaatgatgcaagggattcaactgtcgatttacttggatggtacatccatttttgtgcacgagttgtgattcttgtaactatccgtaaagtcttagatcattagattttagtttacttgtaaaattgctaaatcgtcatttcctgtcttgcttatcagtgagttacacacgtttagtgcttttatcaaattacatgtgtttcagcggtacaattcctaatatctgagtaatccttccattttaacccacaatgttcttacatagtttggtatcactggtcattattctggtcatgtctgaaattgtgaactaggatcgactgtgtaaatgacatgcgtagatgctgtaaatgttcagactgcaattttctccgttttgtcgcctgttggcgtaggcttgtggtgcaggcctctggttgaggtagggtctgg

SEQ ID NO: 62559 - DNA, 2191 bp, Zea Mays
cttaagctcacgccggccctgtaggcctgtactatacctgtacgcttcaagcaaaaccctacctgatcccaccagcgtggtagagtctgctcaacaccaaacttcgacgactgcgccggccgtcggccgtcgctgccgccctattttgaccccatcgccggcgacgataatcgccagctgaaggacaataactatcatggatgctactgcaaattcagatgtgcaaagggctgaggaatttaaacttaaggcgaatgatgccttcaaggcaaacaagttctcgcaggctatagagctttacagtcaagccattgagctgaatagttcaaatgcagtttactgggcaaaccgtgcatttgcacacacaaaattagaggaatacggaagtgctgtgcaggatgctacaaaagccatcgaaattgattctagatattcaaaaggttattatagacgaggcgcagcttatcttgccatgggaaagttcaaggaagccctgaaggattttcagcaggttaaaaaaatctgcccaaatgatccagatgctacaagaaagttgaaagagtgcgagaaagctgtccaaaagatccgttttgaagaagcaatatctgctggggatgatgagaggcggtccgtggcagactctattgactaccatatcatagaagtagagccacattatgcgggaccgagaattgatggggaagaaataacgatagagtttgtcaaagcaatgttggatgaatttaagaagcagaaatgcatacataaaagatatgcttaccagattgtgctaaaaaccttggatttgctgcgatcgatgccttcccttgttgatgtggatgttccaaacggtggacattttacagtttgcggtgatgtgcatggccagtactttgatttgctcaacatatttgacctcaatggccttccatcagaagaaaatccttacctcttcaatggcgattttgtggaccgaggatctttctccgttgaagtcatactcaccctttttgctttcaagtgcctctacccaaaagctatgtaccttgcaagaggaaatcatgaaagcaagagcatgaacaaaatatatggctttgagggggaagtgaggtcaaagctgggtgagaagtttgttgaactttttgctgaagtcttttgttggttacctcttgcccatgtcatcaacaacaaggtctttgtggttcatggagggctatttagtgttgatggggttaagctttcagacattaggtccattgatcgtttttgtgaaccacctgaagaaggtctaatgtgtgaattactatggagtgaccctcagcctcagcttggaagaggtccaagtaaacgtggtgttgctctttcctttggcgcagatgtgactaagaagtttttacaggaaaataacctggatcttattgtccggtctcatgaagtaaaggatgaaggccatgaaattgaacatgatggaaagcttataacagtcttctctgcgcctaattactgtgaccagatgggcaacaagggtgcatttattcgcttcacagctccagaaatgaaaccagatattgttactttctcagctgtgccacatcctgatgtgaagccgatggcatatgcaaataacttcctcaggatgtttcaatgacggaatataacaacattgtttagcaatttttatcagatgagtctgttgtgtgtcagctcccaaatcacatttcttggctaggtttaagtatatgctcccttgtacaacaaatcaaatgatgcaagggattcaactgtcgatttacttggatggtacatccatttttgtgcacgagttgtgattcttgtaactatccgtaaagtcttagatcattagattttagtttacttgtaaaattgctaaatcgtcatttcctgtcttgcttatcagtgagttacacacgtttagtgcttttatcaaattacatgtgtttcagcggtacaattcctaatatctgagtaatccttccattttaacccacaatgttcttacatagtttggtatcactggtcattattctggtcatgtctgaaattgtgaactaggatcgactgtgtaaatgacatgcgtagatgctgtaaatgttcagactgcaattttctccgttttgtcgcctgttggcgtaggcttgtggtgcaggcctctggttgaggtagggtctgg

SEQ ID NO: 62560 - DNA, 2246 bp, Zea Mays
cttaagctcacgccggccctgtaggcctgtactatacctgtacgcttcaagcaaaaccctacctgatcccaccagcgtggtagagtctgctcaacaccaaacttcgacgactgcgccggccgtcggccgtcgctgccgccctattttgaccccatcgccggcgacgataatcgccagtttgtggataagggtcttttaagtcttcatatgaaactatccttttgatatacagctgaaggacaataactatcatggatgctactgcaaattcagatgtgcaaagggctgaggaatttaaacttaaggcgaatgatgccttcaaggcaaacaagttctcgcaggctatagagctttacagtcaagccattgagctgaatagttcaaatgcagtttactgggcaaaccgtgcatttgcacacacaaaattagaggaatacggaagtgctgtgcaggatgctacaaaagccatcgaaattgattctagatattcaaaaggttattatagacgaggcgcagcttatcttgccatgggaaagttcaaggaagccctgaaggattttcagcaggttaaaaaaatctgcccaaatgatccagatgctacaagaaagttgaaagagtgcgagaaagctgtccaaaagatccgttttgaagaagcaatatctgctggggatgatgagaggcggtccgtggcagactctattgactaccatatcatagaagtagagccacattatgcgggaccgagaattgatggggaagaaataacgatagagtttgtcaaagcaatgttggatgaatttaagaagcagaaatgcatacataaaagatatgcttaccagattgtgctaaaaaccttggatttgctgcgatcgatgccttcccttgttgatgtggatgttccaaacggtggacattttacagtttgcggtgatgtgcatggccagtactttgatttgctcaacatatttgacctcaatggccttccatcagaagaaaatccttacctcttcaatggcgattttgtggaccgaggatctttctccgttgaagtcatactcaccctttttgctttcaagtgcctctacccaaaagctatgtaccttgcaagaggaaatcatgaaagcaagagcatgaacaaaatatatggctttgagggggaagtgaggtcaaagctgggtgagaagtttgttgaactttttgctgaagtcttttgttggttacctcttgcccatgtcatcaacaacaaggtctttgtggttcatggagggctatttagtgttgatggggttaagctttcagacattaggtccattgatcgtttttgtgaaccacctgaagaaggtctaatgtgtgaattactatggagtgaccctcagcctcagcttggaagaggtccaagtaaacgtggtgttgctctttcctttggcgcagatgtgactaagaagtttttacaggaaaataacctggatcttattgtccggtctcatgaagtaaaggatgaaggccatgaaattgaacatgatggaaagcttataacagtcttctctgcgcctaattactgtgaccagatgggcaacaagggtgcatttattcgcttcacagctccagaaatgaaaccagatattgttactttctcagctgtgccacatcctgatgtgaagccgatggcatatgcaaataacttcctcaggatgtttcaatgacggaatataacaacattgtttagcaatttttatcagatgagtctgttgtgtgtcagctcccaaatcacatttcttggctaggtttaagtatatgctcccttgtacaacaaatcaaatgatgcaagggattcaactgtcgatttacttggatggtacatccatttttgtgcacgagttgtgattcttgtaactatccgtaaagtcttagatcattagattttagtttacttgtaaaattgctaaatcgtcatttcctgtcttgcttatcagtgagttacacacgtttagtgcttttatcaaattacatgtgtttcagcggtacaattcctaatatctgagtaatccttccattttaacccacaatgttcttacatagtttggtatcactggtcattattctggtcatgtctgaaattgtgaactaggatcgactgtgtaaatgacatgcgtagatgctgtaaatgttcagactgcaattttctccgttttgtcgcctgttggcgtaggcttgtggtgcaggcctctggttgaggtagggtctgg

SEQ ID NO: 62561 - DNA, 1572 bp, Zea Mays
aaaaccctacctgatcccaccagcgtggtagagtctgctcaacaccaaacttcgacgactgcgccggccgtcggccgtcgctgccgccctattttgaccccatcgccggcgacgataatcgccagctgaaggacaataactatcatggatgctactgcaaattcagatgtgcaaagggctgaggaatttaaacttaaggcgaatgatgccttcaaggcaaacaagttctcgcaggctatagagctttacagtcaagccattgagctgaatagttcaaatgcagtttactgggcaaaccgtgcatttgcacacacaaaattagaggaatacggaagtgctgtgcaggatgctacaaaagccatcgaaattgattctagatattcaaaaggttattatagacgaggcgcagcttatcttgccatgggaaagttcaaggaagccctgaaggattttcagcaggttaaaaaaatctgcccaaatgatccagatgctacaagaaagttgaaagagtgcgagaaagctgtccaaaagatccgttttgaagaagcaatatctgctggggatgatgagaggcggtccgtggcagactctattgactaccatatcatagaagtagagccacattatgcgggaccgagaattgatggggaagaaataacgatagagtttgtcaaagcaatgttggatgaatttaagaagcagaaatgcatacataaaagatatgcttaccagattgtgctaaaaaccttggatttgctgcgatcgatgccttcccttgttgatgtggatgttccaaacggtggacattttacagtttgcggtgatgtgcatggccagtactttgatttgctcaacatatttgacctcaatggccttccatcagaagaaaatccttacctcttcaatggcgattttgtggaccgaggatctttctccgttgaagtcatactcaccctttttgctttcaagtgcctctacccaaaagctatgtaccttgcaagaggaaatcatgaaagcaagagcatgaacaaaatatatggctttgagggggaagtgaggtcaaagctgggtgagaagtttgttgaactttttgctgaagtcttttgttggttacctcttgcccatgtcatcaacaacaaggtctttgtggttcatggagggctatttagtgttgatggggttaagctttcagacattaggtccattgatcgtttttgtgaaccacctgaagaaggtctaatgtgtgaattactatggagtgaccctcagcctcagcttggaagaggtccaagtaaacgtggtgttgctctttcctttggcgcagatgtgactaagaagtttttacaggaaaataacctggatcttattgtccggtctcatgaagtaaaggatgaaggccatgaaattgaacatgatggaaagcttataacagtcttctctgcgcctaattactgtgaccagatgggcaacaagggtgcatttattcgcttcacagctccagaaatgaaaccagatattgttactttctcagctgtgcaactggatatctgattgagggggtttacgcttgct

SEQ ID NO: 62562 - DNA, 1266 bp, Zea Mays
cttcaagcaaaaccctacctgatcccaccagcgtggtagagtctgctcaacaccaaacttcgacgactgcgccggccgtcggccgtcgctgccgccctattttgaccccatcgccggcgacgataatcgccagctgaaggacaataactatcatggatgctactgcaaattcagatgtgcaaagggctgaggaatttaaacttaaggcgaatgatgccttcaaggcaaacaagttctcgcaggctatagagctttacagtcaagccattgagctgaatagttcaaatgcagtttactgggcaaaccgtgcatttgcacacacaaaattagaggaatacggaagtgctgtgcaggatgctacaaaagccatcgaaattgattctagatattcaaaaggttattatagacgaggcgcagcttatcttgccatgggaaagttcaaggaagccctgaaggattttcagcaggttaaaaaaatctgcccaaatgatccagatgctacaagaaagttgaaagagtgcgagaaagctgtccaaaagatccgttttgaagaagcaatatctgctggggatgatgagaggcggtccgtggcagactctattgactaccatatcatagaagtagagccacattatgcgggaccgagaattgatggggaagaaataacgatagagtttgtcaaagcaatgttggatgaatttaagaagcagaaatgcatacataaaagatatgcttaccagattgtgctaaaaaccttggatttgctgcgatcgatgccttcccttgttgatgtggatgttccaaacggtggacattttacagtttgcggtgatgtgcatggccagtactttgatttgctcaacatatttgacctcaatggccttccatcagaagaaaatccttacctcttcaatggcgattttgtggaccgaggatctttctccgttgaagtcatactcaccctttttgctttcaagtgcctctacccaaaagctatgtaccttgcaagaggaaatcatgaaagcaagagcatgaacaaaatatatggctttgagggggaagtgaggtcaaagctgggtgagaagtttgttgaactttttgctgaagtcttttgttggttacctcttgcccatgtcatcaacaacaaggtctttgtggttcatggagggctatttagtgttgatggggttaagctttcagacattaggtccattgatcgtttttgtgaaccacctgaagaagcacccatgccaagtcgtggacatc

SEQ ID NO: 62563 - DNA, 2099 bp, Zea Mays
accgtccctgcctttggcaaccaccccgccccaaaatctctttctccgctgcgctgcaaacccaccgcttccaccatcgccactcgtcaccccttgctcccatagtccccataccatgcccgacctccacccgccggagcaccaagtcgccggtcaccgcgcctccgccagcaagctgggcccgctcatcgacggctccggcctcttctacaagccgctccaggccggcgaccgtggggagcacgaggtcgccttctatgaggcgttctccgcccacgccgccgtcccggcccgcatccgagacaccttcttcccccggttccacggcacgcgactcctccccaccgaggcgcagcccggggagccgcatccgcacctcgtcctcgacgacctcctcgcggggtttgaggcgccctgcgtcgcagacatcaagatcggcgccatcacgtggccaccgagttcgccggagccctacatcgccaagtacctcgccaaggaccgcgggaccacgagcgttctgctcggattccgcgtcttgcgtccgagtcgtcggccccgagggcgccgtgtggcggacggagcgcccggaggtgaaggctatggacaccgtcggcgtccgccgcgtgctccggcgctacgtgtcatccgcttgccgacgaggggatggactgcgcgctcgcggcggcggtgtacggaggaaaaggtggagtcttgtcacagctgcgcgagctcaaggcatggttggaggagcagactctgttccacttctactcggcgtcgattcttctgggctatgatgctgctgcagtcgcagcaggcggaggtgggggtggggtaacagtgaagctggtggactttgcccatgtggccgagggtgatggggtgattgaccacaacttcctgggcgagctctgctagctgatcaagttcgtttctgacattgttccagagactccttagacgcagcctttgggtccttcttaagagaggatcctgacatttttgatttgataacaaaggaagcactttcagctgcaaaaaaagaaagcagcagtgaggatgaagatgacagtagtgaggaaagttcggatgatgagccaacaaaagttgaagaaaagaaggctccaaaagtatcagaaaacattggatctgaggatgaatcttctgaagacgagagtgataaagacagtgaagagcctcagctcgcgagctgaactggctcgctcttttattgagccagaaaaaaactccgctcgaccttgttctaagcacagtttctggatcggaggagcatccccgcctaggtctctgcagccatggttcgcggatcgctcggcaagcttgcatcgcgcgccctctccgtcgccgggagatggcagcaccagcagctccgccgcctcaacatccacgagtaccagggcgcatagttgatgggtaaatacgggatcaacgtgcccaggggcgcggcggctgggtccgtacatgaggtcaaggacgccttgaagaacatgttccccagcgagaaagagatagttgttaaaagtcaaatccttgctggtggccgagggctgggaactttcaaaagcggattgcaaagtggtgtccatattgttaaggctgaggaagctgaattgattgcaagtaaaatgttaggccagattctgataacgaaacaaactggtccagagggaaagattgtgagcaaggtctacttgtgtgagaaactatctcttacaaatgagatgtactttgccatcacccttgataggaaaactgctggtccgctcattattgcttgcagcaggggaggaaaacactatagttgacctcaatgttcaaaggatggccagggctacatcatcttgttgttgacgggttccgtgtgttcaatcgccgagcagaaagccaggaacagaacttaggcgttggcgattggcatctccctcccctaagccatggccaccgggcggcccgtacgactcgtgctggatgcctccctcctcctcgacccctcctccaccagggaggcggcggcggtggctctgcggcccggggtagaggagctgttgcggcggttgcgctactccaacctgactgtg

SEQ ID NO: 62564 - DNA, 2604 bp, Zea Mays
accgtccctgcctttggcaaccaccccgccccaaaatctctttctccgctgcgctgcaaacccaccgcttccaccatcgccactcgtcaccccttgctcccatagtccccataccatgcccgacctccacccgccggagcaccaagtcgccggtcaccgcgcctccgccagcaagctgggcccgctcatcgacggctccggcctcttctacaagccgctccaggccggcgaccgtggggagcacgaggtcgccttctatgaggcgttctccgcccacgccgccgtcccggcccgcatccgagacaccttcttcccccggttccacggcacgcgactcctccccaccgaggcgcagcccggggagccgcatccgcacctcgtcctcgacgacctcctcgcggggtttgaggcgccctgcgtcgcagacatcaagatcggcgccatcacgtggccaccgagttcgccggagccctacatcgccaagtacctcgccaaggaccgcgggaccacgagcgttctgctcggattccgcgtcttgcgtccgagtcgtcggccccgagggcgccgtgtggcggacggagcgcccggaggtgaaggctatggacaccgtcggcgtccgccgcgtgctccggcgctacgtgtcatccgcttgccgacgaggggatggactgcgcgctcgcggcggcggtgtacggaggaaaaggtggagtcttgtcacagctgcgcgagctcaaggcatggttggaggagcagactctgttccacttctactcggcgtcgattcttctgggctatgatgctgctgcagtcgcagcaggcggaggtgggggtggggtaacagtgaagctggtggactttgcccatgtggccgagggtgatggggtgattgaccacaacttcctgggcgagctctgctagctgatcaagttcgtttctgacattgttccagagactccttagacgcagcctttgggtccttcttaagagaggatcctgacatttttgatttgataacaaaggaagcactttcagctgcaaaaaaagaaagcagcagtgaggatgaagatgacagtagtgaggaaagttcggatgatgagccaacaaaagttgaagaaaagaaggctccaaaagtatcagaaaacattggatctgaggatgaatcttctgaagacgagagtgataaagacagtgaagagcctcaggcatgccatcatttaacacctcaggcacgccatcatttttgtttcacaactcaaaagtaaaggaaaacactaaaagtatgcaggcagtatgagggacacacacagtttactgaaactcccttacacagacacatacacaccgtgttcactgaaacattcagatttcactaaactgcaacttctccaaacaaacactatctgcggctcggtcaagtaacgagcctcggctcggctcgctcctctagcgagcctaaaaagtcggctcggttcggcgagccaacgagcctgaccataagcatgaaatcagtctccaaaatataatataaagtctcaaaaataatttaagtgacacgtcttaaattagtaaaataaatatatatcatataatatagaaaataagttaattttgtacagtaatctaaaaatataaattaatcatctatttagtacctataatatatgctaattaaaatttatataacaaaaatgttgttgttcgagccagctcgcgagctgaactggctcgctcttttattgagccagaaaaaaactccgctcgaccttgttctaagcacagtttctggatcggaggagcatccccgcctaggtctctgcagccatggttcgcggatcgctcggcaagcttgcatcgcgcgccctctccgtcgccgggagatggcagcaccagcagctccgccgcctcaacatccacgagtaccagggcgcatagttgatgggtaaatacgggatcaacgtgcccaggggcgcggcggctgggtccgtacatgaggtcaaggacgccttgaagaacatgttccccagcgagaaagagatagttgttaaaagtcaaatccttgctggtggccgagggctgggaactttcaaaagcggattgcaaagtggtgtccatattgttaaggctgaggaagctgaattgattgcaagtaaaatgttaggccagattctgataacgaaacaaactggtccagagggaaagattgtgagcaaggtctacttgtgtgagaaactatctcttacaaatgagatgtactttgccatcacccttgataggaaaactgctggtccgctcattattgcttgcagcaggggaggaaaacactatagttgacctcaatgttcaaaggatggccagggctacatcatcttgttgttgacgggttccgtgtgttcaatcgccgagcagaaagccaggaacagaacttaggcgttggcgattggcatctccctcccctaagccatggccaccgggcggcccgtacgactcgtgctggatgcctccctcctcctcgacccctcctccaccagggaggcggcggcggtggctctgcggcccggggtagaggagctgttgcggcggttgcgctactccaacctgactgtg

SEQ ID NO: 62565 - DNA, 2051 bp, Zea Mays
accgtccctgcctttggcaaccaccccgccccaaaatctctttctccgctgcgctgcaaacccaccgcttccaccatcgccactcgtcaccccttgctcccatagtccccataccatgcccgacctccacccgccggagcaccaagtcgccggtcaccgcgcctccgccagcaagctgggcccgctcatcgacggctccggcctcttctacaagccgctccaggccggcgaccgtggggagcacgaggtcgccttctatgaggcgttctccgcccacgccgccgtcccggcccgcatccgagacaccttcttcccccggttccacggcacgcgactcctccccaccgaggcgcagcccggggagccgcatccgcacctcgtcctcgacgacctcctcgcggggtttgaggcgccctgcgtcgcagacatcaagatcggcgccatcacgtggccaccgagttcgccggagccctacatcgccaagtacctcgccaaggaccgcgggaccacgagcgttctgctcggattccgcgtcttgcgtccgagtcgtcggccccgagggcgccgtgtggcggacggagcgcccggaggtgaaggctatggacaccgtcggcgtccgccgcgtgctccggcgctacgtgtcatccgcttgccgacgaggggatggactgcgcgctcgcggcggcggtgtacggaggaaaaggtggagtcttgtcacagctgcgcgagctcaaggcatggttggaggagcagactctgttccacttctactcggcgtcgattcttctgggctatgatgctgctgcagtcgcagcaggcggaggtgggggtggggtaacagtgaagctggtggactttgcccatgtggccgagggtgatggggtgattgaccacaacttcctgggcgagctctgctagctgatcaagttcgtttctgacattgttccagagactccttagacgcagcctttgggtccttcttaagagaggatcctgacatttttgatttgataacaaaggaagcactttcagctgcaaaaaaagaaagcagcagtgaggatgaagatgacagtagtgaggaaagttcggatgatgagccaacaaaagttgaagaaaagaaggctccaaaagtatcagaaaacattggatctgaggatgaatcttctgaagacgagagtgataaagacagtgaagagcctcaggcatgccatcatttaacacctcagtttctggatcggaggagcatccccgcctaggtctctgcagccatggttcgcggatcgctcggcaagcttgcatcgcgcgccctctccgtcgccgggagatggcagcaccagcagctccgccgcctcaacatccacgagtaccagggcgcatagttgatgggtaaatacgggatcaacgtgcccaggggcgcggcggctgggtccgtacatgaggtcaaggacgccttgaagaacatgttccccagcgagaaagagatagttgttaaaagtcaaatccttgctggtggccgagggctgggaactttcaaaagcggattgcaaagtggtgtccatattgttaaggctgaggaagctgaattgattgcaagtaaaatgttaggccagattctgataacgaaacaaactggtccagagggaaagattgtgagcaaggtctacttgtgtgagaaactatctcttacaaatgagatgtactttgccatcacccttgataggaaaactgctggtccgctcattattgcttgcagcaggggaggaaaacactatagttgacctcaatgttcaaaggatggccagggctacatcatcttgttgttgacgggttccgtgtgttcaatcgccgagcagaaagccaggaacagaacttaggcgttggcgattggcatctccctcccctaagccatggccaccgggcggcccgtacgactcgtgctggatgcctccctcctcctcgacccctcctccaccagggaggcggcggcggtggctctgcggcccggggtagaggagctgttgcggcggttgcgctactccaacctgactgtg

SEQ ID NO: 62566 - DNA, 2132 bp, Zea Mays
cacgtcccaaccgtccctgcctttggcaaccaccccgccccaaaatctctttctccgctgcgctgcaaacccaccgcttccaccatcgccactcgtcaccccttgctcccatagtccccataccatgcccgacctccacccgccggagcaccaagtcgccggtcaccgcgcctccgccagcaagctgggcccgctcatcgacggctccggcctcttctacaagccgctccaggccggcgaccgtggggagcacgaggtcgccttctatgaggcgttctccgcccacgccgccgtcccggcccgcatccgagacaccttcttcccccggttccacggcacgcgactcctccccaccgaggcgcagcccggggagccgcatccgcacctcgtcctcgacgacctcctcgcggggtttgaggcgccctgcgtcgcagacatcaagatcggcgccatcacgtggccaccgagttcgccggagccctacatcgccaagtacctcgccaaggaccgcgggaccacgagcgttctgctcggattccgcgtcttgcgtccgagtcgtcggccccgagggcgccgtgtggcggacggagcgcccggaggtgaaggctatggacaccgtcggcgtccgccgcgtgctccggcgctacgtgtcatccgcttgccgacgaggggatggactgcgcgctcgcggcggcggtgtacggaggaaaaggtggagtcttgtcacagctgcgcgagctcaaggcatggttggaggagcagactctgttccacttctactcggcgtcgattcttctgggctatgatgctgctgcagtcgcagcaggcggaggtgggggtggggtaacagtgaagctggtggactttgcccatgtggccgagggtgatggggtgattgaccacaacttcctgggcgagctctgctagctgatcaagttcgtttctgacattgttccagagactccttagacgcagcctttgggtccttcttaagagaggatcctgacatttttgatttgataacaaaggaagcactttcagctgcaaaaaaagaaagcagcagtgaggatgaagatgacagtagtgaggaaagttcggatgatgagccaacaaaagttgaagaaaagaaggctccaaaagtatcagaaaacattggatctgaggatgaatcttctgaagacgagagtgataaagacagtgaagagcctcaggcatgccatcatttaacacctcagctcgcgagctgaactggctcgctcttttattgagccagaaaaaaactccgctcgaccttgttctaagcacagtttctggatcggaggagcatccccgcctaggtctctgcagccatggttcgcggatcgctcggcaagcttgcatcgcgcgccctctccgtcgccgggagatggcagcaccagcagctccgccgcctcaacatccacgagtaccagggcgcatagttgatgggtaaatacgggatcaacgtgcccaggggcgcggcggctgggtccgtacatgaggtcaaggacgccttgaagaacatgttccccagcgagaaagagatagttgttaaaagtcaaatccttgctggtggccgagggctgggaactttcaaaagcggattgcaaagtggtgtccatattgttaaggctgaggaagctgaattgattgcaagtaaaatgttaggccagattctgataacgaaacaaactggtccagagggaaagattgtgagcaaggtctacttgtgtgagaaactatctcttacaaatgagatgtactttgccatcacccttgataggaaaactgctggtccgctcattattgcttgcagcaggggaggaaaacactatagttgacctcaatgttcaaaggatggccagggctacatcatcttgttgttgacgggttccgtgtgttcaatcgccgagcagaaagccaggaacagaacttaggcgttggcgattggcatctccctcccctaagccatggccaccgggcggcccgtacgactcgtgctggatgcctccctcctcctcgacccctcctccaccagggaggcggcggcggtggctctgcggcccggggtagaggagctgttgcggcggttgcgctactccaacctgactgtg

SEQ ID NO: 62567 - DNA, 1866 bp, Zea Mays
accgtccctgcctttggcaaccaccccgccccaaaatctctttctccgctgcgctgcaaacccaccgcttccaccatcgccactcgtcaccccttgctcccatagtccccataccatgcccgacctccacccgccggagcaccaagtcgccggtcaccgcgcctccgccagcaagctgggcccgctcatcgacggctccggcctcttctacaagccgctccaggccggcgaccgtggggagcacgaggtcgccttctatgaggcgttctccgcccacgccgccgtcccggcccgcatccgagacaccttcttcccccggttccacggcacgcgactcctccccaccgaggcgcagcccggggagccgcatccgcacctcgtcctcgacgacctcctcgcggggtttgaggcgccctgcgtcgcagacatcaagatcggcgccatcacgtggccaccgagttcgccggagccctacatcgccaagtacctcgccaaggaccgcgggaccacgagcgttctgctcggattccgcgtcttgcgtccgagtcgtcggccccgagggcgccgtgtggcggacggagcgcccggaggtgaaggctatggacaccgtcggcgtccgccgcgtgctccggcgctacgtgtcatccgcttgccgacgaggggatggactgcgcgctcgcggcggcggtgtacggaggaaaaggtggagtcttgtcacagctgcgcgagctcaaggcatggttggaggagcagactctgttccacttctactcggcgtcgattcttctgggctatgatgctgctgcagtcgcagcaggcggaggtgggggtggggtaacagtgaagctggtggactttgcccatgtggccgagggtgatggggtgattgaccacaacttcctgggcgagctctgctagctgatcaagttcgtttctgacattgttccagagactccttagacgcagcctttgggtccttcttaagagaggatcctgacatttttgatttgataacaaaggaagcactttcagctgcaaaaaaagaaagcagcagtgaggatgaagatgacagtagtgaggaaagttcggatgatgagccaacaaaagttgaagaaaagaaggctccaaaagtatcagaaaacattggatctgaggatgaatcttctgaagacgagagtgataaagacagtgaagagcctcagaaaaaaactccgctcgaccttgttctaagcacagtttctggatcggaggagcatccccgcctaggtctctgcagccatggttcgcggatcgctcggcaagcttgcatcgcgcgccctctccgtcgccgggagatggcagcaccagcagctccgccgcctcaacatccacgagtaccagggcgcatagttgatgggtaaatacgggatcaacgtgcccaggggcgcggcggctgggtccgtacatgaggtcaaggacgccttgaagaacatgttccccagcgagaaagagatagttgttaaaagtcaaatccttgctggtggccgagggctgggaactttcaaaagcggattgcaaagtggtgtccatattgttaaggctgaggaagctgaattgattgcaagtaaaatgttaggccagattctgataacgaaacaaactggtccagagggaaagattgtgagcaaggtctacttgtgtgagaaactatctcttacaaatgagatgtactttgccatcacccttgataggaaaactgctggtccgctcattattgcttgcagcaggggaggaaaacactatagttgacctcaatgttcaaaggatggccagggttgcaggctgtagtttctttttaattgtttgcatgtatgcagtgatgatgca

SEQ ID NO: 62568 - DNA, 895 bp, Zea Mays
cttctgaagacgagagtgataaagacagtgaagagcctcagctcgcgagctgaactggctcgctcttttattgagccagaaaaaaactccgctcgaccttgttctaagcacagtttctggatcggaggagcatccccgcctaggtctctgcagccatggttcgcggatcgctcggcaagcttgcatcgcgcgccctctccgtcgccgggagatggcagcaccagcagctccgccgcctcaacatccacgagtaccagggcgcatagttgatgggtaaatacgggatcaacgtgcccaggggcgcggcggctgggtccgtacatgaggtcaaggacgccttgaagaacatgttccccagcgagaaagagatagttgttaaaagtcaaatccttgctggtggccgagggctgggaactttcaaaagcggattgcaaagtggtgtccatattgttaaggctgaggaagctgaattgattgcaagtaaaatgttaggccagattctgataacgaaacaaactggtccagagggaaagattgtgagcaaggtctacttgtgtgagaaactatctcttacaaatgagatgtactttgccatcacccttgataggaaaactgctggtccgctcattattgcttgcagcaggggaggaaaacactatagttgacctcaatgttcaaaggatggccaggtatttctttttttcctgtctctattcaactgttgtcgcatagctaatcttgaactacggattgcgacagccattagaatccagttatatatactttgctgcagtgagcagccaattggccatagaccgaacaatctcatgttcatgatgaaaaagaaaaaaaatgagggatttagagttttggaacccaatttgtttttaccttt

SEQ ID NO: 62569 - DNA, 1001 bp, Zea Mays
ctctctgtgtggtactagctagctagtaccgcaatataatggtagtaggcgctactacgacgaatcaccttcgctccaagaaatgcgtgaagggcaccattgagaggtacaagaaggcaaccagtgacaactccagcgcagctggtacgattgcagaggtcaccattcagcattacaagcaggaatctgctaggctgaggcagcagatcgttaacttgcagaactccaacagggccctgataggtgattctatcacaaccatgagccacaaggaacttaagcacttggagactaggttagacaaagctctcggaaagattagagcaaaaaagaacgatgtgctgtgttctgaagtcgagtacatgcagagaagggaaatggagttgcagaatgacaacttgtacttaaggagccgggttgatgagaatgaaagggcacaacagacagcgaacatgatgggggcaccatcgacaagtgagtatcagcagcacggttttactccttatgatccaataaggagcttcctgcagttcaacatcgtgcagcagcctcagttctattctcagcaggaggaccggaaagacttcaacgaccaaggtggaagataaatattggacctctcaagcttcagtacttatccgtgatgatgcatgactgccagtgagaaactgagctacattactgtggaattatatgtaaagactagtactactgcttcatatatgtgcatgtgcgcacacgcgcacgtagtatgcacaatttcatcccactattatggcttggcaccaactatgtctccttaattatcataggagaaaaataagtcacgcacaaaaaaattctaaagatgaggcgcagtgttggatgactgaaactgaaagataggattctcgtggatggcggtggtcatatatatgtcatgcacatctgatctctgttccaaaatgccacatcttctttcccaacccactcgaatctacaccgagaatatatatgtttta

SEQ ID NO: 62570 - DNA, 2065 bp, Zea Mays
atagccggccggacgccactctatcccggccgtcggccgcggttcaggctctccttccattagaagcactcttctagtttagactttataatagaggcgctgaggcctcacccttttccctggtgttgcaagttgcaacacacagcgtccggcgagatcggcgatcagaaaccacgagcccacccaccatccggaacgcgcgcgatgtgtcccatcagaggtggtggttgttcttggccagcgtccgtcgtcggctctgccacggcggcgctgctcctcgccgccgtcatcgtgcggctcttcgtcccccgtgcctgttcttcaggaattatcaaggggcggcggcaggtaggtgctggtgctgccggaggagcacggctccctgccggctcgctcgggtggccgctcctcggcgagacgctggcgttcatccgggccgcgtactcgcctcgcccggagtccttcgtcgagaaacgccgcgtctttgctcggcggcggcctccagcgccgggtgcacggcctcgcgggcgccttcttcaagtcgccgcagctcaaggcgcaggtcaccctggacatgcagcgccgcgtcggccgcgccatggacatgtggggcaggcggcgccatcggagcatgggcgacgacagcggtggtatgcccgtgcgtgtgcagaacgaggccaagtcgattgtgttcgaaatcctagtgagggcgctgatagggttagaggaaggggacaagatgcagtacctcaggcaacagtttcaagaattcattgccggtttgatatcacttccggttaagcttccggggactcaactctatagatccctcaaggctaagaagaggatgacaaagttgataaaaacgatcatccaagagaagaggaagaagatgatgtcggaaggcgacgatctgcgtggtgggactcatccacgtgatatgatcgacgtcctgctaggcaacggcaacgacgagctcaccgacgagctgatatctgacaacatgatcgacttcatgatccctgcagaggactccgtgcccgtgctcatcacgctggccgtcaagtacctcagcgaatgcccacaggctctgcagcaactcgaggaggagaacatggagctcaagaggcagaaatcaggcgcgggagaaaccctagaatggacagactacatgtcgctcgccttcacacagcacgtgatcacggagacgctgcggatgggcaacatcatcaacgggatcatgcggaaggcggtgcgagacgtggaggtgagaggccacctggtcccgaagggctggcgcgtcctcgtctacttccgcgccgtccacctcgacgccgccgtccacgacgacccgcacgccttcaacccctggaggtggaaggagaggcccgacgtcgtggccatgagcggcggcggcggcggcggcttcaccccgttcggcggcggccagaggctgtgccctgggctcgacctggcaaggctcgaggcctccatctttctgcaccatctcgtcaccaatttcaggtgggtggcggaggaggacaccgtcgtcaacttccccacagtgcggctcaagcgagggatgccaatcgcagtgacgcccagaacctgctgaacgcaacgcaacttgccaggcaaaaccatactatacatttatactcaactaaagaggtgtgagaaataatacagtacatgcatgcatgtaatggagggcgaaattaaaagttggcacggcaaagaagctgctggtatgccaaaagttcagtttgcaaattatatagtttaattactattacactagggagaccctatgcatgtctgatgcctcgttgtgaatctgtcctgctccttcaagcagacaaatctacgctgccacaacaataagcatacaattttcgacggtcaaagccatcaaaattaagctcttaaccgtcggaaaataagttacttctcatagcttaagccttattgctcacagtcgatttgtaaatcatcagaaataacgctactttcgacggatgcggaaataacttattttcgaccgacgttagcggccatcaataat

SEQ ID NO: 62571 - DNA, 2294 bp, Zea Mays
ccttgataagtattaaataataataataaaataaaatatttgaagcaagattctctgggcagtttcatagccggccggacgccactctatcccggccgtcggccgcggttcaggctctccttccattagaagcactcttctagtttagactttataatagaggcgctgaggcctcacccttttccctggtgttgcaagttgcaacacacagcgtccggcgagatcggcgatcagaaaccacgagcccacccaccatccggaacgcgcgcgatgtgtcccatcagaggtggtggttgttcttggccagcgtccgtcgtcggctctgccacggcggcgctgctcctcgccgccgtcatcgtgcggctcttcgtcccccgtgcctgttcttcaggaattatcaaggggcggcggcaggtaggtgctggtgctgccggaggagcacggctccctgccggctcgctcgggtggccgctcctcggcgagacgctggcgttcatccgggccgcgtactcgcctcgcccggagtccttcgtcgagaaacgccgcgtcttgtacgggaaggtgttcaagtcgcacctgtgggggtcgccggcggtggtgagctcggacccggaggtgagccgcgcggtgctgcaggccgacgcgtcggcgttcgttccatggtacccgcgatcgctcatggagctgatggggcaatcgtccatcctagtgctcggcggcggcctccagcgccgggtgcacggcctcgcgggcgccttcttcaagtcgccgcagctcaaggcgcaggtcaccctggacatgcagcgccgcgtcggccgcgccatggacatgtggggcaggcggcgccatcggagcatgggcgacgacagcggtggtatgcccgtgcgtgtgcagaacgaggccaagtcgattgtgttcgaaatcctagtgagggcgctgatagggttagaggaaggggacaagatgcagtacctcaggcaacagtttcaagaattcattgccggtttgatatcacttccggttaagcttccggggactcaactctatagatccctcaagagcaggctaagaagaggatgacaaagttgataaaaacgatcatccaagagaagaggaagaagatgatgtcggaaggcgacgatctgcgtggtgggactcatccacgtgatatgatcgacgtcctgctaggcaacggcaacgacgagctcaccgacgagctgatatctgacaacatgatcgacttcatgatccctgcagaggactccgtgcccgtgctcatcacgctggccgtcaagtacctcagcgaatgcccacaggctctgcagcaactcgaggaggagaacatggagctcaagaggcagaaatcaggcgcgggagaaaccctagaatggacagactacatgtcgctcgccttcacacagcacgtgatcacggagacgctgcggatgggcaacatcatcaacgggatcatgcggaaggcggtgcgagacgtggaggtgagaggccacctggtcccgaagggctggcgcgtcctcgtctacttccgcgccgtccacctcgacgccgccgtccacgacgacccgcacgccttcaacccctggaggtggaaggagaggcccgacgtcgtggccatgagcggcggcggcggcggcggcttcaccccgttcggcggcggccagaggctgtgccctgggctcgacctggcaaggctcgaggcctccatctttctgcaccatctcgtcaccaatttcaggtgggtggcggaggaggacaccgtcgtcaacttccccacagtgcggctcaagcgagggatgccaatcgcagtgacgcccagaacctgctgaacgcaacgcaacttgccaggcaaaaccatactatacatttatactcaactaaagaggtgtgagaaataatacagtacatgcatgcatgtaatggagggcgaaattaaaagttggcacggcaaagaagctgctggtatgccaaaagttcagtttgcaaattatatagtttaattactattacactagggagaccctatgcatgtctgatgcctcgttgtgaatctgtcctgctccttcaagcagacaaatctacgctgccacaacaataagcatacaattttcgacggtcaaagccatcaaaattaagctcttaaccgtcggaaaataagttacttctcatagcttaagccttattgctcacagtcgatttgtaaatcatcagaaataacgctactttcgacggatgcggaaataacttattttcgaccgacgttagcggccatcaataat

SEQ ID NO: 62572 - DNA, 2283 bp, Zea Mays
ccacataattttgtttggagacaagcaagtttgttactcatttttagctgctagcacgtaactattagcatttatggaacgcactagcccttgataagtattaaataataataataaaataaaatatttgaagcaagattctctgggcagtttcatagccggccggacgccactctatcccggccgtcggccgcggttcaggctctccttccattagaagcactcttctagtttagactttataatagaggcgctgaggcctcacccttttccctggtgttgcaagttgcaacacacagcgtccggcgagatcggcgatcagaaaccacgagcccacccaccatccggaacgcgcgcgatgtgtcccatcagaggtggtggttgttcttggccagcgtccgtcgtcggctctgccacggcggcgctgctcctcgccgccgtcatcgtgcggctcttcgtcccccgtgcctgttcttcaggaattatcaaggggcggcggcaggtaggtgctggtgctgccggaggagcacggctccctgccggctcgctcgggtggccgctcctcggcgagacgctggcgttcatccgggccgcgtactcgcctcgcccggagtccttcgtcgagaaacgccgcgtcttgtacgggaaggtgttcaagtcgcacctgtgggggtcgccggcggtggtgagctcggacccggagtgctcggcggcggcctccagcgccgggtgcacggcctcgcgggcgccttcttcaagtcgccgcagctcaaggcgcaggtcaccctggacatgcagcgccgcgtcggccgcgccatggacatgtggggcaggcggcgccatcggagcatgggcgacgacagcggtggtatgcccgtgcgtgtgcagaacgaggccaagtcgattgtgttcgaaatcctagtgagggcgctgatagggttagaggaaggggacaagatgcagtacctcaggcaacagtttcaagaattcattgccggtttgatatcacttccggttaagcttccggggactcaactctatagatccctcaaggctaagaagaggatgacaaagttgataaaaacgatcatccaagagaagaggaagaagatgatgtcggaaggcgacgatctgcgtggtgggactcatccacgtgatatgatcgacgtcctgctaggcaacggcaacgacgagctcaccgacgagctgatatctgacaacatgatcgacttcatgatccctgcagaggactccgtgcccgtgctcatcacgctggccgtcaagtacctcagcgaatgcccacaggctctgcagcaactcgaggaggagaacatggagctcaagaggcagaaatcaggcgcgggagaaaccctagaatggacagactacatgtcgctcgccttcacacagcacgtgatcacggagacgctgcggatgggcaacatcatcaacgggatcatgcggaaggcggtgcgagacgtggaggtgagaggccacctggtcccgaagggctggcgcgtcctcgtctacttccgcgccgtccacctcgacgccgccgtccacgacgacccgcacgccttcaacccctggaggtggaaggagaggcccgacgtcgtggccatgagcggcggcggcggcggcggcttcaccccgttcggcggcggccagaggctgtgccctgggctcgacctggcaaggctcgaggcctccatctttctgcaccatctcgtcaccaatttcaggtgggtggcggaggaggacaccgtcgtcaacttccccacagtgcggctcaagcgagggatgccaatcgcagtgacgcccagaacctgctgaacgcaacgcaacttgccaggcaaaaccatactatacatttatactcaactaaagaggtgtgagaaataatacagtacatgcatgcatgtaatggagggcgaaattaaaagttggcacggcaaagaagctgctggtatgccaaaagttcagtttgcaaattatatagtttaattactattacactagggagaccctatgcatgtctgatgcctcgttgtgaatctgtcctgctccttcaagcagacaaatctacgctgccacaacaataagcatacaattttcgacggtcaaagccatcaaaattaagctcttaaccgtcggaaaataagttacttctcatagcttaagccttattgctcacagtcgatttgtaaatcatcagaaataacgctactttcgacggatgcggaaataacttattttcgaccgacgttagcggccatcaataat

SEQ ID NO: 62573 - DNA, 1832 bp, Zea Mays
catcccctctcttttccgctctttcccctgcgacttcaacctctctcaatctcctctccttgtccactggcttgggcgtgcctttgcgtgcgacgggagctaggaatccacggcatcggaaaagtggccgcctgaagaaccgatttctccaagattttgttgtccgtcctatcgcttgcaggatcggattcgccgtctctggccatggttctcgccggcctccgccggcacgtcggccagttcttgaccagcagtaatgagcttatggcggcgtcgctctcggccgtgagctgcgcggacgaggtgcagaaggcggagggggcggggtgccgtgacgacgccgcggcgctgcggctcaagaaggtggccatggcggcgatactggtggccggggtgctcggggtggtcctgccgctcgcggggcggaagcggcgcgcgctgcgcacggacagcgccgcgttcctggcggccaaggcgttcgccgccggggtcatcctggccacggggttcgtccacatgcttcacgacgccgagcacgcgctgtccagcccgtgcctccccgccgcgccgtggcgacggttcccagtgcccgggttcgtcgccatggccgctgcgctagccacgctggtgctcgacttccttgccaccaggttctacgaggccaagcatcgcgacgaggccgcgcgcgtcaaggcggcggcggccgccgcactggttgcgacctcctctgggagcgacgaggacatcacggtggtcaccgtcgatgaggacgagcgcaaggccccgctgttgcaaacgcactgccatggacacggtcacagccacagccacagccatgtgcatgagccggtgcaggtagagggtagcgaggcggaggtgtcggcacatgtgcgctccattgtcgtgtcacagatactggagatggggattgtgtcacactctgtgatcatcggattgtcactgggagtgtcgcggagcccatgcacaatcaggccacttgtcgcagcacttgcattccaccagttcttcgaggggtttgcactaggcacaattcaagaacctttcagcagttctaatggcatctttcttcgccatcacaacaccggcaggaatagctgctggggcaggcatgaccacattctacaatcccaatagcccaagggcccttgtggtcgagggcattcttgactcggtatctgctggcattctcatatacatgtcactagtggatctcattgctgtagatttcttgggtggaaagatgacagggaccctgcgacagcaagtgatggcatacatcgcattgttcctcggtgcgctctctatgtcatcacttgcaatatgggcttgagacatgaccttgattaaatatcagataaaaggtgaagcagtgtccatataaaatttctggggtatatgtacagttttaatgtgtagtatcttgttgtatggtagcttccttcgggatcatcataggataacatgcactgtttttcaagggcatgaaaaaaacaccgctgatgtactcaagggtgaactatgtggtttctttaagcgatgagcaagcaatgatatgtttgactgccgctgaatgactgcatgcactgctgtaatggttgtgtcaattgtgggtgtggctggtcttggcatttcagtatctgcaaagtgtaatggttgggtagtcttctgtcaaatatgaaatattgacaacgttgatttgatctgcagcaaatggtttgggctcatttagggcctgattgaaccccattagacctaacagtgagcggctgaaattggctgcatgagtatccaatccgacttgctaagtaccg

SEQ ID NO: 62574 - DNA, 2531 bp, Zea Mays
ctcgcaccaccatgacgacatcccctctcttttccgctctttcccctgcgacttcaacctctctcaatctcctctccttgtccactggcttgggcgtgcctttgcgtgcgacgggagctaggaatccacggcatcggaaaagtggccgcctgaagaaccgatttctccaagattttgttgtccgtcctatcgcttgcaggatcggattcgccgtctctggccatggttctcgccggcctccgccggcacgtcggccagttcttgaccagcagtaatgagcttatggcggcgtcgctctcggccgtgagctgcgcggacgaggtgcagaaggcggagggggcggggtgccgtgacgacgccgcggcgctgcggctcaagaaggtggccatggcggcgatactggtggccggggtgctcggggtggtcctgccgctcgcggggcggaagcggcgcgcgctgcgcacggacagcgccgcgttcctggcggccaaggcgttcgccgccggggtcatcctggccacggggttcgtccacatgcttcacgacgccgagcacgcgctgtccagcccgtgcctccccgccgcgccgtggcgacggttcccagtgcccgggttcgtcgccatggccgctgcgctagccacgctggtgctcgacttccttgccaccaggttctacgaggccaagcatcgcgacgaggccgcgcgcgtcaaggcggcggcggccgccgcactggttgcgacctcctctgggagcgacgaggacatcacggtggtcaccgtcgatgaggacgagcgcaaggccccgctgttgcaaacgcactgccatggacacggtcacagccacagccacagccatgtgcatgagccggtgcaggtagagggtagcgaggcggaggtgtcggcacatgtgcgctccattgtcgtgtcacagatactggagatggggattgtgtcacactctgtgatcatcggattgtcactgggagtgtcgcggagcccatgcacaatcaggccacttgtcgcagcacttgcattccaccagttcttcgaggggtttgcactaggtgggtgcattgctcaggtgagaattgcagtcaactgcggttgagagctgatccgttctcatgacttgatcaacaattgatttgccatgttttaatagcagcctgctgtataattttgcacatactgttgaaattcttgattttcttgatactctgcacactgtactgtaagtacattactttcatgtgaggcttgctcctttatcaatttgatggttgggcaatcggcctttaagaacatggacccatccttgaaagttcaggattcaaacatttggcttcaataatataactgagcattgtacattgttggaatatatttctctctcccaatttatgcctgtttatccatgtaaatggccaccttcgatttaacttctaaaataaactatggttgtctagtactttgtgaatacccgccagccgaaaattttagtacttcatgaaaagtattgcggagttatgacaattaggttggatgtccatttactgattagattgcttcagcactgaatggtcccagaaaaaaaaatacatggtgatgtctatgcattactacttagttactttgtcttcccttttttttcctttaatttcttttttccttcacttcttctactgtgctgcttccttttcttacttcaattactaatggagacactaccacatttctcccaacaggcacaattcaagaacctttcagcagttctaatggcatctttcttcgccatcacaacaccggcaggaatagctgctggggcaggcatgaccacattctacaatcccaatagcccaagggcccttgtggtcgagggcattcttgactcggtatctgctggcattctcatatacatgtcactagtggatctcattgctgtagatttcttgggtggaaagatgacagggaccctgcgacagcaagtgatggcatacatcgcattgttcctcggtgcgctctctatgtcatcacttgcaatatgggcttgagacatgaccttgattaaatatcagataaaaggtgaagcagtgtccatataaaatttctggggtatatgtacagttttaatgtgtagtatcttgttgtatggtagcttccttcgggatcatcataggataacatgcactgtttttcaagggcatgaaaaaaacaccgctgatgtactcaagggtgaactatgtggtttctttaagcgatgagcaagcaatgatatgtttgactgccgctgaatgactgcatgcactgctgtaatggttgtgtcaattgtgggtgtggctggtcttggcatttcagtatctgcaaagtgtaatggttgggtagtcttctgtcaaatatgaaatattgacaacgttgatttgatctgcagcaaatggtttgggctcatttagggcctgattgaaccccattagacctaacagtgagcggctgaaattggctgcatgagtatccaatccgacttgctaagtaccg

SEQ ID NO: 62575 - DNA, 2065 bp, Zea Mays
caccgaatcgaaggccaacacggcaactctcgcacagagaagaggcaaggagagagagagagagagagagcagccagtcgtcgaaggctcgtagccctagaagctccaatggcggactccgaagacgcgccgccagccgtgcaccgccgcccaccgcgccccgctcgcggtgctgctgcagcccagggcttcgcggccgcgttgcgccgccggctgagatccggcgctgcggtggcggcacgcgccagctttgccgcagactccggggacgagtctggccccggcgagccctcttcgtctcgccgccgcgacaacagcgggggcgcctcgtccgccgccggcggccgggccggggcaggggacttctccgcgttcaccttccgcgccgcggcgcctgtccaccggaaagccaaggagagccctctgagctccgacgccatcttcaagcagagtcatgcaggccttttcaacctatgtattgttgttctggttgcggtgaatagcaggctcattattgagaacctgatgaagtatggcttattaataagatctggcttttggtttaatgctacatcattgcgagactggccactgctaatgtgttgccttagtctacccatatttccccttggtgcatttgcagtcgaaaagttggcattcaacaatctcattagtgatcctgctactacctgttttcacatcctttttacaacatttgaaattgtatatccagtgctcgtgattcttaagtgtgattctgcagttttatcaggctttgtgttgatgtttattgcctgcattgtttggctgaagcttgtatcttttgcacatacaaaccatgatataagaaaactgatcacaagcggcaagaaggttgataatgaactgaccgcggctggcatagataatttacaagctccaactcttgggagtctaacatacttcatgatggctccgacactctgttatcagccaagttatcctcgaacaccttatgttagaaaaggttggctggtccgtcaagttattctatacttgatatttactggtctccaaggattcattattgagcaatacataaatcctattgttgtgaactctcaacatccattgatgggaggattactgaatgctgtagagactgttttgaagctctcattaccaaatgtctacctgtggctttgcatgttttattgccttttccatctgtggttaaacatacttgctgagattcttcgatttggtgaccgagaattctacaaagactggtggaatgcaaagacaattgatgagcctgtgcataaatggattgttcgtcatatatatttcccttgcatgcgaaatggtatatcaaaggaagttgctgtttttatatcgttctttgtttctgctgtacttcatgagttatgtgttgctgttccctgccacatactcaagttctgggctttcttaggaatcatgcttcagattcccctcatcatattgacatcatacctcaaaaataaattcagtgacacaatggttggcaatatgatcttttggttttttttctgcatatacgggcagccaatgtgtgttctattgtattaccatgatgtgatgaaccggactgagaaggcaaaataaccatctgtagatcttttttggtgtttcatttcttccatcatggaaactgaaagcaataatctgtgcacacagtaaaccagcatcgtgtcttccagttttttttgttgttgttggaatctatcctagatctttatcatgtgtatggtggataacctcatgtcaccatcgtatctgtatacaataagcctaaatcagctgacgttctatatgtaaattagtaaatgtaatgactaattagtgcccccctttctgcactaccagatctacttttctcgtaatatttaatattaaaacaatcacaccacacattctactgcctggtgatgatgttatataacatttggtatcacgagcggaatctaagcatgtctgtaatctgatatgtagtagacctgtgatgccctcactctgtttgattttgaatataaggattcgtttg

SEQ ID NO: 62576 - DNA, 2041 bp, Zea Mays
caccgaatcgaaggccaacacggcaactctcgcacagagaagaggcaaggagagagagagagagagagagcagccagtcgtcgaaggctcgtagccctagaagctccaatggcggactccgaagacgcgccgccagccgtgcaccgccgcccaccgcgccccgctcgcggtgctgctgcagcccagggcttcgcggccgcgttgcgccgccggctgagatccggcgctgcggtggcggcacgcgccagctttgccgcagactccggggacgagtctggccccggcgagccctcttcgtctcgccgccgcgacaacagcgggggcgcctcgtccgccgccggcggccgggccggggcaggggacttctccgcgttcaccttccgcgccgcggcgcctgtccaccggaaagccaaggagagccctctgagctccgacgccatcttcaagcagagtcatgcaggccttttcaacctatgtattgttgttctggttgcggtgaatagcaggctcattattgagaacctgatgaagtatggcttattaataagatctggcttttggtttaatgctacatcattgcgagactggccactgctaatgtgttgccttagtctacccatatttccccttggtgcatttgcagtcgaaaagttggcattcaacaatctcattagtgatcctgctactacctgttttcacatcctttttacaacatttgaaattgtatatccagtgctcgtgattcttaagtgtgattctgcagttttatcaggctttgtgttgatgtttattgcctgcattgtttggctgaagcttgtatcttttgcacatacaaaccatgatataagaaaactgatcacaagcggcaagaaggttgataatgaactgaccgcggctggcatagataatttacaagctccaactcttgggagtctaacatacttcatgatggctccgacactctgttatcagccaagttatcctcgaacaccttatgttagaaaaggttggctggtccgtcaagttattctatacttgatatttactggtctccaaggattcattattgagcaatacataaatcctattgttgtgaactctcaacatccattgatgggaggattactgaatgctgtagagactgttttgaagctctcattaccaaatgtctacctgtggctttgcatgttttattgccttttccatctgtggttaaacatacttgctgagattcttcgatttggtgaccgagaattctacaaagactggtggaatgcaaagacaattgatgagtactggagaaaatggaacatgcctgtgcataaatggattgttcgtcatatatatttcccttgcatgcgaaatggtatatcaaaggaagttgctgtttttatatcgttctttgtttctgctgtacttcatgagttatgtgttgctgttccctgccacatactcaagttctgggctttcttaggaatcatgcttcagattcccctcatcatattgacatcatacctcaaaaataaattcagtgacacaatgccaatgtgtgttctattgtattaccatgatgtgatgaaccggactgagaaggcaaaataaccatctgtagatcttttttggtgtttcatttcttccatcatggaaactgaaagcaataatctgtgcacacagtaaaccagcatcgtgtcttccagttttttttgttgttgttggaatctatcctagatctttatcatgtgtatggtggataacctcatgtcaccatcgtatctgtatacaataagcctaaatcagctgacgttctatatgtaaattagtaaatgtaatgactaattagtgcccccctttctgcactaccagatctacttttctcgtaatatttaatattaaaacaatcacaccacacattctactgcctggtgatgatgttatataacatttggtatcacgagcggaatctaagcatgtctgtaatctgatatgtagtagacctgtgatgccctcactctgtttgattttgaatataaggattcgtttg

SEQ ID NO: 62577 - DNA, 2271 bp, Zea Mays
gaggaggatggggtatgcatgtatagagagtgagagagagagagaaagaaagtttccggaggaaagcgagggaaagttcacaaataaaggagtgaagcaaaaggaaacggaaaacaaaacaaaacaaagcccagattcctctctccgaacagcgcctatgttttttttttcttcagccccccccccccccccccccccccccccctcacctcttcttcttctgctggtatctatcgttgttgttcccttcgttctctctccatctatctccctcagattacttgcgaccagcgacgctctggctggcccctttgagattgacctggggcttccatacaccaagagtgcagcaagaggatagatagcatttgttgcagcgctctctaggtcgtctctctctctctctagctagctagcgtcgtctcctccggtgaggtgatgaacagaggagaattccagacctcccttgtccagcagatgatctggagcggcggcggcggcggcaataccacagcggcaggcagcagcaacatcatgagcagcggcttcaagcagtcttgccatgaggatcaacaagaggcctcccgcaacctgcagctgctgccctccctatcgtctccgtcgtcgctgctcttctccaatgcccagcagttcccgcacaccacctcttcgggccagcagctagcccacaccaacgccggcggcgcagcagctggttctctcccaagtctggacgacgacggcggcagcggtcaggacagccacatgccggaatcgtggagccagatgcttctaggggagttcgctggagagcgctacgccgccaccgcatgtctgctgtcaaagggcgtagaggactggggggatcacgctgcggcagctgcaagcgcgtgcatggtgggtggcggcggcggcgtggaggaggagggctcggccgccatgcctctgtacagcttatatggtggtggtagtcacagtcacagccacctcgctgcagctggtgaccatgagatgccgccggcgccagcagcagcagcagcaggggccaataagtctcagctgagccagatgctcctcgcctcgtcgcctaggtcctgcgtcaccaccagcctcggcagcaacatgctcgacttctccaacaacggcgtgcccccggcgcccgatcagctgaagagccaccaccaccatcaatccgataactcatccgaggtgaggaaggagagactgggtgacagaataactgccctacaccagatcgtttctccgtttggcaagactgacacggcgtccgtcctgcaagagaccattggctatatcagattcctactgggacaaattgaggctctcagctacccctacatgggccacggcaatgggacctccattcaaaatggaccaacaactggagaaaggaaccatgcagggctcctaccagatcaataccccggccagttgctgaaccataataacaacactggagcacggcagcctgcagcagtcggccagcctgatgagcagcagcagcagcagggtggtgctaataataatgacgagacgaagaaggacctgaggagccgggggctgtgcctcgtcccggtgtcatgcacgtcgcacttcggaggggacaacgccgctgactactgggctccggcgccgctcggtgggatcctccgctagagcgagcgcgccattgaagcatgcatatgcgttttctcgtttagatgtggcgagctagctgctgttcgttccgtacaagtatatgttcgtcaggctgctgcagggtagctagctagagagagctgtgtctaattaagaatcatcgcaagggtggcgtgcatgcatatatatgctgctggttgctgtgggaaacataccatcatgagcagtcattcttggtaggggagaagctgcgtgcgtcgtatacctgtaaggctgattgctcttgatgctatgcgagtaagtatgacgaccctttttgtgggcgcgcaaggcttcattaattattttgtatcttcaagggagggcgcttcaagtagaagatctagatcttctctggtcccctgtcgcaaatttatttcgttggtcatgtatatgtaattaaaatctagcaataagttattagtgaacatgtttatttactcaaacatatatatagtatagtgcgatgggttaatgatatatagcaggcagggccgttcctgactttttaggggcctggtgcgaaatccgaaatggaggctccatccacacacaatatatataatattcaat

SEQ ID NO: 62578 - DNA, 2341 bp, Zea Mays
gaggaggatggggtatgcatgtatagagagtgagagagagagagaaagaaagtttccggaggaaagcgagggaaagttcacaaataaaggagtgaagcaaaaggaaacggaaaacaaaacaaaacaaagcccagattcctctctccgaacagcgcctatgttttttttttcttcagccccccccccccccccccccccccccccctcacctcttcttcttctgctggtatctatcgttgttgttcccttcgttctctctccatctatctccctcagattacttgcgaccagcgacgctctggctggcccctttgagattgacctggggcttccatacaccaagagtgcagcaagaggatagatagcatttgttgcagcgctctctaggtcgtctctctctctctctagctagctagcgtcgtctcctccggtgaggtgatgaacagaggagaattccagacctcccttgtccagcagatgatctggagcggcggcggcggcggcaataccacagcggcaggcagcagcaacatcatgagcagcggcttcaagcagtcttgccatgaggatcaacaagaggcctcccgcaacctgcagctgctgccctccctatcgtctccgtcgtcgctgctcttctccaatgcccagcagttcccgcacaccacctcttcgggccagcagctagcccacaccaacgccggcggcgcagcagctggttctctcccaagtctggacgacgacggcggcagcggtcaggacagccacatgccggaatcgtggagccagatgcttctaggggagttcgctggagagcgctacgccgccaccgcatgtctgctgtcaaagggcgtagaggactggggggatcacgctgcggcagctgcaagcgcgtgcatggtgggtggcggcggcggcgtggaggaggagggctcggccgccatgcctctgtacagcttatatggtggtggtagtcacagtcacagccacctcgctgcagctggtgaccatgagatgccgccggcgccagcagcagcagcagcaggggccaataagtctcagctgagccagatgctcctcgcctcgtcgcctaggtcctgcgtcaccaccagcctcggcagcaacatgctcgacttctccaacaacggcgtgcccccggcgcccgatcagctgaagagccaccaccaccatcaatccgataactcatccgagcaccgtaacaggttcggccatcaagaagcctagggttcaggcctcctcttcagcacaatctactctaaaggtgaggaaggagagactgggtgacagaataactgccctacaccagatcgtttctccgtttggcaagactgacacggcgtccgtcctgcaagagaccattggctatatcagattcctactgggacaaattgaggctctcagctacccctacatgggccacggcaatgggacctccattcaaaatggaccaacaactggagaaaggaaccatgcagggctcctaccagatcaataccccggccagttgctgaaccataataacaacactggagcacggcagcctgcagcagtcggccagcctgatgagcagcagcagcagcagggtggtgctaataataatgacgagacgaagaaggacctgaggagccgggggctgtgcctcgtcccggtgtcatgcacgtcgcacttcggaggggacaacgccgctgactactgggctccggcgccgctcggtgggatcctccgctagagcgagcgcgccattgaagcatgcatatgcgttttctcgtttagatgtggcgagctagctgctgttcgttccgtacaagtatatgttcgtcaggctgctgcagggtagctagctagagagagctgtgtctaattaagaatcatcgcaagggtggcgtgcatgcatatatatgctgctggttgctgtgggaaacataccatcatgagcagtcattcttggtaggggagaagctgcgtgcgtcgtatacctgtaaggctgattgctcttgatgctatgcgagtaagtatgacgaccctttttgtgggcgcgcaaggcttcattaattattttgtatcttcaagggagggcgcttcaagtagaagatctagatcttctctggtcccctgtcgcaaatttatttcgttggtcatgtatatgtaattaaaatctagcaataagttattagtgaacatgtttatttactcaaacatatatatagtatagtgcgatgggttaatgatatatagcaggcagggccgttcctgactttttaggggcctggtgcgaaatccgaaatggaggctccatccacacacaatatatataatattcaat

SEQ ID NO: 62579 - DNA, 2406 bp, Zea Mays
gaggaggatggggtatgcatgtatagagagtgagagagagagagaaagaaagtttccggaggaaagcgagggaaagttcacaaataaaggagtgaagcaaaaggaaacggaaaacaaaacaaaacaaagcccagattcctctctccgaacagcgcctatgttttttttttcttcagccccccccccccccccccccccccccccctcacctcttcttcttctgctggtatctatcgttgttgttcccttcgttctctctccatctatctccctcagattacttgcgaccagcgacgctctggctggcccctttgagattgacctggggcttccatacaccaagagtgcagcaagaggatagatagcatttgttgcagcgctctctaggtcgtctctctctctctctagctagctagcgtcgtctcctccggtgaggtgatgaacagaggagaattccagacctcccttgtccagcagatgatctggagcggcggcggcggcggcaataccacagcggcaggcagcagcaacatcatgagcagcggcttcaagcagtcttgccatgaggatcaacaagaggcctcccgcaacctgcagctgctgccctccctatcgtctccgtcgtcgctgctcttctccaatgcccagcagttcccgcacaccacctcttcgggccagcagctagcccacaccaacgccggcggcgcagcagctggttctctcccaagtctggacgacgacggcggcagcggtcaggacagccacatgccggaatcgtggagccagatgcttctaggggagttcgctggagagcgctacgccgccaccgcatgtctgctgtcaaagggcgtagaggactggggggatcacgctgcggcagctgcaagcgcgtgcatggtgggtggcggcggcggcgtggaggaggagggctcggccgccatgcctctgtacagcttatatggtggtggtagtcacagtcacagccacctcgctgcagctggtgaccatgagatgccgccggcgccagcagcagcagcagcaggggccaataagtctcagctgagccagatgctcctcgcctcgtcgcctaggtcctgcgtcaccaccagcctcggcagcaacatgctcgacttctccaacaacggcgtgcccccggcgcccgatcagctgaagagccaccaccaccatcaatccgataactcatccgagagtgttacgggcagctaggcacaaattcaaagggatacctgtttttgttactactagtgcaacagcaccgtaacaggttcggccatcaagaagcctagggttcaggcctcctcttcagcacaatctactctaaaggtgaggaaggagagactgggtgacagaataactgccctacaccagatcgtttctccgtttggcaagactgacacggcgtccgtcctgcaagagaccattggctatatcagattcctactgggacaaattgaggctctcagctacccctacatgggccacggcaatgggacctccattcaaaatggaccaacaactggagaaaggaaccatgcagggctcctaccagatcaataccccggccagttgctgaaccataataacaacactggagcacggcagcctgcagcagtcggccagcctgatgagcagcagcagcagcagggtggtgctaataataatgacgagacgaagaaggacctgaggagccgggggctgtgcctcgtcccggtgtcatgcacgtcgcacttcggaggggacaacgccgctgactactgggctccggcgccgctcggtgggatcctccgctagagcgagcgcgccattgaagcatgcatatgcgttttctcgtttagatgtggcgagctagctgctgttcgttccgtacaagtatatgttcgtcaggctgctgcagggtagctagctagagagagctgtgtctaattaagaatcatcgcaagggtggcgtgcatgcatatatatgctgctggttgctgtgggaaacataccatcatgagcagtcattcttggtaggggagaagctgcgtgcgtcgtatacctgtaaggctgattgctcttgatgctatgcgagtaagtatgacgaccctttttgtgggcgcgcaaggcttcattaattattttgtatcttcaagggagggcgcttcaagtagaagatctagatcttctctggtcccctgtcgcaaatttatttcgttggtcatgtatatgtaattaaaatctagcaataagttattagtgaacatgtttatttactcaaacatatatatagtatagtgcgatgggttaatgatatatagcaggcagggccgttcctgactttttaggggcctggtgcgaaatccgaaatggaggctccatccacacacaatatatataatattcaat

SEQ ID NO: 62580 - DNA, 771 bp, Zea Mays
ctcagatctcctatgtgttcgagagaaaaaaaagagagggggattgagtatatgtaggccagaatactgcatcaggattacaacatgacatggtgtctaactcggtatacgattgcgatgatgggatatggtccagaagacaaaaatgctgtattggagttgacctacaactatggggtgaaggaatatgataagggaaatgcttatgcacagattgctattagtactgatgatgtctacaaaactgcggaagcaattagagtaaatggtggacaaattactcgtgaacctggcccattacctggcatcaccaccaagataactgcatgcacagatccagatggctggaaaacagtgtttgtcgataacatagattttctgaaggagttggaagaatgagctttgctagagatctcaacttggtacatcaagctccatacggttgcaccccgtgagttccatgcatgacctgcaaaatctttgtaaagccacagcctcaaactgaggattgtagataggtcgtccaatctacggcatcatcgcaattgatagttgatagagcattagattttccttgcagatctatatagatgcgcaaccgtttttgtattatgcattttaatgcataagttcaatggaaatgattcatgggtaagaaaatcgtcttctttcaagcggcaatataagggctggtttggtgacttgaatagcaagtgatttatttttccatgaattctctccaatttcattgtcaacaaaccacaaaccagc

SEQ ID NO: 62581 - DNA, 948 bp, Zea Mays
aagaggttaaaagtaaaataggttgcaaaaacagtggaacttattaaagcaaaaggaggaacagtcacaagggagccaggccctgtcaaaggtgggaaatcagtaattgcctttattgaggatcctgatggttacaagtttgagcttatagaaagagggcctactcccgagcctttgtgccaggtaatgcttcgagtgggagatcttgatcgtgctataaatttctatgagaaggcatttggcatggaacttcttcgcaagcgagacaattctgagtacaagtatacgattgcgatgatgggatatggtccagaagacaaaaatgctgtattggagttgacctacaactatggggtgaaggaatatgataagggaaatgcttatgcacagattgctattagtactgatgatgtctacaaaactgcggaagcaattagagtaaatggtggacaaattactcgtgaacctggcccattacctggcatcaccaccaagataactgcatgcacagatccagatggctggaaaacagtgtttgtcgataacatagattttctgaaggagttggaagaatgagctttgctagagatctcaacttggtacatcaagctccatacggttgcaccccgtgagttccatgcatgacctgcaaaatctttgtaaagccacagcctcaaactgaggattgtagataggtcgtccaatctacggcatcatcgcaattgatagttgatagagcattagattttccttgcagatctatatagatgcgcaaccgtttttgtattatgcattttaatgcataagttcaatggaaatgattcatgggtaagaaaatcgtcttctttcaagcggcaatataagggctggtttggtgacttgaatagcaagtgatttatttttccatgaattctctccaatttcattgtcaacaaaccacaaaccagc

SEQ ID NO: 62582 - DNA, 1387 bp, Zea Mays
aggcacactgatggccccgccagatccaagccgcgacccagacggcaagatagagcgagcgacctctcgattctccccatcccgccgtgcttcccgtcttcaccaaatccttcgccacgatggcgcgcctgctcatccccctccccttcgccgccgcctctgcctcatcgctccacctcgccgtctcccgccttcctctcgccgcggtctccgccgcgcgtcgcgagtgtctctttgggggaagggtggtaggaggagtggtgagggcgcccgcgaggctttctaagcgcgggttgtgcgccggcgcagaggctggcgactcggccgtcacggtggaggccatggaatgggtcaagaaggacaggaggcgcctgctccacgtcgtctaccgcgtcggggacctcgacaagacgatcaagttctacacggagtgcctgggcatgaaactgttgaggaagagggacattcccgaggagaggtacaccaatgcctttctggggtacgggcctgaggattcacattttgttgtggagctcacttacaattatggtgtggagagctataacatcgggactggttttggccactttggaattgctgttgaggatgttgcaaaaacagtggaacttattaaagcaaaaggaggaacagtcacaagggagccaggccctgtcaaaggtgggaaatcagtaattgcctttattgaggatcctgatggttacaagtttgagcttatagaaagagggcctactcccgagcctttgtgccagaagtcgctgattcattttgtaatattacaaaggcatttggcatggaacttcttcgcaagcgagacaattctgagtacaagtatacgattgcgatgatgggatatggtccagaagacaaaaatgctgtattggagttgacctacaactatggggtgaaggaatatgataagggaaatgcttatgcacagattgctattagtactgatgatgtctacaaaactgcggaagcaattagagtaaatggtggacaaattactcgtgaacctggcccattacctggcatcaccaccaagataactgcatgcacagatccagatggctggaaaacagtgtttgtcgataacatagattttctgaaggagttggaagaatgagctttgctagagatctcaacttggtacatcaagctccatacggttgcaccccatctatatagatgcgcaaccgtttttgtattatgcattttaatgcataagttcaatggaaatgattcatgggtaagaaaatcgtcttctttcaagcggcaatataagggctggtttggtgacttgaatagcaagtgatttatttttccatgaattctctccaatttcattgtcaacaaaccacaaaccagc

SEQ ID NO: 62583 - DNA, 1365 bp, Zea Mays
atcagtttcaccgctgggtcagccatggccgccacatccatcaaggtcgcgcacctcacaaccctcgcgctcttctctccgactccaaaccccttcggtccgaagtccagcaaacacagagctagagccccaccacccatctccatctccatggatccggccctcgtggaccctgcccacctgcaggcccttatgctcgcctgcggccactcttgcacgctccgcctctcgccggcgctatcagtttccgccgttgagccggtcgacctcagcaagctccggactgcccttgcgcacagcttcgtcgtcgtatctgtcttctgcggtgctaggttcttcacacatgacagggaaagggagggggagggacagagattcttgggcttggagatcggtctcgatcttcagggtgagcggcgccttgtcggattcgggcgcgccgtctccgacctcgggctcaccgcatccgtccatgacattgtgtgacttacaggtacatccattactacagaggagaggaattggccaaaagatagtgaacaaaattacaaggtaacttgctgattttacaataaaaatatcgcacattatgttcccactacagaaaccatggttgctgcctacaggaactgagtgtttcttctaaccataatgtgttcgactcaaatgatcttttattttgaatcaagtatcatagagaaaagatgaatatatgcagttttaaatgctttaatgataagtaaaattacttgttatagagggcaaaactagtaccaaaggctctcacataagttgaggcttgaggaagggataaaccgtggcaagcatgtcctccgcaaatgtggagaagctactttgaacccacgatcttataatccgtgataaattgttttctgtaatccgtgataaattgttttctggtagaaagttatgcttgatccaatagttcattgctggaaaatatctgcagggtacttcatagcagaggtatatatgacatctctgcgttatgtacagcaaaggagaggcccttttttgaagcttgtggatttggtgatgatatgatgggttcaacaacaatgttgtatactagaaaaacacagaaatagagttcattaaaaagttctcaattggtataatgttatttgttgatatgataactcatctgttggtcttcactgctgatgtttcaaagcattactctcagaaaaggttgatcttcacagctgatgtttgaaatcattttactcagaaaaaggggggtgggttatgagatgtagcagttatctcaatgtgcgcacctattgggaaaaataatcacaatggagtcgtgacgattaagacaaggacaatctattttataaa

SEQ ID NO: 62584 - DNA, 1360 bp, Zea Mays
cattaatcagtttcaccgctgggtcagccatggccgccacatccatcaaggtcgcgcacctcacaaccctcgcgctcttctctccgactccaaaccccttcggtccgaagtccagcaaacacagagctagagccccaccacccatctccatctccatggatccggccctcgtggaccctgcccacctgcaggcccttatgctcgcctgcggccactcttgcacgctccgcctctcgccggcgctatcagtttccgccgttgagccggtcgacctcagcaagctccggactgcccttgcgcacagcttcgtcgtcgtatctgtcttctgcggtgctaggttcttcacacatgacagggaaagggagggggagggacagagattcttgggcttggagatcggtctcgatcttcagggtgagcggcgccttgtcggattcgggcgcgccgtctccgacctcgggctcaccgcatccgtccatgacattgtggtacatccattactacagaggagaggaattggccaaaagatagtgaacaaaattacaaggtaacttgctgattttacaataaaaatatcgcacattatgttcccactacagaaaccatggttgctgcctacaggaactgagtgtttcttctaaccataatgtgttcgactcaaatgatcttttattttgaatcaagtatcatagagaaaagatgaatatatgcagttttaaatgctttaatgataagtaaaattacttgttatagagggcaaaactagtaccaaaggctctcacataagttgaggcttgaggaagggataaaccgtggcaagcatgtcctccgcaaatgtggagaagctactttgaacccacgatcttataatccgtgataaattgttttctgtaatccgtgataaattgttttctggtagaaagttatgcttgatccaatagttcattgctggaaaatatctgcagggtacttcatagcagaggtatatatgacatctctgcgttatgtacagcaaaggagaggcccttttttgaagcttgtggatttggtgatgatatgatgggttcaacaacaatgttgtatactagaaaaacacagaaatagagttcattaaaaagttctcaattggtataatgttatttgttgatatgataactcatctgttggtcttcactgctgatgtttcaaagcattactctcagaaaaggttgatcttcacagctgatgtttgaaatcattttactcagaaaaaggggggtgggttatgagatgtagcagttatctcaatgtgcgcacctattgggaaaaataatcacaatggagtcgtgacgattaagacaaggacaatctattttataaa

SEQ ID NO: 62585 - DNA, 887 bp, Zea Mays
gtcattaatcagtttcaccgctgggtcagccatggccgccacatccatcaaggtcgcgcacctcacaaccctcgcgctcttctctccgactccaaaccccttcggtccgaagtccagcaaacacagagctagagccccaccacccatctccatctccatggatccggccctcgtggaccctgcccacctgcaggcccttatgctcgcctgcggccactcttgcacgctccgcctctcgccggcgctatcagtttccgccgttgagccggtcgacctcagcaagctccggactgcccttgcgcacagcttcgtcgtcgtatctgtcttctgcggtgctaggttcttcacacatgacagggaaagggagggggagggacagagattcttgggcttggagatcggtctcgatcttcagggtgagcggcgccttgtcggattcgggcgcgccgtctccgacctcgggctcaccgcatccgtccatgacattgtggtacatccattactacagaggagaggaattggccaaaagatagtgaacaaaattacaaggcccttttttgaagcttgtggatttggtgatgatatgatgggttcaacaacaatgttgtatactagaaaaacacagaaatagagttcattaaaaagttctcaattggtataatgttatttgttgatatgataactcatctgttggtcttcactgctgatgtttcaaagcattactctcagaaaaggttgatcttcacagctgatgtttgaaatcattttactcagaaaaaggggggtgggttatgagatgtagcagttatctcaatgtgcgcacctattgggaaaaataatcacaatggagtcgtgacgattaagacaaggacaatctattttataaa

SEQ ID NO: 62586 - DNA, 963 bp, Zea Mays
actaccctggtcattaatcagtttcaccgctgggtcagccatggccgccacatccatcaaggtcgcgcacctcacaaccctcgcgctcttctctccgactccaaaccccttcggtccgaagtccagcaaacacagagctagagccccaccacccatctccatctccatggatccggccctcgtggaccctgcccacctgcaggcccttatgctcgcctgcggccactcttgcacgctccgcctctcgccggcgctatcagtttccgccgttgagccggtcgacctcagcaagctccggactgcccttgcgcacagcttcgtcgtcgtatctgtcttctgcggtgctaggttcttcacacatgacagggaaagggagggggagggacagagattcttgggcttggagatcggtctcgatcttcagggtgagcggcgccttgtcggattcgggcgcgccgtctccgacctcgggctcaccgcatccgtccatgacattgtgtgacttacaggtacatccattactacagaggagaggaattggccaaaagatagtgaacaaaattacaagggtacttcatagcagaggtatatatgacatctctgcgttatgtacagcaaaggagaggcccttttttgaagcttgtggatttggtgatgatatgatgggttcaacaacaatgttgtatactagaaaaacacagaaatagagttcattaaaaagttctcaattggtataatgttatttgttgatatgataactcatctgttggtcttcactgctgatgtttcaaagcattactctcagaaaaggttgatcttcacagctgatgtttgaaatcattttactcagaaaaaggggggtgggttatgagatgtagcagttatctcaatgtgcgcacctattgggaaaaataatcacaatggagtcgtgacgattaagacaaggacaatctattttataaa

SEQ ID NO: 62587 - DNA, 2134 bp, Zea Mays
cttaaatttcttctttttgtttcatgtagttgccctactaccctggtcattaatcagtttcaccgctgggtcagccatggccgccacatccatcaaggtcgcgcacctcacaaccctcgcgctcttctctccgactccaaaccccttcggtccgaagtccagcaaacacagagctagagccccaccacccatctccatctccatggatccggccctcgtggaccctgcccacctgcaggcccttatgctcgcctgcggccactcttgcacgctccgcctctcgccggcgctatcagtttccgccgttgagccggtcgacctcagcaagctccggactgcccttgcgcacagcttcgtcgtcgtatctgtcttctgcggtgctaggttcttcacacatgacagggaaagggagggggagggacagagattcttgggcttggagatcggtctcgatcttcagggtgagcggcgccttgtcggattcgggcgcgccgtctccgacctcgggctcaccgcatccgtccatgacattgtggtaatgttctctttcgcagtgaatttgcccgtggtagcgaaccctgattgtgtgggtagaaactattaactgtgtgaaaccttatttttctattctgttcttgttaacctcattggcattaacacattttccatctgtcatttcttgcaaaagaattgatcttttttttttggaatctgtgaagagacattgctactgggctagaggaagtgtttatttgattgaataccatggaacattaacaaaaacaagggcaaggttgtttcggttagcagattgtggattgtggcttttaggttgttacaatctgcaagatgaaacaaagcagccataagattctattggtccacaggccagattataaaggtccaacaatcttcttccacatttgcaagacaaacaaatagggcctaagaacacatagccttgtagaaataacagtggttttgtcctaaacttacaatgtaatgcctattgattggtaagcaagtttggaagaataagcttctgcattactgtacttctttctgtgcttttgcattaatagtgtgttatcttgtacaaattaaccaacagtaagtaaacttcttgtgtatttctattgaaagtttctatgtagcattaagtgcaacttggcaagtttgttttgaattaattgtattggaattttgggcattagagcaatcacaacccagaaactactaagtgatttccatagctgccacctcactaagaaatcactcatagaagctataagtttcaacgctaatttttttttgttgtggtgtcgtaataaatctggatgtgacgacgcggcaagtgagctgtgtgtgggcttcacagatggaaactggatgctcatctccaacgctaaaacagtggttttttgtgtcttcgttgcgcgtgtagatctgatttctcaaggaggaaaccatttttccctctttctcattaattttcttgctatgtcaccaaattgcttgtggcagctaaataatgctatagaaactagatgatgtggattgtggagggtgccaaatgcagtagtctagctttgatattttatacttctgttccaaaacaggaaaaaaaaaacttatagatatgtcacatgtgttcatataactagtttcagtgacttacaggtacatccattactacagaggagaggaattggccaaaagatagtgaacaaaattacaagggtacttcatagcagaggtatatatgacatctctgcgttatgtacagcaaaggagaggcccttttttgaagcttgtggatttggtgatgatatgatgggttcaacaacaatgttgtatactagaaaaacacagaaatagagttcattaaaaagttctcaattggtataatgttatttgttgatatgataactcatctgttggtcttcactgctgatgtttcaaagcattactctcagaaaaggttgatcttcacagctgatgtttgaaatcattttactcagaaaaaggggggtgggttatgagatgtagcagttatctcaatgtgcgcacctattgggaaaaataatcacaatggagtcgtgacgattaagacaaggacaatctattttataaa

SEQ ID NO: 62588 - DNA, 4242 bp, Zea Mays
atttgaaacacatagaagattcataaaatgttcatgatggtagtacataaaatgttcatgacaatagacacacatagaaggttcatgacaatagtatataaaaggttcatgaagccgtacataaaaggtttctgacaacatacacacatagaaggtctacgacaatactacataaaatagttcaagacagtagtacataaaaggtttatgacacactcatgataactcccaactcaatacaacccatagtcctgacaatttctctttaaccaagataaccttccttcatttgattcaaaagtaaagaacatatctcagttttcagctttcatgaacaattttgtagccatgtaatgctcaacacttccttctggtgcaccacatttcttaaccagattcatcgcattcttgatggactctgtccttaattttccctgtagaaccatttttgcagtagcactattagattgcaaagttccccacattcccctcataatcttcaacatagggctttgttgcagtactagtgttgcatgctcgtttctttcttgctccactagctggactggcaatatcctcatccaagtcatcaccttcattcatatgctctccaggaatacaaaacaatgaaccatcaacaacagtgtgctcatacgtgtgctcatacatttgttgaagttgatcaaggttttcatgtggttcttattgtaacttcttccattccgaatgattcttgcaaaattcagaatgattagtacctttgtgtgtcaaaaaaacataaacagaaggcaggcttcatgagtacctttgtgtgttccctctagaaagcttcatcagcaacaacagtaccatttgcccggccaagacccgtttgtttgttgagccacaaccaaaaactatagagacgcttctactgatcccatttatttttcaactgagttttagaatgtcttaaaccagttcttagataatacttctcagttatgacatggtagcctctggtagtcatgaagccattaaccctattactagcctttatttgctcaacacaaaggtcacataatgtagtattgttgtatggatctgtctaatttgccttgtcaaatgtatcacccatctaccatatgaaaaagcagagcaaacatgaatgtccaataaaaatacatagtgcaaacatccaccaatctttttcattttttaagacacaagcaaatagttcacacgagcagtgcaatgtctacagacttgctagttgctagcacagttacctcgacaacgatggcaaggatgcattgaacagtagagtttttctatggatgccaacgaaaaaacattatctaatgcacagagaaaatatagttgcaatgcagatcgtactacttaatgatgacaactgttctatggatgccaacgaaaaaacattatttaatacaacaaagtttttctatggatgccacccgtactacctaatgttgcaatgcagcagagttttcaaacataatgatgccaagccagccactgttttctcccatggtacggatgcagagttttggtgctgcccaaagaacaacagcttttcagttttcctttctatttattcagagttcagacttacataaaatcaaagtgttgatcaatagaatggtttgcatggagttaaattgctaacagaaactaactgactaattgaaactacatgcttaactctgcatgctgccaaaacagaattataaacccattactaataatgcagtcatatcttgcccagggtactcaccgaaagttcattaccaaacacgaacagctctaaaaactgaatccactacccattggattttataaagtataaacaacccattggattttataaacataccatcaactaaactaaaattgagtttacatagttggcataagcgtgcttaggaatttaggataaagtaaaaagaagcctcatcaactaaactcgctagactgctactagcaaaaatgtaaataatttatagattcagtcatggaaagagtgtaactataaaagtcgaaggaggtcatctaactataaatacacctattgggctgatgggctagaaatttggaactttcggtggaacattggaatattggcaccacgaccaactattaatccattcttataatcataatttaggtacaacattggaacgatcaagtcaggaaaaggagtcacctgtgcaaaggtatcatcattgtcctcttggctgcgagaggcatttgaagctgaaatattggcaccatgaccatcggtggcaccacgaccacccgaggaggaagcaccaatagatcaaggcataccatatgcacgagagaagatgcttcgtgctcaatgaccacctctaggaccctcactggccatccgtggaactcggaagcctctacctgtaacaccacgaccaataccaattgatcgaaaatgactgcgacccctgtggccatcacgaatcagagtagcagagtagttggcagtagactaggactgacgaaggtcttgaaatgatgcaatgttctggaattccacaccactagagttgaggtccaacccgtccactctactagatcgcggagaagggataaactgctccttatgaagactcagcgccacttcatctgagaagaaacccatgttcacacgatcatagggcgacctaataggagttgtgtggtactcagcctcgtcggaatcgaagaacatggctgcaattagagagaccaaacagtaaataatgaaagtgtatatacaaacaatcaatactcagaatatatctcatcaaatataggagtccaacattacaaaaaggtagccttctaagataatcaggtatttgtcatacagctaaaaggcacccacaaatcctgagttacgaacacaaggttaatttatcccttgtggttcgggttgatgatgagtgattgtcaatgggtagggtcgaattgtggactgaccgaaacatgagattatgtatgtgcaaccatgtcggttggcttgtggtgtgcaggtgtggagcacagagacggtggtcgacgactgaggtgaaggtcatgtgggctcgtgctgatggaccgagagcggtgaaggacgagtgctgggtcctggctaacggaccggagcaaccaggtgaacagccgtggtggctgacacctaggacacacccgcgcgaggacgtgagggagcggcctgtgttgctggcgcggtcgaggactggcgagacacgtgtccagaacgtgggggacgcatacgcagtgcgatactcatgacgatttggtggttgagcctcgaaaccaccctgcgttatggacaacgggttttgctgagtttgggcctcaaaactcggcagcggcggttatggagggaatcaatggcggcacgtggcatcacagcgaagggtgcatcaaggctaagcaacttcgtgtggagtgcgtgatcgtcggatcgaaaacctaggagttggtctattttgcccctggtggagtggatatactctatgtaaaaatgggtagtttaggaaatagaaataaccctctataaatagaggggatggttggttagttcatcatctcttggcatatctcttgtctgccatttgtttagtctctcttgtttagaactcctagtttttcctctctaggtaatcacttactgtgccaggagatccgcaacgattttgtttgtcgactgtgcctgagagctatattgtttcatctaaggaagggtcgtcggcccgacccacaactttcggttggcttcaatttcagtttgtgcccttgctgattttctgaaggcttttattcttgagttcttcatctctttgttcttgaggattttggagaaccatcgagttcttgtttctctggtgctgttgggatttgttggtggatgagatttactctttggatcacttcttatgtcaagatggtgttgtttgtagttgtgatccccttcgaccttgtgttgagttcgtcctagaaaacccccaacaaaaccccacttttctcagggttttgaatctgcgcttcgatttctgagttgctcaggttgatacttcatcagtggacatctttcccgcccgcgcaaactatctgcaaagtttgagccagttctaggcatttttctttgcccggcactgtcgcctacgtgcgtggcactgccagcctccgacactactagacttgcacggccgctctgcccgacactgccgccctatagac

SEQ ID NO: 62589 - DNA, 362 bp, Zea Mays
ctaaatttaaagtgctagtgctgcagcacattgatggtgagcgattgagcccttgggtatcagtcgggtgcttggctatgggaatatccactattttcttctaaggccgaagttttaatctccacaaatttagtctaggacgcagcaccttgtttcacttgtagagaaaaaaaaaactattgtaagcattttgcttcagtttttaatggtgggcactgtaagatctgtatctgcactgagatttctgatattaacaaaaatgttttctcataagatttctgagaaaaaaaaaactttgtagaccttgtagctgtttgaagagtggtaattgatgaactgctgagagaaaaatttgatgttcc

SEQ ID NO: 62590 - DNA, 573 bp, Zea Mays
acatcacagcagcaacagccgaaacagcaacagcctacctcttcgtgaatcgtgtcccttcccttggctgcagctgcaggatccaagcaacgcggaaggagggagtcggcgctgttcaacttcaactccttcctgaccgtggtgttgctggtgatctgcacctgctcctacatcaagatgcagttcccggcaatcctcaacgaccgcaccggattccgtggtttcttttggaaagctgccaggataggtgagcgattgagcccttgggtatcagtcgggtgcttggctatgggaatatccactattttcttctaaggccgaagttttaatctccacaaatttagtctaggacgcagcaccttgtttcacttgtagagaaaaaaaaaactattgtaagcattttgcttcagtttttaatggtgggcactgtaagatctgtatctgcactgagatttctgatattaacaaaaatgttttctcataagatttctgagaaaaaaaaaactttgtagaccttgtagctgtttgaagagtggtaattgatgaactgctgagagaaaaatttgatgttcc

SEQ ID NO: 62591 - DNA, 768 bp, Zea Mays
tggatttctacccaaatgtatgaccttttgctagcaaatgtgaactctcaacccttggcttaccgatggtactgagaggacttgctcaatgtcaaaagtagttcaacaagttggttatactaacttgtaactgcccaatgaacaaagattgagtttagagatcgttttattgatttgcctgggctcatcttggttcaatccatcttaaggaagtactttcaaaaatcaagattaagtcggtcgataaccacctaatcatcgctctagtcatgcctccatcgtctcacgtgtgcttttccagcaagtgtgatcaaatagatccatgattagtgctcgataaaatggaatggttgcgaaggcagcatttatagatccctctgcttgtgatttttcaagtctttatcatttttcttggacttggattctccggctaatacaagttaactgtgatgttgttcgacatccacactcgccttatgtgctatgagcttaccgtaaccacttgttggtaaacctctttctctttctatgtgttttacccaagatggtgcatctgattctgtttgggtaaaatcacgtattagtcgctcgctcaacagactcagatagtacagtgtcatcagaaaaaaaacaaactgcacacatggaaccttatgtgttcctctggcatatatcgtctctattggtggacatttctaaattagcctaaggcgatacatgttatgtccactagagaaacaatcttctgagatactcgtcttcgctcat

SEQ ID NO: 62592 - DNA, 2758 bp, Zea Mays
acaaacgagggagcgaaggacaacagcatgccatagggcggctgtgcggcaaagagaaacgccaccggccagatgtttcggctggagagaatgaaagaaatgagctagggttacctccacatccgacaatctcggtatttataaacctagctacagtagctcgtgcattcctggccgttgattttgatccaaggacacagaataagcctggatgcacccacctgcgtgtgggccagaacggcggcccaggcccaggttgcggcctgggcgcgcgcctctccctcacgccagcgccagctgggccgccagctcggctgggccaaatggccagaaaagaatttttttttaattatcctggaaatcagaatgagtaaaacagaaaaaataaattagaaaaatagctagaaaattcagaaaagtacagaaatattttttccagttatagacaatttcagagatatttttggactattttattccgctgcgtactttggtactttcatttatattttatgcaatttttccagttaattatgaaaccaacgtggattaattattgtttaaattgcatagaattcagaaattttgtggtgattgaatattttaaccaacgttggatattgttaccacaattttatacaagtttatgtttttctagatcatccaacgatgatttagaattttgtgatcagaaattttcatagatatggcatagttattatttgaccaacgttgaatatttaattcatgcatgttctatgattcagtattcagtatttatttcagatgtcctaaatattttctgttttaattttgcaaaggtgctcataccgccatgctgattagccagattgctcagatgaaaccgctagatggtagtaattaccattcttggcgggaggatatagacatgataaccacagtgggtgagatagattacgcactgaggtttgataaaccagttgagcccacagtgggcactcccaactatgaccacaggtggatgcaatacagcatcgacaaggtcaagtgggagagatcaaatgacaaatgtatgattattcttaagaggagcatcaaggagcctcttaagagttccataccagagtgcgagactgccaaagaataccttgagagggtagcctctcatcaccaagggtcttctaaggcttatgcttgctctctaatgacagaatttgtcaatgcaaaatacgatggaaatggtgtcagaccattcattcagaaaatgatatccatcgtagctaagataaacaagtacctcgggtctcctttacacgaggaatttgtagtatttatgataatgaagtctctgcccaaggagtttgagacttttcacatacagtacaacactagtgtcactgataagtggaatatagaccaactcttggcacagtgtgtccaggaggaagagaggttaaagcagactggagactctgtcaacctcattaaaggcaatattcccagacagaacaagaactcaaagaaaaagttcaagaagcaaggcaaacagaataaccaggcttcctcgagcaataataatcagccaagacaaggaggcagtttctcagttccccctgatacctgcctctattgcaagaagacaggtcattacaagagaaagtgccctgaattcctgcagtatctattagagagtggtaaggaccaagttacttttgtaaatgagtctttatacttagaatatcccagttattcttggtggattgactcaggtgcaactgttcatgttgcaaactctctacagggactccgtacaagccaaaggctcccaaagggccgaagaacaattagagtggcaaatggagttgaagcagcagtcgaggccattggagatatacatcttaaattagttaatggttttgtactgttgttgagagacgtactttatgtaccttccttgcgaaggaaccttatttcggtttctagattagatgatcagcacattcattgccattttggtgatagacagtgtgtcattcagtttgataataaagatgttggtctcgccatccgacgagatatgctttatttactttcgcaaagtgatgttgttaatgtattagatataccagaaaacgatccagccagcagtggcaggaaaagaaaacgaaatgatggagaaacctcgtcgaaattatggcactatcgtttgggccatatttcgagggggagaatagaaagtcttgttaaggaacagattctccatcccctagacttcacagacttagagcaatgcagagattgcattaagggtaaattcgcgaagcagattaagaaagatgctaagcatagtacgagagtgttagaaattattcatacagatatctgtggtccttttccagttaggacagtagatgggtttaattcgttcataaccttcacagatgactactctcgctacggttatatttatcctattaaggaaagatcagaagctttagacaagtttaaacagttcaaggctgaagtagagaatcaacacgatttgaagataaagattgttcgatcagatcgtgggggggagtactatgggcgtcataccgagtatggccaggtcccaggacctttcgcgaggttcctaagagaaaacggtattgttgctcagtattcaacacctggcgaaccacaacagaatggggttgccgaaaggcgtaaaaagaacgctaatggatatggtaaggagtatgctaagtttctctaacctgccattgggtctatg

SEQ ID NO: 62593 - DNA, 1155 bp, Zea Mays
gaattcattgccaacgtcgcgtcgcgtcgcgttaatgtgcaggagggcaaccaccagctacccctctctcttactgcttcgaacttgtctctccatattccttcccgcacgcccacatagaaacagaagttcacacacgaacaatactactactactataaatacaggagaatgttttgccgcatgtttttcattttaatttagtgcacgatttgttgcatcgtagccaactagcaacgacaacccagctagtgattcggttgccgccatggcttatttgctcaagagcaggagtaaaccagtgcagcagctgctggtacccgcgtcttcagaagaacagcagagaagggtaaatgaggtccgggagctccttggcgatctgccgacagagatgccgaacttcctttctgatgccactatccgccggttcctccgagcaagaaactggagtacgatgaaagctaccaagagcctcaaagaagctaccagttggcgacgtcagtacaagccagagaaaattcgttgggaaagcattgccgacagtgagaatgaggctaggagagcctacatacctgactaccttgacaagaaaggaagaatggtcttcgtaacacttccaacaataaagataatgaaacatttcctcgagccaaaaatggacgaaaaagtgaaatttgtgtacaacgacagttcggagagccagaagatactgggcgacatgttcgacctggacgagctggagcatatatttggaggaagaaacacggccgactttgacatcaatgtgtatgcagagagaatgaaacggcgagatcggatacggggagcttcgacagaggataatggcgaggccacctcttcccgatgttggacgaagaccacgagaaactccagttctgtttgaagagcgcagtaccactaatctggacgaaggttgaaactttagtgttatcctatatactgtatatgctctgagccacgcgagcgcggttatatgataaaactgcttagcatttatagttatgaacacaaagagtgttaactttaaggatctgcgactcgactcctaaaagaatgtaaaggctagttcggaagtttgagaaataaacctagggttcgaaaaatctttcataaataactaaatatcttattcaa

SEQ ID NO: 62594 - DNA, 1573 bp, Zea Mays
gaattcattgccaacgtcgcgtcgcgtcgcgttaatgtgcaggagggcaaccaccagctacccctctctcttactgcttcgaacttgtctctccatattccttcccgcacgcccacatagaaacagaagttcacacacgaacaatactactactactataaatacaggagaatgttttgccgcatgtttttcattttaatttagtgcacgatttgttgcatcgtagccaactagcaacgacaacccagctagtgattcggttgccgccatggcttatttgctcaagagcaggagtaaaccagtgcagcagctgctggtacccgcgtcttcagaagaacagcagagaaggaaagcaagcgaagaaagaaatgcattctggggttgatttttagggagcatgcaaatggcaacaagctgaatccccccggtcacttgtttggtaagggattgtgaggaatatagactccagatggatggcaaatccgtatcctggagtcatcctcctttcatacaagttaaccgtaaatgaggtccgggagctccttggcgatctgccgacagagatgccgaacttcctttctgatgccactatccgccggttcctccgagcaagaaactggagtacgatgaaagctaccaagagcctcaaagaagctaccagttggcgacgtcagtacaagccagagaaaattcgttgggaaagcattgccgacagtgagaatgaggctaggagagcctacatacctgactaccttgacaagaaaggaagaatggtcttcgtaacacttccaacaataaagtccaaatcttcagagaaggatcatctaaagtatctagtgtacaacttggaaaacctgctcatcgattgtgcagatgcagaagaggataacgttgtttggatctcggatttcaaaggctggtcaatatcaagcacaccattttcgttgacccgacaatcgctgcacataattcaacaatattatccaggattgatagcagttggtattctaaccaacgctcccaaaatttttgaatccttttggaagataatgaaacatttcctcgagccaaaaatggacgaaaaagtgaaatttgtgtacaacgacagttcggagagccagaagatactgggcgacatgttcgacctggacgagctggagcatatatttggaggaagaaacacggccgactttgacatcaatgtgtatgcagagagaatgaaacggcgagatcggatacggggagcttcgacagaggataatggcgaggccacctcttcccgatgttggacgaagaccacgagaaactccagttctgtttgaagagcgcagtaccactaatctggacgaaggttgaaactttagtgttatcctatatactgtatatgctctgagccacgcgagcgcggttatatgataaaactgcttagcatttatagttatgaacacaaagagtgttaactttaaggatctgcgactcgactcctaaaagaatgtaaaggctagttcggaagtttgagaaataaacctagggttcgaaaaatctttcataaataactaaatatcttattcaa

SEQ ID NO: 62595 - DNA, 565 bp, Zea Mays
caaaaaccttgcggacaaactggacatgttggggaatctaacctataagcaactaatgtcaaaaaacgcaaaatataacaaaaaatgtagtgggtcaatggagggcagggtgtattatcttcacattcatgacatgtcggttgatgtgtcaaacatataaccatcgttcagctgtccaatttcagcagctttcttagtagcttgaaaatagaagttgtattaatacagtaaaagaacgatcaaatgaacctagacgaaagagagcagtctaagtatcattccataagttgagaggttcgcacaagtaatgaggatatatttcctaagacgaagaaaatttggtactccatgctattgatggtcaattaagtaaaatgaacactgagatgtaaactaaaaataatttaccatccatgcataagaggtcatgattcatgatgttctgcaatttaccgaaccaagctgtagcttactaaactgtataagtagatatatgaatctcaatcatattctgcaactttgactttgatagtactaagtgaactacctctcccttgtgttcttt

SEQ ID NO: 62596 - DNA, 3068 bp, Zea Mays
aaaaacctgaagatgcatactataaaggtaatatttgtgcttatcggacaaagcgtatctggagtatgtacaggttgcaagatgtacaaatgacctgtcgtcgattcaaattagaatgtaaacatgtgaaaatgaagtaagaatgaaattagatttgtagtttgtacgttgatgaagaacgcaaacgctaaggatatcttaatataagatacatttaaaaattgtgtgtaggttcaagagaatagtagggggatcaatagatgtcaatcagtatagagtatgtgtgtgtaaatgtacttatgcataacaacatggtatcgatcgtatgtacttgagcacctattggaagcacatatttacatgtacatagaggttaaagtatggtaattacataggaaatctgatgaccatgcgtattgtagcaataatgatggatgaccgttgataagaggagtgattaattttatgtgtggtgagcaggtatgcatagttatttgtttaaacaaaacatgagtaatggagtaatatgtgacacatggttgtaaaaatatataatatttggtctagtaaccatactctttttcagaatagaagttacatgatgtctgaatttgctgttgaggtttcataatagtatttaaccacgcgttgggaaaaagtaaggaaggaatgtttttttagttatgcgtcttatgcgggttcaagcgaagtggaagtagtaaagaaataataatgtatctcagggtaattaaatctgaaaacatagacttttctatgcataacatggcattgaacaggtaatatgtgtacctgttctgtatagaagctgcaagctgtccaaaacggttgttcttgattcgaaacagcgagtaagaaatgaggtttaggagggatgtgcgctctgatgagtatggaaaaaatatgtaagagtttgtttattgaaaaaccataattgttctgaatgaagttgcagactgttagaatgcacaatgcaccttcttccaattccgaaatagtagatgactgggtgatgatgcgaaaaaatagcaatcaagaaatgagatttatattgtagaggcttacgacaataggtaacaattttgtttaattgaaaatcatacttgttctaaatgaaagtcagaaattgtcgaaattagttgttgaagatagatagaaggtgcaagttgtccaaattagctgctgacgtttccaaatagtgagtggctgcgaaaaaacagtaaggaagaaatgagatttgtggtctataggttgaggagggatgttattgtgtctgtacataaatatgtatgaatgaccaaccacataaacatggtgattgtacatttctccaggtaagcatcgcatgcgaaaaattcagaagttgtgtaatttgttgaagaatatggagaagaagcatgttaaattaggtttattagtaaagcatacatgttttggacagaagttgcaggctgtataaattgactcctaaaaattccaagaagtaagtgattgtaaaaaagtaaggaagaatttaggtttgtgctatataggttgaggggagttgtgaataagaaaaataaataaatggtttgtttgtacataaatgttttgtgtgaaggcaagggtcttctcaaagcttgtttataacagattccttcggttgtaagtaatacatattaattcagtgaacaaagcatcaggagatgagtaagaggcaatccatatggttattatcactcagagaatcaaagtaaaacaaaagggcaaaccaggccttagtgattaatcaatcatgatatgatattgatctctatcaaaacggacacaaactacatcacagaaaataggtcaagaggtgaacttacccctgagttcaattgattgcaatcagttagctacaaccccttcaaagtttagtgccacaaatagtggcgtcaaagtattgttgatggcatgcacttcaaagtagatatcacaatggacctcctagaagtgaggattgtcaacactaaaattggggaaatccatatgttgaggatctgggaggcagtgactgggtgcagcgaatgagttccaaggatcctacgagagcaaataatttttgtcccaagaatcagcattgtctgagtaccgattatcacaatcatagatagctagagtagatttgaagggaatttagaaagaatttgggagataacttagagagatgtcggatcacgacagatattgtgagaatgttgagttcagagttctctgaataggcacattctcacctttatctcatcaagcaccacctgttcttggcttgcagatttgtctccttacgtaccctcatcatcaagcaatgggaaaagcaggatctagtttgcaagtgtttttgataatagtagatgtgttttattgtaataaattgtattattaacttgccctcaaaataatagaagcgtcatttgtctttgaattatttaaagatggatgtatagttcgttttgaatcagcaatagatttttatctatcataaaacctgatagcaattgtgatctattttatcattccttctgtacgctacggtctttttctctaatgaacacttaattgacctcctcactttttaactcaatgcagaagatggagtttgaggaggtaaactaaactatggctggactctacacactggattaacaaaccttctcatatgacattttgaaaatacagatggtctagcctagcaagttttctgtaaatacacatataaattctgaattagtagtaagagggttcctgaacgttactcttaattcgtctttgttaattaaatctagtttatattgggtctaggagtcacaaactaaccatagcggtggaatgaacaaatgggtcatgatggatattgagagaggagggccaatgcatgtggcaagcaaaaaaataatgacacttttcaggtgcctaaatgaatcatatttcatgataggtattaaggaactccttaccaaaacctgaaggcagtcttgaaaccatgagattctatctagacgaagacttgatgaatgttcatctcattgaac

SEQ ID NO: 62597 - DNA, 539 bp, Zea Mays
gattattttatgtacaaacttgttgagacattaaaacattggttgcaaaagatggcatatcataagtgtaaaagtatacttgttttgacaaccatgtttaatctacatcgatatcctatatgtggcaaaagaaagaaagtccagaaggaacttgtgaagcaactatactgaagttcacaaaaggtaacatcaagcacaaagagttgtcatttcaaacaaccacatttagtcttgatgggagctccctttcttcagccaaaatttatgttttgtaaagcagtaagtagcgatagaatatgatcatttaatttgaaaatgcaaatgtataatacatttttaatatagcaatttttatttaggtacgctacaaatttaatacatatgtaaccacgtaaacatcagtagtagtgcatgtatgactgtctggaaacataagcatttgcatatctctaactgagcatttgtttttgaagggttttcttgtgtgcacacaaacataatctattactgaatgcaaactgagcaggaaaactgagcaa

SEQ ID NO: 62598 - DNA, 1333 bp, Zea Mays
aacaagaaaaaagtatactcaaatgccatttaccgatttacatattgcaacatctatcaagtaacagcaaaactgtggtatcaggtaaaatgctcttctgtttgtcgccttagcccttatcagacctgagttcatacagccattaaactgcaatcaaacaatccggtatacctatacattgtagccacattctaattttttaacagctacaatccataaagccaccaaggataattattttgtgcaacatcttgaaattttataaacataaatgtgtactgcagtatcctcatagctggatgttttataaggctcttactttggttcatgttgttcaacattctcagtaagtagcatctcatattgtgcaaagtccatttgccatggaagtacatatcttgcattaatacatctctatgcaaagcaccagtactgaatctcaaattggcaagaaatgattcagtttcctccaaaaatatgcacaaatttccataccgagctacctatacatgtgatgcaggttgcaatttggatttgtgtaactccaaaatggaatccataccaacatgtggacagtgatatcctaagagtggtcaagtttttcatacgagcccatgtaggtaggtttgatgttggcaatcaccagttctcatgcagctgtacaatactagaaacaagctgattgtgttcaaacaccaccatatcaaccatgcagtcttactgcatgttcagcaactagcaaagctcatgataaagactgcctgataaatattagaccatagaacaccttaagattctatacttgatcctcccccaagcttgtcgatccaatttttcatttcaaatatgctactgacaactattcccgtgagatccattcttccaatgacactttaatcttcaactcatgcatacaatgcaagtttccattattcatatcattcaaccaggactgactgttgtaatcttgcagagtagagagtacgttatcactgctttggatgcctcagaataaaaatcttatgaagcttgtacacacatgtacatcgaagtatggttcagacaacatttccgtctttagggcatttctatcgtgctgtagctttcagtgatttctccttttgtcttggatctgacgaacacattcagcaaccaaaacactgaactttagggtgaccttgcctgtaaggggtgggttcaagccaaccttcttataagcttgtgcaatgtttttctggcatttttgcaagtgaatattacagagggagggagctgcagactttatgatcggcctactacaggggataagcccaccttgtagcccactggaaaa

SEQ ID NO: 62599 - DNA, 1698 bp, Zea Mays
ggaaaataatacgcataaattgaatataatagtaaaaaagatggaatacaaatcagagcataagataaacaagaaaaaagtatactcaaatgccatttaccgatttacatattgcaacatctatcaagtaacagcaaaactgtggtatcaggtaaaatgctcttctgtttgtcgccttagcccttatcagacctgagttcatacagccattaaactgcaatcaaacaatccggtatacctatacattgtagccacattctaattttttaacagctacaatccataaagccaccaaggataattattttgtgcaacatcttgaaattttataaacataaatgtgtactgcagtatcctcatagctggatgttttataaggctcttactttggttcatgttgttcaacattctcagtaagtagcatctcatattgtgcaaagtccatttgccatggaagtacatatcttgcattaatacatctctatgcaaagcaccagtactgaatctcaaattggcaagaaatgattcagtttcctccaaaaatatgcacaaatttccataccgagctacctatacatgtgatgcaggttgcaatttggatttgtgtaactccaaaatggaatccataccaacatgtggacagtgatatcctaagagtggtcaagtttttcatacgagcccatgtaggtaggtttgatgttggcaatcaccagttctcatgcagctgtacaatactagaaacaagctgattgtgttcaacactattaagttgcatgcattaaccagtccaatccaaaaactttagctaatagaaataagtggtcaattcacttatattatattccaacactccccctcacgtccagactttttctcggtctcagatgtggaataagagtgagcaacaattatttttattttaattgcgctaattaggatttgaattcgaaacctctgactccaacatcatattaagttgcatgcaccaatcagttaaatccaaaagtttaatctgatatgaagaggtggtaaattcacttatattatatttcaacaaacaccaccatatcaaccatgcagtcttactgcatgttcagcaactagcaaagctcatgataaagactgcctgataaatattagaccatagaacaccttaagattctatacttgatcctcccccaagcttgtcgatccaatttttcatttcaaatatgctactgacaactattcccgtgagatccattcttccaatgacactttaatcttcaactcatgcatacaatgcaagtttccattattcatatcattcaaccaggactgactgttgtaatcttgcagagtagagagtacgttatcactgctttggatgcctcagaataaaaatcttatgaagcttgtacacacatgtacatcgaagtatggttcagacaacatttccgtctttagggcatttctatcgtgctgtagctttcagtgatttctccttttgtcttggatctgacgaacacattcagcaaccaaaacactgaactttagggtgaccttgcctgtaaggggtgggttcaagccaaccttcttataagcttgtgcaatgtttttctggcatttttgcaagtgaatattacagagggagggagctgcagactttatgatcggcctactacaggggataagcccaccttgtagcccactggaaaa

SEQ ID NO: 62600 - DNA, 3949 bp, Zea Mays
gtcaccgccacggctttcccggtcggatccaccgttgccacgactttcccgactggatctgtcgtccctttggccggatcatcgtcttcgtggctggatccgcagttgccttcccgaccggatccgccgtagccccttctactctgtcgcgggcgtggctaccctgaccagcgcagacgcgtgcgctgccgccagcctccctggcgaggctccttgatgaccgaacggggaaagaagcacgaaggccctgaggctgctgttgtcccttttgcatcgcaccaccgatcgttgacgctcgaatgtcgacccctcccgaagaacaggctactgtcgtgtgtctcccaaccatggccacctcgacttcggttacctcggcatctaagggctatcgtcttcttggagtgcacaccagtctctactccaatcgcaacattcgcaccctaacaacgctgcgagtgaggggggatttcaacccgtcggctcctaccttcggcttctactccaatctcatcatgtgtggtgcccccattgcgactgcgttgggatgttagacagtgtgtgtactctgtgtgggggggcgacaccactgttgggttgcatgcccattagggttagagttctgagtctatatatatgtaccccatttcctatgtgatacatcaagtacttcacaattttacagttgggaactccctaatgatactaattatacacaataaatattaatattttcttttatgtattttgtcaaagttgaaaatgtttgacttcttagggggagagaatgacactatggaactgaaggagtagatatctactttaggggaagttaaagccatacaatttgtttgaaattgctagcaattagtttaggtatcaagaatgagaacataagttaacctcactgtatccatcttcactattgtatactggagctactttaattttatactaactccggtcatctttatttggtatttcagacaatgattctgatttgcatgtacatttatttgcttgtatgaaacatgaactaaaattgacagcgagaacatgtcactgaattcatgcatattgcatgtgatgccttaattctaaaaccatttttgacacactggaaaattggtttagctgaaccaagagaagcacaagcaggaaagaaaacttacttggtcagcttcatatcgtcggtatggaagaattaactgtaatacatacagttatatcagatgacagttgatacaatatgagcaaatgaaatatttattgagaagcaaccatcaaggacaatacacttttgtaaagccataggtacataggcaagaaggtaaagaatatattgttactccaataaaaggcaactgtcagaacattttgtgtggaataatatagggaagagttaaatgcatgaccagcctccgaacatgttgaggggcacttaggctatctccagcagcttactcatccccagaccccatccacatccccatattcaaactccactctgcgaacagtgcagtttacagtgcaaaacagtgttttgcgtgagtatatgggtgaactgctgaagacggtcttaggtccatgaacttcgaaaatgcatttttaggtccctaaacttgttaagtgatgcaccggtggttggtatggtccggaaatggacctacgatacaccgtttaacaagtttatggacgtgtggtccaccactgacaagtttgcggatccaaaaatacattttctaggtttggggacctaagtgcatttaactcaataggaaatgcttacaaaatttaaattctctttcttcactaagggatggtctcttttcattttgcataaactcctgctctttatatttaccaggttttttttacaataaactttgtttttctcgaacacgcataactgtggaagagaatctggaaagtttgttcataggtgctgtataattcagactgtgggggagaatctggaaaaattgggctcccgccaaatgtaattcatgtcattggtcactcatgataagtgctggatcgccgatcacttagctagaagggaactggatcatcaggctgaagaatcaaatgatcatttacttattttgtgtgtatttggtagacaagtatggtatatcctcctgcagaaagtatgcttgcaagatttaacccatcaaccagatgattggcattccgatgattggtgggccaaatctaatgaaagagtggatggtcaagtccagaaaggcttgaactccattatcatccttgcagcatgggcaatctggaatctccgcaatcgatgtgtaattgatgggatcttgcctagtttgaatggggttttagaggtcatcagggagcagctatatttctggtatcaaaaatagtgtgacgcctggtgggaatttctcagtgaggctgcacctggtccttttaaaaaaaggcacgataccctcattgctttgggcgcttggatgatctggaatcaccggaacaaatgtgttttgatggtttaacccccaacatagctcttgttttaaggcaggcaggagaggagtgtaggatgtgggagatggtcggagccaaaggccttgcctactcatagccacctctcaagtgcttaatgcagttagccaggtcgctgttgtagattactgatcagattatgaatccttttatgtttctttgttttcggctaccttaaggaggccctgtacctgtcctgttctggtctatgttggacccaccttttcttcttaatatagtgatgtgtagctctcctgcgcgttcgggggaaaaaaactggcaccctcgctatctggatcgtccatgcgattggcacgtctactttaacagaaggcagccaacggtgccatggtaaaaaaatacttaaagcagataacaattggtcatatattggatttctctgtaatggcagatggtgttgtgttgtcgattggtcttccagaatggctgatgtatacctggtttttatgtaatacaaattcatattccgtttcaatttgtgcggcttcatatgatgtactacaatgcttcacttgatggttcctattttattttgccttacaaaattatatgtaccttctacccatcatgcaatcaaaggaggaacttgtttcttttgcaccaaaactttccaatccatagaagactcttcaaacgctggttcaattagtttgtgtgtttctaatacaaagtttgcaaactaaaccatgattcaaatttatagcagatagaactttgatcagaaataaatggaatacatgtgttgtctgcaactgaaaaattatggtactataccatggaattgggcatacaaaagttatgtaattggcaattgttcaatagggaagaatgcagtccagaaaaatatgatataatagcagtctggacagcagcctaaacacatatctctgcttaacagaagttatacaagtacaaatgtgatcttttactgaactctccaaacatttgctgccattactctccatctgagcaacttttgacaggttaatccaacggtacagatagggagggcaccagcccaccagggagccaaatccatactcttctggtatttagctggggctcgaggggtttcgcatctcctcgcccttgggtccagcattagttagcttgttggtcgaggctgtttagtgtttgcagtctttggcgagtttctttttcctttgcttttgtatgtgtgatctgtctgtgtggcggggttgtgtgatgttgtttgggttcaatgaccttttcttctcaatatattgatatattgacacgcagatcccttgcgtattaaagaacaaaaaagtcccccatccaaaggtgcttaggccctagggatccttggagcctttgtgcatttgtgtttggggcatttgggaggtgtcccttctcgagtcaggttatgttaattcaattattt

SEQ ID NO: 62601 - DNA, 840 bp, Zea Mays
ggcgaggggattctgcaggtcctagagatgcttgcgacaagtcattacctctcctttaggtcgtcgctgataatagaggaaaatgcaaaccaacattggagttccatcatcaacaagcttgaaacaccaaccaagacagtcactcctgttattccgcagtgtgatgggattcaagatgactacaatgatcaatttttctttccaggagttccaactgaagattataatacccctggagaatctgctgagtatcgagctcctacacctgctgttggaacaccaaaaccaagaaatgatgctggagatgataatgatgatgacgatgatgatgaagaacctcctcttaatgaagacgacgacgacgacgatgatttagatgaccttgaggaaggggaggatgaacctaacacacaacatcttgtacttgcacaatttgacaaagtgacgaggaccaagaatcgttggaagtgcactttgaaggatggaatcatgcatttgaatggtagggatgttctatttaacaaggcgacaggtgagtttgatttttgactttttggatgaagatgagctattttagaagcagctgtatggacatatcttgtcttagacataaggacggggaggtgacgaagtgttcttggtggggtgctggcagtatgactgcgtcgtgttttcctattgagactttgtttcaccctcttgtttgtcaccgcaattgttatcgctgtaaagaagttaccgcttgtgctgtggacattttctgagatgggtgtctcacatccgcagcgtaactaatgctagttatacatttttgtctctaaagtcagttttggtgctgta

SEQ ID NO: 62602 - DNA, 1047 bp, Zea Mays
cgccttacacttttttgcttaaaagttaaaaagcggggtgttgccttaactcgccttaccgccttaataactatatggtatgaactctcttatgtggagttcaactagtttaacctgggacagtgcaaggacaattatgtattagcagctcggcaataggactttttgacgatgtcttctggaaaacgcaagagggatgagtatcctggtcagctcccttctggttcttttgtaccacagcaagatggaagtgctgatcagatagtagaatttgttgtgtcaaaggaaaatgcaaaccaacattggagttccatcatcaacaagcttgaaacaccaaccaagacagtcactcctgttattccgcagtgtgatgggattcaagatgactacaatgatcaatttttctttccaggagttccaactgaagattataatacccctggagaatctgctgagtatcgagctcctacacctgctgttggaacaccaaaaccaagaaatgatgctggagatgataatgatgatgacgatgatgatgaagaacctcctcttaatgaagacgacgacgacgacgatgatttagatgaccttgaggaaggggaggatgaacctaacacacaacatcttgtacttgcacaatttgacaaagtgacgaggaccaagaatcgttggaagtgcactttgaaggatggaatcatgcatttgaatggtagggatgttctatttaacaaggcgacaggtgagtttgatttttgactttttggatgaagatgagctattttagaagcagctgtatggacatatcttgtcttagacataaggacggggaggtgacgaagtgttcttggtggggtgctggcagtatgactgcgtcgtgttttcctattgagactttgtttcaccctcttgtttgtcaccgcaattgttatcgctgtaaagaagttaccgcttgtgctgtggacattttctgagatgggtgtctcacatccgcagcgtaactaatgctagttatacatttttgtctctaaagtcagttttggtgctgta

SEQ ID NO: 62603 - DNA, 911 bp, Zea Mays
ctgaagattaatttgaatcacaagactttttgacgatgtcttctggaaaacgcaagagggatgagtatcctggtcagctcccttctggttcttttgtaccacagcaagatggaagtgctgatcagatagtagaatttgttgtgtcaaaggaaaatgcaaaccaacattggagttccatcatcaacaagcttgaaacaccaaccaagacagtcactcctgttattccgcagtgtgatgggattcaagatgactacaatgatcaatttttctttccaggagttccaactgaagattataatacccctggagaatctgctgagtatcgagctcctacacctgctgttggaacaccaaaaccaagaaatgatgctggagatgataatgatgatgacgatgatgatgaagaacctcctcttaatgaagacgacgacgacgacgatgatttagatgaccttgaggaaggggaggatgaacctaacacacaacatcttgtacttgcacaatttgacaaagtgacgaggaccaagaatcgttggaagtgcactttgaaggatggaatcatgcatttgaatggtagggatgttctatttaacaaggcgacaggtgagtttgatttttgactttttggatgaagatgagctattttagaagcagctgtatggacatatcttgtcttagacataaggacggggaggtgacgaagtgttcttggtggggtgctggcagtatgactgcgtcgtgttttcctattgagactttgtttcaccctcttgtttgtcaccgcaattgttatcgctgtaaagaagttaccgcttgtgctgtggacattttctgagatgggtgtctcacatccgcagcgtaactaatgctagttatacatttttgtctctaaagtcagttttggtgctgta

SEQ ID NO: 62604 - DNA, 1433 bp, Zea Mays
aacagtttctggatgaaaaggaggctgagatacatcagaaaaaggattgcgcaggagatccaaaagaagccagaaaaggagggaatggactcagaactggaaaagaacaaaacgatggatggggatgttggtaactcaagatcctatggtgatccagttgcctctgctttaaacagtacaaatttcaatatcgaggaagaaaaggacaatgatttcaagcgcacctcaagaccaaaaaataggttgtaaggatgccacaaaaatgatgcttgttgttaaggagatattcacatgccaaattcaggttgtaaggatgccacaaaaatgaagacctttgttgtagtgacataaggagtttcgaaactgcaaggaattttaaatttgaatatttttcagtgagatgttaaggtagataaagttgttgagttagatgaaacaaaaaaagaggcactgatcgttaagacgacaatacatgatatcatgaaccaaatgattcgggaacttccaataaccaatccaatatacctcatgctaggcacatcatttggttcctcagctaaaggaactgggcttaaagctcttgaatttgccctctccatctgtgacagttttgatatgtatggcttcaccgtagacccaggttacaaggaatggacaaggtacttctcagaggtaagaaagggacacactccactacatggtagagcatattatcagatgatggaatgtcttggtctggtgaaaatccattcaccgatgcgaggagatcctggcaggacagtgaggtggctgcctaccaaggctaccatcgaggctgctagagttgcttccgagaagttgttgaagagacctggtgctggaagtgatgatcctctggggacttgcaccatgataaagaagcgcaggaaagggaaggcgccaaacagatctggtctatgagatgctgccatgaagcacctcgaggacatgaaagatgccaccaggtatcccttggagcggaatgcagggggtggttacctctgcatgatcaatgatagatacgaccgcgactgattatggcatcagtgccccctcccccctcccctccacttgagtcgaagaaaggaatgcttgtgataaacttgcagtttgagggaacgaaaaggtcgattctttgatttatgcagctggtgtacaacttttgagtgtagtgaaagttaggtgtaatgttttgagtgtagagaaagctatatgttgtggatggatacgaatggtcaaattgtagcacttttggtgcttataatactaataggtgagcgcctgtacgttgcaacgaagacatataatacacacattttatatataagtcactgtgatattatatgtccccgttgcaacgcacgggcacttacctagttatgatatgaagaatgtaagggggtaggctgccaccc

SEQ ID NO: 62605 - DNA, 3591 bp, Zea Mays
cttccttctccgaacagcagagagcagacgtgcacccgtccgtctgcacattgtcactccatgcttcaaatatccatgaaccccctgctcacccttctcctcctcctcatcacttctcttcacgctccaccatgctcctccgcctccaccaccactgcagcgacggcgactgacaccctagcggcaggccaagcgcttgcctccggcgacaggctcgtctcgaggaacggcaagttcgcgctcggcttcttccagccaacaacagccgtggtcgccggcggtccaaggaagctacgatggcgaacctgtctaacgactttgtgtaaaattcagttttttcatacgatggttattgcacatatatatactatactaaaattgcagattcaatttgttccctgactcgggacagcccgacgacgttgtcctcagcgttgccacctccatctggctgccccgtctcggcgaccatgtcttcgcctttggccgcgacaagaaagtgtgcttctagtgggaggttctgtcacacgacaatcaagttcaagaagtgtcgcgcattcccaatggctccaaccccggcaactgcatctccctgctaaggacatgtctatcgttggcgatcttgacaatggcgatgatgaattgatggtggcgtgcaacgtcacagggcctgaacatgaaccagaatagcatgttgatccttcaggagagctgacaaacttctactacacaaggcttctgaagttcacatcaataatgttctaaaaatggtctgcagaaggtccatctctgcatatggcattggttttctactattatctaggactgcattgctattgctttagtggacaaattgaagctaaagattgatcatgatgtacaacagcacaatgaggagtcagactacatgggtaagtagcattatgcaatttccacattattgtgaggcgaatggtgcgtttttcgatggttttcattatttgcttgtcttatattacaagcagcatggatgttctttcatcccatcgtattgtggcactacagaattattgatgatcaacatgcgggtccagtagtttaattctagataacacacatttatgcggcaaaagaagctattgtagttttgctttgtttcttttttgcaaggatagctaaattacttgaacatgtgtatagttcacatctcatgtcttgtttttcttgtatggtagaaacatggagttctattctccatgttttcctttttcccacatatattcattaaatctatactaatataaagggagactttctccactccattcgtgtgttacccctctccactccctacttaaacggtaaaaataaattaaaattatgcacaagtggagatttgaacatcgatcgttggctccaaatagattcacacccacctatccagcagaacatacatattttttttatgttttataatatatactcaaacataatataagatttgaaaaatagggaaaataagttgtagcaatgcatgggcacttaacttgtggatgcagacatgttcacacagagtgtttttgccattctatcatataatgttttggtcattttgacatgaggtgtttcggccattcggtcacaggcaacaactatattgtgttttggcttctccgagataagtattccctgtacatattctcttccatagaccaatactttatcaacctccactagcttggcctctacaccagttgccaagagtaagctagatgaatcttgtgacaaattgttttgctgagggtacttgaaacatcgtggtctgttacacacttagacacttcaaggttacaaggcattttacttcttggtttataaaacataccatgcccatccttgagtccactctcgcatgtaccaatgtaacatgctcctgatgcatatttacaaaaaaaacatacaagtcctgtgcgttgctatagtttttatatatcatataagagaaaatataaactgtgggtctccagcttcacacaattttgtaggactttgcacttcatgtacaggaagatcctaccaaatttgacagtgatgctaagaacttaggaaggaccgagtttccagcagatgaagatgctcagtgttggtgaatgtgtaaagaacacagtgaagttcatgaaggagctctggagccttctcctcagtgcgcagcagaatgccagtggtgtgcctcaacagtttctggatgaaaaggaggctgagatacatcagaaaaaggatgacaggattgcgcaggagatccaaaagaagccagaaaaggagggaatggactcagaactggaaaagaacaaaacgatggatggggatgttggtaactcaagatcctatggtgatccagttgcctctgctttaaacagtacaaatttcaatatcgaggaagaaaaggacaatgatttcaagcgcacctcaagaccaaaaaataggttgtaaggatgccacaaaaatgatgcttgttgttaaggagatattcacatgccaaattcaggttgtaaggatgccacaaaaatgaagacctttgttgtagtgacataaggagtttcgaaactgcaaggaattttaaatttgaatatttttcagtgagatgttaagaaacaaaaaaagaggcactgatcgttaagacgacaatacatgatatcatgaaccaaatgattcgggcacatcatttggttcctcagctaaaggaactgggcttaaagctcttgaatttgccctctccatctgtgacagttttgatatgtatggcttcaccgtagacccaggttacaaggaatggacaaggtacttctcagaggtaagaaagggacacactccactacatggtagagcatattatcagatgatggaatgtcttggtctggtgaaaatccattcaccgatgcgaggagatcctggcaggacagtgaggtggctgcctaccaaggctaccatcgaggctgctagagttgcttccgagaagttgttgaagagacctggtgctggaagtgatgatcctctggggacttgcaccatgataaagaagcgcaggaaagggaaggcgccaaacagatctggtctatgagatgctgccatgaagcacctcgaggacatgaaagatgccaccaggtatcccttggagcggaatgcagggggtggttacctctgcatgatcaatgatagatacgaccgcgactgattatggcatcagtgccccctcccccctcccctccacttgagtcgaagaaaggaatgcttgtgataaacttgcagtttgagggaacgaaaaggtcgattctttgatttatgcagctggtgtacaacttttgagtgtagtgaaagttaggtgtaatgttttgagtgtagagaaagctatatgttgtggatggatacgaatggtcaaattgtagcacttttggtgcttataatactaataggtgagcgcctgtacgttgcaacgaagacatataatacacacattttatatataagtcactgtgatattatatgtccccgttgcaacgcacgggcacttacctagttatgatatgaagaatgtaagggggtaggctgccaccc

SEQ ID NO: 62606 - DNA, 3710 bp, Zea Mays
cggcctcgatcttcttccttctccgaacagcagagagcagacgtgcacccgtccgtctgcacattgtcactccatgcttcaaatatccatgaaccccctgctcacccttctcctcctcctcatcacttctcttcacgctccaccatgctcctccgcctccaccaccactgcagcgacggcgactgacaccctagcggcaggccaagcgcttgcctccggcgacaggctcgtctcgaggaacggcaagttcgcgctcggcttcttccagccaacaacagccgtggtcgccggcggtccaaggaagctacgatggcgaacctgtctaacgactttgtgtaaaattcagttttttcatacgatggttattgcacatatatatactatactaaaattgcagattcaatttgttccctgactcgggacagcccgacgacgttgtcctcagcgttgccacctccatctggctgccccgtctcggcgaccatgtcttcgcctttggccgcgacaagaaagtgtgcttctagtgggaggttctgtcacacgacaatcaagttcaagaagtgtcgcgcattcccaatggctccaaccccggcaactgcatctccctgctaaggacatgtctatcgttggcgatcttgacaatggcgatgatgaattgatggtggcgtgcaacgtcacagggcctgaacatgaaccagaatagcatgttgatccttcaggagagctgacaaacttctactacacaaggcttctgaagttcacatcaataatgttctaaaaatggtctgcagaaggtccatctctgcatatggcattggttttctactattatctaggactgcattgctattgctttagtggacaaattgaagctaaagattgatcatgatgtacaacagcacaatgaggagtcagactacatgggtaagtagcattatgcaatttccacattattgtgaggcgaatggtgcgtttttcgatggttttcattatttgcttgtcttatattacaagcagcatggatgttctttcatcccatcgtattgtggcactacagaattattgatgatcaacatgcgggtccagtagtttaattctagataacacacatttatgcggcaaaagaagctattgtagttttgctttgtttcttttttgcaaggatagctaaattacttgaacatgtgtatagttcacatctcatgtcttgtttttcttgtatggtagaaacatggagttctattctccatgttttcctttttcccacatatattcattaaatctatactaatataaagggagactttctccactccattcgtgtgttacccctctccactccctacttaaacggtaaaaataaattaaaattatgcacaagtggagatttgaacatcgatcgttggctccaaatagattcacacccacctatccagcagaacatacatattttttttatgttttataatatatactcaaacataatataagatttgaaaaatagggaaaataagttgtagcaatgcatgggcacttaacttgtggatgcagacatgttcacacagagtgtttttgccattctatcatataatgttttggtcattttgacatgaggtgtttcggccattcggtcacaggcaacaactatattgtgttttggcttctccgagataagtattccctgtacatattctcttccatagaccaatactttatcaacctccactagcttggcctctacaccagttgccaagagtaagctagatgaatcttgtgacaaattgttttgctgagggtacttgaaacatcgtggtctgttacacacttagacacttcaaggttacaaggcattttacttcttggtttataaaacataccatgcccatccttgagtccactctcgcatgtaccaatgtaacatgctcctgatgcatatttacaaaaaaaacatacaagtcctgtgcgttgctatagtttttatatatcatataagagaaaatataaactgtgggtctccagcttcacacaattttgtaggactttgcacttcatgtacaggaagatcctaccaaatttgacagtgatgctaagaacttaggttatattttttttaaactccattcttgtgttagtatggcctcattttgttgattagtctacgtatcatttcaattccttaccaggaaggaccgagtttccagcagatgaagatgctcagtgttggtgaatgtgtaaagctgacagggttcatggaaaagaacacagtgaagttcatgaaggagctctggagccttctcctcagtgcgcagcagaatgccagtggtgtgcctcaacagtttctggatgaaaaggaggctgagatacatcagaaaaaggatgacaggattgcgcaggagatccaaaagaagccagaaaaggagggaatggactcagaactggaaaagaacaaaacgatggatggggatgttggtaactcaagatcctatggtgatccagttgcctctgctttaaacagtacaaatttcaatatcgaggaagaaaaggacaatgatttcaagcgcacctcaagaccaaaaaataggttgtaaggatgccacaaaaatgatgcttgttgttaaggagatattcacatgccaaattcaggttgtaaggatgccacaaaaatgaagacctttgttgtagtgacataaggagtttcgaaactgcaaggaattttaaatttgaatatttttcagtgagatgttaagaaacaaaaaaagaggcactgatcgttaagacgacaatacatgatatcatgaaccaaatgattcgggcacatcatttggttcctcagctaaaggaactgggcttaaagctcttgaatttgccctctccatctgtgacagttttgatatgtatggcttcaccgtagacccaggttacaaggaatggacaaggtacttctcagaggtaagaaagggacacactccactacatggtagagcatattatcagatgatggaatgtcttggtctggtgaaaatccattcaccgatgcgaggagatcctggcaggacagtgaggtggctgcctaccaaggctaccatcgaggctgctagagttgcttccgagaagttgttgaagagacctggtgctggaagtgatgatcctctggggacttgcaccatgataaagaagcgcaggaaagggaaggcgccaaacagatctggtctatgagatgctgccatgaagcacctcgaggacatgaaagatgccaccaggtatcccttggagcggaatgcagggggtggttacctctgcatgatcaatgatagatacgaccgcgactgattatggcatcagtgccccctcccccctcccctccacttgagtcgaagaaaggaatgcttgtgataaacttgcagtttgagggaacgaaaaggtcgattctttgatttatgcagctggtgtacaacttttgagtgtagtgaaagttaggtgtaatgttttgagtgtagagaaagctatatgttgtggatggatacgaatggtcaaattgtagcacttttggtgcttataatactaataggtgagcgcctgtacgttgcaacgaagacatataatacacacattttatatataagtcactgtgatattatatgtccccgttgcaacgcacgggcacttacctagttatgatatgaagaatgtaagggggtaggctgccaccc

SEQ ID NO: 62607 - DNA, 4008 bp, Zea Mays
ctcgtcttctcttgcatctccttccttccagttcctatcctatcctatataggagcacccggcctcgatcttcttccttctccgaacagcagagagcagacgtgcacccgtccgtctgcacattgtcactccatgcttcaaatatccatgaaccccctgctcacccttctcctcctcctcatcacttctcttcacgctccaccatgctcctccgcctccaccaccactgcagcgacggcgactgacaccctagcggcaggccaagcgcttgcctccggcgacaggctcgtctcgaggaacggcaagttcgcgctcggcttcttccagccaacaacagccgtggtcgccggcggagaggaaggcgaagatacgcaatggggctatagaggatggtccaccgtagatggaggcagatatatttgcttccttggttttgattcgcaataggcgcctcgttgtttcctcggaatttttgcttctgttgcctttgctccgtcaaatccgaggttcttgatcaatcccagtgctctggtttcgttgtttttcaggtccaaggaagctacgatggcgaacctgtctaacgactttgtgtaaaattcagttttttcatacgatggttattgcacatatatatactatactaaaattgcagattcaatttgttccctgactcgggacagcccgacgacgttgtcctcagcgttgccacctccatctggctgccccgtctcggcgaccatgtcttcgcctttggccgcgacaagaaagtgtgcttctagtgggaggttctgtcacacgacaatcaagttcaagaagtgtcgcgcattcccaatggctccaaccccggcaactgcatctccctgctaaggacatgtctatcgttggcgatcttgacaatggcgatgatgaattgatggtggcgtgcaacgtcacagggcctgaacatgaaccagaatagcatgttgatccttcaggagagctgacaaacttctactacacaaggcttctgaagttcacatcaataatgttctaaaaatggtctgcagaaggtccatctctgcatatggcattggttttctactattatctaggactgcattgctattgctttagtggacaaattgaagctaaatttaccttgcaggattgatcatgatgtacaacagcacaatgaggagtcagactacatgggtaagtagcattatgcaatttccacattattgtgaggcgaatggtgcgtttttcgatggttttcattatttgcttgtcttatattacaagcagcatggatgttctttcatcccatcgtattgtggcactacagaattattgatgatcaacatgcgggtccagtagtttaattctagataacacacatttatgcggcaaaagaagctattgtagttttgctttgtttcttttttgcaaggatagctaaattacttgaacatgtgtatagttcacatctcatgtcttgtttttcttgtatggtagaaacatggagttctattctccatgttttcctttttcccacatatattcattaaatctatactaatataaagggagactttctccactccattcgtgtgttacccctctccactccctacttaaacggtaaaaataaattaaaattatgcacaagtggagatttgaacatcgatcgttggctccaaatagattcacacccacctatccagcagaacatacatattttttttatgttttataatatatactcaaacataatataagatttgaaaaatagggaaaataagttgtagcaatgcatgggcacttaacttgtggatgcagacatgttcacacagagtgtttttgccattctatcatataatgttttggtcattttgacatgaggtgtttcggccattcggtcacaggcaacaactatattgtgttttggcttctccgagataagtattccctgtacatattctcttccatagaccaatactttatcaacctccactagcttggcctctacaccagttgccaagagtaagctagatgaatcttgtgacaaattgttttgctgagggtacttgaaacatcgtggtctgttacacacttagacacttcaaggttacaaggcattttacttcttggtttataaaacataccatgcccatccttgagtccactctcgcatgtaccaatgtaacatgctcctgatgcatatttacaaaaaaaacatacaagtcctgtgcgttgctatagtttttatatatcatataagagaaaatataaactgtgggtctccagcttcacacaattttgtaggactttgcacttcatgtacaggaagatcctaccaaatttgacagtgatgctaagaacttaggttatattttttttaaactccattcttgtgttagtatggcctcattttgttgattagtctacgtatcatttcaattccttaccaggaaggaccgagtttccagcagatgaagatgctcagtgttggtgaatgtgtaaagatccagctgacagggttcatggaaaagaacacagtgaagttcatgaaggagctctggagccttctcctcagtgcgcagcagaatgccagtggtgtgcctcaacagtttctggatgaaaaggaggctgagatacatcagaaaaaggatgacaggattgcgcaggagatccaaaagaagccagaaaaggagggaatggactcagaactggaaaagaacaaaacgatggatggggatgttggtaactcaagatcctatggtgatccagttgcctctgctttaaacagtacaaatttcaatatcgaggaagaaaaggacaatgatttcaagcgcacctcaagaccaaaaaataggttgtaaggatgccacaaaaatgatgcttgttgttaaggagatattcacatgccaaattcaggttgtaaggatgccacaaaaatgaagacctttgttgtagtgacataaggagtttcgaaactgcaaggaattttaaatttgaatatttttcagtgagatgttaaggtagataaagttgttgagttagatgaaacaaaaaaagaggcactgatcgttaagacgacaatacatgatatcatgaaccaaatgattcgggcacatcatttggttcctcagctaaaggaactgggcttaaagctcttgaatttgccctctccatctgtgacagttttgatatgtatggcttcaccgtagacccaggttacaaggaatggacaaggtacttctcagaggtaagaaagggacacactccactacatggtagagcatattatcagatgatggaatgtcttggtctggtgaaaatccattcaccgatgcgaggagatcctggcaggacagtgaggtggctgcctaccaaggctaccatcgaggctgctagagttgcttccgagaagttgttgaagagacctggtgctggaagtgatgatcctctggggacttgcaccatgataaagaagcgcaggaaagggaaggcgccaaacagatctggtctatgagatgctgccatgaagcacctcgaggacatgaaagatgccaccaggtatcccttggagcggaatgcagggggtggttacctctgcatgatcaatgatagatacgaccgcgactgattatggcatcagtgccccctcccccctcccctccacttgagtcgaagaaaggaatgcttgtgataaacttgcagtttgagggaacgaaaaggtcgattctttgatttatgcagctggtgtacaacttttgagtgtagtgaaagttaggtgtaatgttttgagtgtagagaaagctatatgttgtggatggatacgaatggtcaaattgtagcacttttggtgcttataatactaataggtgagcgcctgtacgttgcaacgaagacatataatacacacattttatatataagtcactgtgatattatatgtccccgttgcaacgcacgggcacttacctagttatgatatgaagaatgtaagggggtaggctgccaccc

SEQ ID NO: 62608 - DNA, 2745 bp, Zea Mays
ctcgtcttctcttgcatctccttccttccagttcctatcctatcctatataggagcacccggcctcgatcttcttccttctccgaacagcagagagcagacgtgcacccgtccgtctgcacattgtcactccatgcttcaaatatccatgaaccccctgctcacccttctcctcctcctcatcacttctcttcacgctccaccatgctcctccgcctccaccaccactgcagcgacggcgactgacaccctagcggcaggccaagcgcttgcctccggcgacaggctcgtctcgaggaacggcaagttcgcgctcggcttcttccagccaacaacagccgtggtcgccggcggagaggaaggcgaagatacgcaatggggctatagaggatggtccaccgtagatggaggcagatatatttgcttccttggttttgattcgcaataggcgcctcgttgtttcctcggaatttttgcttctgttgcctttgctccgtcaaatccgaggttcttgatcaatcccagtgctctggtttcgttgtttttcaggtccaaggaagctacgatggcgaacctgtctaacgactttgtgtaaaattcagttttttcatacgatggttattgcacatatatatactatactaaaattgcagattcaatttgttccctgactcgggacagcccgacgacgttgtcctcagcgttgccacctccatctggctgccccgtctcggcgaccatgtcttcgcctttggccgcgacaagaaagtgtgcttctagtgggaggttctgtcacacgacaatcaagttcaagaagtgtcgcgcattcccaatggctccaaccccggcaactgcatctccctgctaaggacatgtctatcgttggcgatcttgacaatggcgatgatgaattgatggtggcgtgcaacgtcacagggcctgaacatgaaccagaatagcatgttgatccttcaggagagctgacaaacttctactacacaaggcttctgaagttcacatcaataatgttctaaaaatggtctgcagaaggtccatctctgcatatggcattggttttctactattatctaggactgcattgctattgctttagtggacaaattgaagctaaagaagtttaccttgcaggattgatcatgatgtacaacagcacaatgaggagtcagactacatgggactttgcacttcatgtacaggaagatcctaccaaatttgacagtgatgctaagaacttaggttatattttttttaaactccattcttgtgttagtatggcctcattttgttgattagtctacgtatcatttcaattccttaccaggaaggaccgagtttccagcagatgaagatgctcagtgttggtgaatgtgtaaagctgacagggttcatggaaaagaacacagtgaagttcatgaaggagctctggagccttctcctcagtgcgcagcagaatgccagtggtgtgcctcaacagtttctggatgaaaaggaggctgagatacatcagaaaaagacataggatgacaggattgcgcaggagatccaaaagaagccagaaaaggagggaatggactcagaactggaaaagaacaaaacgatggatggggatgttggtaactcaagatcctatggtgatccagttgcctctgctttaaacagtacaaatttcaatatcgaggaagaaaaggacaatgatttcaagcgcacctcaagaccaaaaaataggttgtaaggatgccacaaaaatgatgcttgttgttaaggagatattcacatgccaaattcaggttgaacttccaataaccaatccaatatacctcatgctaggcacatcatttggttcctcagctaaaggaactgggcttaaagctcttgaatttgccctctccatctgtgacagttttgatatgtatggcttcaccgtagacccaggttacaaggaatggacaaggtacttctcagaggtaagaaagggacacactccactacatggtagagcatattatcagatgatggaatgtcttggtctggtgaaaatccattcaccgatgcgaggagatcctggcaggacagtgaggtggctgcctaccaaggctaccatcgaggctgctagagttgcttccgagaagttgttgaagagacctggtgctggaagtgatgatcctctggggacttgcaccatgataaagaagcgcaggaaagggaaggcgccaaacagatctggtctatgagatgctgccatgaagcacctcgaggacatgaaagatgccaccaggtatcccttggagcggaatgcagggggtggttacctctgcatgatcaatgatagatacgaccgcgactgattatggcatcagtgccccctcccccctcccctccacttgagtcgaagaaaggaatgcttgtgataaacttgcagtttgagggaacgaaaaggtcgattctttgatttatgcagctggtgtacaacttttgagtgtagtgaaagttaggtgtaatgttttgagtgtagagaaagctatatgttgtggatggatacgaatggtcaaattgtagcacttttggtgcttataatactaataggtgagcgcctgtacgttgcaacgaagacatataatacacacattttatatataagtcactgtgatattatatgtccccgttgcaacgcacgggcacttacctagttatgatatgaagaatgtaagggggtaggctgccaccc

SEQ ID NO: 62609 - DNA, 4418 bp, Zea Mays
ctcgtcttctcttgcatctccttccttccagttcctatcctatcctatataggagcacccggcctcgatcttcttccttctccgaacagcagagagcagacgtgcacccgtccgtctgcacattgtcactccatgcttcaaatatccatgaaccccctgctcacccttctcctcctcctcatcacttctcttcacgctccaccatgctcctccgcctccaccaccactgcagcgacggcgactgacaccctagcggcaggccaagcgcttgcctccggcgacaggctcgtctcgaggaacggcaagttcgcgctcggcttcttccagccaacaacagccgtggtcgccggcggagaggaaggcgaagatacgcaatggggctatagaggatggtccaccgtagatggaggcagatatatttgcttccttggttttgattcgcaataggcgcctcgttgtttcctcggaatttttgcttctgttgcctttgctccgtcaaatccgaggttcttgatcaatcccagtgctctggtttcgttgtttttcaggtccaaggaagctacgatggcgaacctgtctaacgactttgtgtaaaattcagttttttcatacgatggttattgcacatatatatactatactaaaattgcagattcaatttgttccctgactcgggacagcccgacgacgttgtcctcagcgttgccacctccatctggctgccccgtctcggcgaccatgtcttcgcctttggccgcgacaagaaagtgtgcttctagtgggaggttctgtcacacgacaatcaagttcaagaagtgtcgcgcattcccaatggctccaaccccggcaactgcatctccctgctaaggacatgtctatcgttggcgatcttgacaatggcgatgatgaattgatggtggcgtgcaacgtcacagggcctgaacatgaaccagaatagcatgttgatccttcaggagagctgacaaacttctactacacaaggcttctgaagttcacatcaataatgttctaaaaatggtctgcagaaggtccatctctgcatatggcattggttttctactattatctaggactgcattgctattgctttagtggacaaattgaagctaaagtaagtgttttcttgttgctgttactagagtgatatgtagctccttttgcttcactctttctccatgaactgtaaatttcatataaacaaagttgaatttggctataaaattggttactgttagcttatagttatttcaagagtgttgtgtgacagcactgggagtttaaaagctcaaattttatactggttgctttgctcctagcttttcaagagtgtcattttttgaagcagctgtggagatattatatgagaacagtctgcagttcttgaaatttacttgggatgttttttgtttcatatgacaaacatatatacatgcatccatgtgtgcgtgtactacatgtaagcaaaatttagtttacttaggtgcaaaatcatttggttttcaactgaacaagtggccttatagtgttttgaaggttgaggtactgacagaacataataataaccataatctcgaaggaagtttaccttgcaggattgatcatgatgtacaacagcacaatgaggagtcagactacatgggtaagtagcattatgcaatttccacattattgtgaggcgaatggtgcgtttttcgatggttttcattatttgcttgtcttatattacaagcagcatggatgttctttcatcccatcgtattgtggcactacagaattattgatgatcaacatgcgggtccagtagtttaattctagataacacacatttatgcggcaaaagaagctattgtagttttgctttgtttcttttttgcaaggatagctaaattacttgaacatgtgtatagttcacatctcatgtcttgtttttcttgtatggtagaaacatggagttctattctccatgttttcctttttcccacatatattcattaaatctatactaatataaagggagactttctccactccattcgtgtgttacccctctccactccctacttaaacggtaaaaataaattaaaattatgcacaagtggagatttgaacatcgatcgttggctccaaatagattcacacccacctatccagcagaacatacatattttttttatgttttataatatatactcaaacataatataagatttgaaaaatagggaaaataagttgtagcaatgcatgggcacttaacttgtggatgcagacatgttcacacagagtgtttttgccattctatcatataatgttttggtcattttgacatgaggtgtttcggccattcggtcacaggcaacaactatattgtgttttggcttctccgagataagtattccctgtacatattctcttccatagaccaatactttatcaacctccactagcttggcctctacaccagttgccaagagtaagctagatgaatcttgtgacaaattgttttgctgagggtacttgaaacatcgtggtctgttacacacttagacacttcaaggttacaaggcattttacttcttggtttataaaacataccatgcccatccttgagtccactctcgcatgtaccaatgtaacatgctcctgatgcatatttacaaaaaaaacatacaagtcctgtgcgttgctatagtttttatatatcatataagagaaaatataaactgtgggtctccagcttcacacaattttgtaggactttgcacttcatgtacaggaagatcctaccaaatttgacagtgatgctaagaacttaggttatattttttttaaactccattcttgtgttagtatggcctcattttgttgattagtctacgtatcatttcaattccttaccaggaaggaccgagtttccagcagatgaagatgctcagtgttggtgaatgtgtaaagatccagctgacagggttcatggaaaagaacacagtgaagttcatgaaggagctctggagccttctcctcagtgcgcagcagaatgccagtggtgtgcctcaacagtttctggatgaaaaggaggctgagatacatcagaaaaaggatgacaggattgcgcaggagatccaaaagaagccagaaaaggagggaatggactcagaactggaaaagaacaaaacgatggatggggatgttggtaactcaagatcctatggtgatccagttgcctctgctttaaacagtacaaatttcaatatcgaggaagaaaaggacaatgatttcaagcgcacctcaagaccaaaaaataggttcgttatcactttcttgcataatcttgtagggttttactacaacttagatgcatgctttgcattagatgttcttactaggtgcccatatttaggttgtaaggatgccacaaaaatgatgcttgttgttaaggagatattcacatgccaaattcaggttgaacttccaataaccaatccaatatacctcatgctaggcacatcatttggttcctcagctaaaggaactgggcttaaagctcttgaatttgccctctccatctgtgacagttttgatatgtatggcttcaccgtagacccaggttacaaggaatggacaaggtacttctcagaggtaagaaagggacacactccactacatggtagagcatattatcagatgatggaatgtcttggtctggtgaaaatccattcaccgatgcgaggagatcctggcaggacagtgaggtggctgcctaccaaggctaccatcgaggctgctagagttgcttccgagaagttgttgaagagacctggtgctggaagtgatgatcctctggggacttgcaccatgataaagaagcgcaggaaagggaaggcgccaaacagatctggtctatgagatgctgccatgaagcacctcgaggacatgaaagatgccaccaggtatcccttggagcggaatgcagggggtggttacctctgcatgatcaatgatagatacgaccgcgactgattatggcatcagtgccccctcccccctcccctccacttgagtcgaagaaaggaatgcttgtgataaacttgcagtttgagggaacgaaaaggtcgattctttgatttatgcagctggtgtacaacttttgagtgtagtgaaagttaggtgtaatgttttgagtgtagagaaagctatatgttgtggatggatacgaatggtcaaattgtagcacttttggtgcttataatactaataggtgagcgcctgtacgttgcaacgaagacatataatacacacattttatatataagtcactgtgatattatatgtccccgttgcaacgcacgggcacttacctagttatgatatgaagaatgtaagggggtaggctgccaccc

SEQ ID NO: 62610 - DNA, 684 bp, Zea Mays
caggaagatcctaccaaatttgacagtgatgctaagaacttaggaaggaccgagtttccagcagatgaagatgctcagtgttggtgaatgtgtaaagatccagctgacagggttcatggaaaagaacacagtgaagttcatgaaggagctctggagccttctcctcagtgcgcagcagaatgccagtggtgtgcctcaacagtttctggatgaaaaggaggctgagatacatcagaaaaagacataggatgacaggattgcgcaggagatccaaaagaagccagaaaaggagggaatggactcagaactggaaaagaacaaaacgatggatggggatgttggtaactcaagatcctatggtgatccagttgcctctgctttaaacagtacaaatttcaatatcgaggaagaaaaggacaatgatttcaagcgcacctcaagaccaaaaaataggttgtaaggatgccacaaaaatgatgcttgttgttaaggagatattcacatgccaaattcaggttgtaaggatgccacaaaaatgaagacctttgttgtagtgacataaggagtttcgaaactgcaaggaattttaaatttgaatatttttcagtgagatgttaagaaacaaaaaaagaggcactgatcgttaagacgacaatacatgatatcatgaaccaaatgattcgg

SEQ ID NO: 62611 - DNA, 705 bp, Zea Mays
tttgcacttcatgtacaggaagatcctaccaaatttgacagtgatgctaagaacttaggaaggaccgagtttccagcagatgaagatgctcagtgttggtgaatgtgtaaagggttcatggaaaagaacacagtgaagttcatgaaggagctctggagccttctcctcagtgcgcagcagaatgccagtggtgtgcctcaacagtttctggatgaaaaggaggctgagatacatcagaaaaaggatgacaggattgcgcaggagatccaaaagaagccagaaaaggagggaatggactcagaactggaaaagaacaaaacgatggatggggatgttggtaactcaagatcctatggtgatccagttgcctctgctttaaacagtacaaatttcaatatcgaggaagaaaaggacaatgatttcaagcgcacctcaagaccaaaaaataggttgtaaggatgccacaaaaatgatgcttgttgttaaggagatattcacatgccaaattcaggttgtaaggatgccacaaaaatgaagacctttgttgtagtgacataaggagtttcgaaactgcaaggaattttaaatttgaatatttttcagtgagatgttaaggtagataaagttgttgagttagatgaaacaaaaaaagaggcactgatcgttaagacgacaatacatgatatcatgaaccaaatgattcgg

SEQ ID NO: 62612 - DNA, 3286 bp, Zea Mays
tccacgccgtcgtcccactcgccgcccaagtcacactcgcccgggggcgagggcggcggcagctccgggccgtccacgtcgctcgtcgtgggcgtggtcgtcggcggcatcgtgctgctgctgctcgccagcttcatctgcctctgctgcctccgtaagaagcgccgccgcgcgccgccgcggcctcagcactacggatacccgccgcctccgcccccgtacaaggaggatccctatggtggaacataccagagttggcagcaaaatgcgcctcctcctccaccccctgaacatgtggtcacgaccctgccagcatatgccaatcctcctcctcagccgccgccaccaccaacagcagcagcgatgctaaatagtagtggtggatctggttctaactactctggtggcgagatcctacctccaccatcccctggtgctgctctcggcttctcaaagagcacattcacctacgaagagttgatgagggcgactgatggattctctgatgctaatctccttggacaaggtggttttgggtatgttcacagaggattgctgcctaatggcaaagagattgctgtaaaacaattgaaacttggaagcggccaaggagagcgtgagttccaggctgaggttgagattatcagccgagtacatcacaaacatcttgtgtctttggttggctattgcatttctggaggcaagaggttgcttgtctatgagttcgtccccaacaacacattggaattccacttacatggtaacgatcgaccaacaatggagtggcccactagattaaagatcgctctgggtgctgccaagggtttagcttatcttcatgaagactgccatccaaagatcatccaccgcgacattaaggcatctaacattcttcttgacttcaaatttgaagttggacttgcaaagttcactactgataacaacacccatgtgtcaacaagagtaatgggcacctttgggtatttggcacccgagtatgcagcatctggcaagctcacagaaaaatccgatgtattttctttcggagtcatgcttcttgagcttattactgggcggcgaccaattgacacaacccaaacatatatggatgacagcttggttgactgggcaaggccattactgatgagagcgctcgaggatggtgaatatgatgctttggtggatcctcggctcggaaaggacttcaatcctaacgagatggcaagaatgatagcctgtgcggctgcgtgcgtacgccattccgcacgtcgtcggccacgaatgagtcaggtcgttcgggctctggaaggcgacgtgtctttggaggaccttaatgaaggtgttcgacctggccatagccgcttctttgggtcatatagcagctctgattacgattccgggcagtacaacgaggacatgcagaagttcaggaagacggcgttcaataacaacacctacaccagcagccaatacagcgcgccaaccagtgaatacggccaggtgccgtctggatcaagcagcgagggccgccagacgcaggagatggaggagtcgggtgcagtgaagaaaggtggctacagcggctacagctccggatacagcggagcctctttggattggactgttgaggagaatgggtcgaactagagtggaatgttccactcagatgcgggtgtccggccaaaacgaagcgtggatggcgccgccgccgcctctcagagcgattgcgaggaggcctgtcgcgcctcctgctcctgcactgcgtactcctataacagtagcaggtgctctgtgtggcatggggaactgttcagtgttcggcagggaacagaagaaggaaaccgagtgccggagttgtcgctgcagcaagcattgttggtggcggcggcggtggagtggtagcctttaggtacactgatctaagccacgcgactaaaaacttctcagagaagcttggagcaggcggtttcggctgcgtgttcaagggagtgctgaccggtggctcgacagctatagcagtgaagaggctcgacggcgccgcccgccagggggagaagcagttcagggctgaggtgagctcgctcggactgatccagcacataaacctagtcaaactgatcggtttctgctgcaaaggtcacaagatcaggctgctcgtgtacgaacacatgtcgaatgggtcccttgattctcacctgtttcagagcgatggtgctgctgctgctgccgcccttggctggaacaccaggtaccagatagccataggagtcgctagagggctgtcctacctgcatcagagctgccgggaatgcatcatacactgcgacattaagccggaaaacatacttctcgacgcgtcatttgctcctaaaatcgccgacttcgggatggcggcgttcgtcgggagggatttcagcagggtcttgactacgttcagaggaactgcagggtatcttgccccggagtggcttggtggtgtcgctattacgtcaaaggttgatgtctatagcttcggtttggtgctgctggagatcgtatcgggtaggagaaattcgcctgaggcgtatagcagcgacgacaactaccacatcgaatacttccctgtgcgagctatcggcaagcttcacgggggagacgtgaggagtttggtggatccgcagctacacggcgacttcgatctggaggaggttgagagggtttgcaaggttgcgtgctggtgcatccaggataacgagcttcatcgcccgacgatgggtgaagtggtccgtgttcttgagggccagcaggagatcgatatgccaccgatgccaaggctgcttgcagcaatcacacaaggcactggaactgtcacggaaggctctagtgcgtcttcgatgtaataattcataattaattaatacctgtagttgagggttgaggctagctactaataatatctgtttcaggaaattttagtgctcaaatttggagcagaagtaatacaggaaggcatgcctgtaatttctgaattgtatggacgccagtggtccccttttgtctcgttttgcatgatttaatcgtttaacgtgtgtttggttggacggataaagaggggtagaaggtggcggtcacattttttctctattactattaagaacctaagggttagactgtctccctggttctgcctcccatcaatctgtaccgtccgtaccatccaatggcccgcgttcgtcccctgccccggcaacccagcttaaccctagctcgctccctccgtagtcgcctcttcctgcttcgctcctct

SEQ ID NO: 62613 - DNA, 2404 bp, Zea Mays
tccacgccgtcgtcccactcgccgcccaagtcacactcgcccgggggcgagggcggcggcagctccgggccgtccacgtcgctcgtcgtgggcgtggtcgtcggcggcatcgtgctgctgctgctcgccagcttcatctgcctctgctgcctccgtaagaagcgccgccgcgcgccgccgcggcctcagcactacggatacccgccgcctccgcccccgtacaagggtaacgatcgaccaacaatggagtggcccactagattaaagatcgctctgggtgctgccaagggtttagcttatcttcatgaagactgccatccaaagatcatccaccgcgacattaaggcatctaacattcttcttgacttcaaatttgaagttggacttgcaaagttcactactgataacaacacccatgtgtcaacaagagtaatgggcacctttgggtatttggcacccgagtatgcagcatctggcaagctcacagaaaaatccgatgtattttctttcggagtcatgcttcttgagcttattactgggcggcgaccaattgacacaacccaaacatatatggatgacagcttggttgactgggcaaggccattactgatgagagcgctcgaggatggtgaatatgatgctttggtggatcctcggctcggaaaggacttcaatcctaacgagatggcaagaatgatagcctgtgcggctgcgtgcgtacgccattccgcacgtcgtcggccacgaatgagtcaggtcgttcgggctctggaaggcgacgtgtctttggaggaccttaatgaaggtgttcgacctggccatagccgcttctttgggtcatatagcagctctgattacgattccgggcagtacaacgaggacatgcagaagttcaggaagacggcgttcaataacaacacctacaccagcagccaatacagcgcgccaaccagtgaatacggccaggtgccgtctggatcaagcagcgagggccgccagacgcaggagatggaggagtcgggtgcagtgaagaaaggtggctacagcggctacagctccggatacagcggagcctctttggattggactgttgaggagaatgggtcgaactagagtggaatgttccactcagatgcgggtgtccggccaaaacgaagcgtggatggcgccgccgccgcctctcagagcgattgcgaggaggcctgtcgcgcctcctgctcctgcactgcgtactcctataacagtagcaggtgctctgtgtggcatggggaactgttcagtgttcggcagggaacagaagaaggaaaccgagtgccggagttgtcgctgcagcaagcattgttggtggcggcggcggtggagtggtagcctttaggtacactgatctaagccacgcgactaaaaacttctcagagaagcttggagcaggcggtttcggctgcgtgttcaagggagtgctgaccggtggctcgacagctatagcagtgaagaggctcgacggcgccgcccgccagggggagaagcaggatttcagcagggtcttgactacgttcagaggaactgcagggtatcttgccccggagtggcttggtggtgtcgctattacgtcaaaggttgatgtctatagcttcggtttggtgctgctggagatcgtatcgggtaggagaaattcgcctgaggcgtatagcagcgacgacaactaccacatcgaatacttccctgtgcgagctatcggcaagcttcacgggggagacgtgaggagtttggtggatccgcagctacacggcgacttcgatctggaggaggttgagagggtttgcaaggttgcgtgctggtgcatccaggataacgagcttcatcgcccgacgatgggtgaagtggtccgtgttcttgagggccagcaggagatcgatatgccaccgatgccaaggctgcttgcagcaatcacacaaggcactggaactgtcacggaaggctctagtgcgtcttcgatgtaataattcataattaattaatacctgtagttgagggttgaggctagctactaataatatctgtttcaggaaattttagtgctcaaatttggagcagaagtaatacaggaaggcatgcctgtaatttctgaattgtatggacgccagtggtccccttttgtctcgttttgcatgatttaatcgtttaacgtgtgtttggttggacggataaagaggggtagaaggtggcggtcacattttttctctattactattaagaacctaagggttagactgtctccctggttctgcctcccatcaatctgtaccgtccgtaccatccaatggcccgcgttcgtcccctgccccggcaacccagcttaaccctagctcgctccctccgtagtcgcctcttcctgcttcgctcctct

SEQ ID NO: 62614 - DNA, 3467 bp, Zea Mays
tccacgccgtcgtcccactcgccgcccaagtcacactcgcccgggggcgagggcggcggcagctccgggccgtccacgtcgctcgtcgtgggcgtggtcgtcggcggcatcgtgctgctgctgctcgccagcttcatctgcctctgctgcctccgtaagaagcgccgccgcgcgccgccgcggcctcagcactacggatacccgccgcctccgcccccgtacaaggaggatccctatggtggaacataccagagttggcagcaaaatgcgcctcctcctccaccccctgaacatgtggtcacgaccctgccagcatatgccaatcctcctcctcagccgccgccaccaccaacagcagcagcgatgctaaatagtagtggtggatctggttctaactactctggtggcgagatcctacctccaccatcccctggtgctgctctcggcttctcaaagagcacattcacctacgaagagttgatgagggcgactgatggattctctgatgctaatctccttggacaaggtggttttgggtatgttcacagaggattgctgcctaatggcaaagagattgctgtaaaacaattgaaacttggaagcggccaaggagagcgtgagttccaggctgaggttgagattatcagccgagtacatcacaaacatcttgtgtctttggttggctattgcatttctggaggcaagaggttgcttgtctatgagttcgtccccaacaacacattggaattccacttacatggtaacgatcgaccaacaatggagtggcccactagattaaagatcgctctgggtgctgccaagggtttagcttatcttcatgaagactgccatccaaagatcatccaccgcgacattaaggcatctaacattcttcttgacttcaaatttgaagctatggttgctgactttggacttgcaaagttcactactgataacaacacccatgtgtcaacaagagtaatgggcacctttgggtatttggcacccgagtatgcagcatctggcaagctcacagaaaaatccgatgtattttctttcggagtcatgcttcttgagcttattactgggcggcgaccaattgacacaacccaaacatatatggatgacagcttggttgactgggcaaggccattactgatgagagcgctcgaggatggtgaatatgatgctttggtggatcctcggctcggaaaggacttcaatcctaacgagatggcaagaatgatagcctgtgcggctgcgtgcgtacgccattccgcacgtcgtcggccacgaatgagtcaggtcgttcgggctctggaaggcgacgtgtctttggaggaccttaatgaaggtgttcgacctggccatagccgcttctttgggtcatatagcagctctgattacgattccgggcagtacaacgaggacatgcagaagttcaggaagacggcgttcaataacaacacctacaccagcagccaatacagcgcgccaaccagtgaatacggccaggtgccgtctggatcaagcagcgagggccgccagacgcaggagatggaggagtcgggtgcagtgaagaaaggtggctacagcggctacagctccggatacagcggagcctctttggattggactgttgaggagaatgggtcgaactagagtggaatgttccactcagatgcgggtgtccggccaaaacgaagcgtggatggcgccgccgccgcctctcagagcgattgcgaggaggcctgtcgcgcctcctgctcctgcactgcgtactcctataacagtagcaggtgctctgtgtggcatggggaactgttcagtgtaaaccggaacgacggcattgacaacaactctgaacaggttctttatctccgcctcgcgtccgacgattcgccgccaggttcggcagggaacagaagaaggaaaccgagtgccggagttgtcgctgcagcaagcattgttggtggtgggttactgctggtgctcatcttgctgttaacgatttggcgaaaaagatcctggcggtgtggtacaccattgtatggcagccaaggcggcggcggtggagtggtagcctttaggtacactgatctaagccacgcgactaaaaacttctcagagaagcttggagcaggcggtttcggctgcgtgttcaagggagtgctgaccggtggctcgacagctatagcagtgaagaggctcgacggcgccgcccgccagggggagaagcagttcagggctgaggtgagctcgctcggactgatccagcacataaacctagtcaaactgatcggtttctgctgcaaaggtcacaagatcaggctgctcgtgtacgaacacatgtcgaatgggtcccttgattctcacctgtttcagagcgatggtgctgctgctgctgccgcccttggctggaacaccaggtaccagatagccataggagtcgctagagggctgtcctacctgcatcagagctgccgggaatgcatcatacactgcgacattaagccggaaaacatacttctcgacgcgtcatttgctcctaaaatcgccgacttcgggatggcggcgttcgtcgggagggatttcagcagggtcttgactacgttcagaggaactgcagggtatcttgccccggagtggcttggtggtgtcgctattacgtcaaaggttgatgtctatagcttcggtttggtgctgctggagatcgtatcgggtaggagaaattcgcctgaggcgtatagcagcgacgacaactaccacatcgaatacttccctgtgcgagctatcggcaagcttcacgggggagacgtgaggagtttggtggatccgcagctacacggcgacttcgatctggaggaggttgagagggtttgcaaggttgcgtgctggtgcatccaggataacgagcttcatcgcccgacgatgggtgaagtggtccgtgttcttgagggccagcaggagatcgatatgccaccgatgccaaggctgcttgcagcaatcacacaaggcactggaactgtcacggaaggctctagtgcgtcttcgatgtaataattcataattaattaatacctgtagttgagggttgaggctagctactaataatatctgtttcaggaaattttagtgctcaaatttggagcagaagtaatacaggaaggcatgcctgtaatttctgaattgtatggacgccagtggtccccttttgtctcgttttgcatgatttaatcgtttaacgtgtgtttggttggacggataaagaggggtagaaggtggcggtcacattttttctctattactattaagaacctaagggttagactgtctccctggttctgcctcccatcaatctgtaccgtccgtaccatccaatggcccgcgttcgtcccctgccccggcaacccagcttaaccctagctcgctccctccgtagtcgcctcttcctgcttcgctcctct

SEQ ID NO: 62615 - DNA, 1431 bp, Zea Mays
tcttagagttaagctcttagccacttgctggtcttatcatttgaaagaagaaatggtactcaattgctggtccctttggcaattttttctttgcacttttcttgttagaactggcaagccacagccaagtaccttgcttgcacaaacaaaaatcccttctattgtagggcaatccatggatttattgcttgtcctgaaatttgatagaggcgttcatgatatcagttgcttgttaattccatttgtttcttgttctcttatgcattgttatgaatatttgcaccttctgcaggtaacgatcgaccaacaatggagtggcccactagattaaagatcgctctgggtgctgccaagggtttagcttatcttcatgaagactgccatccaaagatcatccaccgcgacattaaggcatctaacattcttcttgacttcaaatttgaagttggacttgcaaagttcactactgataacaacacccatgtgtcaacaagagtaatgggcacctttgggtatttggcacccgagtatgcagcatctggcaagctcacagaaaaatccgatgtattttctttcggagtcatgcttcttgagcttattactgggcggcgaccaattgacacaacccaaacatatatggatgacagcttggttgactgggcaaggccattactgatgagagcgctcgaggatggtgaatatgatgctttggtggatcctcggctcggaaaggacttcaatcctaacgagatggcaagaatgatagcctgtgcggctgcgtgcgtacgccattccgcacgtcgtcggccacgaatgagtcaggtcgttcgggctctggaaggcgacgtgtctttggaggaccttaatgaaggtgttcgacctggccatagccgcttctttgggtcatatagcagctctgattacgattccgggcagtacaacgaggacatgcagaagttcaggaagacggcgttcaataacaacacctacaccagcagccaatacagcgcgccaaccagtgaatacggccaggtgccgtctggatcaagcagcgagggccgccagacgcaggagatggaggagtcgggtgcagtgaagaaaggtggctacagcggctacagctccggatacagcggagcctcgtgagcgaattccctccctctctgtttttgctctttttacttctgatgctttctgttgctgcgtttgtaaagctgacttccgcgtgattgatgtatctaagtttgacacagtatagttgtatgtagctgcaatcgtttattctttcgtgaaaaaattgttcttggacaatgtttggctgtgcaattcaacgagagctaagctaattgactgctcatgtactgtccatggctcgctcagttcatcgttctcatccaaagacaaagagcttgccagatttttttttttacc

SEQ ID NO: 62616 - DNA, 1920 bp, Zea Mays
atgttaagaagcagaagtctgctgaaagagttcagtagcgaagtgtcaaaccaaggtgcattagacatcgaggatttggcacaaatagggaagaagattggaacctgtccctactatggttcacgagacatggtccgctcagctgaccttgtagtccttccttatcaatctttgttactcaagtctgctagagaatcacttggccttaatctgaagaacagtgttgtcatcatagatgaagctcacaacttagctgattccttgagtaacatgtacaactcaaagatcacgtcttctcaggtttgtggatatgcaaacaagttaagtagcatccaaaatcagtttgatctccagctccatgatgaaggaagcagtatagcatgctttcaggcattggttgactttctacgctcccttctgaacagcaatgatgatggaagaatcatagttgcaaagcaaaagctaggtggacaacctgatgaagcatatcttaaatttgtgatgctttgtgcggaaaaaatattttctgaggttacgcaggatgcttatgctgttatcctggctggtggaactctccagcctattgaagaaactaggctgcgcttgtgtccaagcttaccaccaactgatataaaattcttcacttgcaaccatattgttcctcctgagagtattcttccaatagcagttacacgtggaccctcaggcaaggcatttgatttcagctacaattcaaggagctctccttccatgattgaggaacttggtcgtttcatctgtaacattataacagtcgtgcctgagggagttgttatgtttttttcttcatatgattatgaaaggcgtgtatatgatgcatggatgacaacaggcacaatttccaggatttctaaaaagaaacatgttttcagagagccaaggaacagtgctgatgtcgaggctgtcctcaacaaatacaaggaggcaattgaatcctgtagtaatttttcccaagacacaggtgtcaatggggcacttctattagctgttgttggtgggaagatttctgaaggcataaatttcagcaatgggatgggtcgttgtgtcataatggttggcttgccttatccaagtccatctgatgttgagcttatagagacaataaagcatatcgaaagtatttctagctcattttcggttggagatgataaggccttaagcagaaaatatgatgatgaatgtgaacttcagcctggttatgatatattacggaagtgcactagaggtggaagagagtattatgagaatttatgcatgaaagctgtgaatcaatctattggcagagcaatcaggcacataaatgactatgctgcaatgctattggttgactcgcgttatgcacagacttcatcaaccaagagtttttcctgcccggctgataagcttcctcaatggataaaagcacgactctcttgtgctcaaaactatggagaagttcatagatcgttgcatcagttcttcaagttcaataaaaaaaatgttgaaatactctagaaaccaccaagcattgccattgttgattcattgcaaacaaaaatacaggtgtatgtactcgtaaaacgtagcattgtgtttgtgtatccttatgctgcttacttatgagcaaggcttcagcctgcgcctgcgaatgcgatcagagttatgtacagaattatggtgacagtaacgcttcctcttaaggaattatggttagatccatatttcttttgctcgagattgtaaaacaatatcacaaatgtgattattcagtccttatcattgtttcaattctttcatgatagcaaatcttatagacctcattttactgacgcagaacaaatgaaattcatgtgttactacactaatatgttggtatattttcgaagtgaagtgggatcagtg

SEQ ID NO: 62617 - DNA, 3011 bp, Zea Mays
gtttcccaccgcgcgctcgctgaaaaatgccaatgccgccgccgccgcgaaaagacttcccggcgttcccgtttgcgccgtacccgatccagtcggaattcatgtcgtttctctacgccgctctctcttcaggccccggcgccctcgccctactcgagagccctaccggcacgggcaagacgctcagcatcatctgcagtgcgctgcagtggctcctcgatcaccgcgaagctgccgtagttgccgctacggcattggcccaccccagcggcgcctccggctccggtggtgacgatgacgagcccgactggttgcgggatttcaagccggcggcggcggttaaagagagcactaagaagaaggcgaagcctcccgcgatgaggaaaacgctggtttcacggaaaccagatggatttggggaggaagacggcggcgacgacgagggggagttcctacttgaggagtatgagagcgacagcgaagacgtcgcgaggcggggtgtagggaaacgagcacattgcggtagtagtagcagcagtagcagcgaggacgacgatgagatgacgcccaaggttttcttcacaagccgcacgcactcgcagctctctcagttcgtcggggagctcaagaggacggagttcgctgggcggatcaggacggtgtgcttggggtccaggaagaacttatgcatcaacaaggatgttctgaagatgggcagtggaaacaggattaatgagaggtgcttggaactgcagaagaacaagaagagcaccaaaattaagcttgaggatgataaacgaaaggtgcgcccagcaaagcgctcttgtggctgcccgatgttaagaagcagaagtctgctgaaagagttcagtagcgaagtgtcaaaccaaggtgcattagacatcgaggatttggcacaaatagggaagaagattggaacctgtccctactatggttcacgagacatggtccgctcagctgaccttgtagtccttccttatcaatctttgttactcaagtctgctagagaatcacttggccttaatctgaagaacagtgttgtcatcatagatgaagctcacaacttagctgattccttgagtaacatgtacaactcaaagatcacgtcttctcagttgaaggcagtcctttcctgcctggatgaataccttgatagattttacaatgttttgggagctgggaatcgacgatacatccagaccttaacagttttaacaaagtctttcatacgtgttttgatcaacaatcaagatggtgccagcactatgtcttctatgaccataaaccaattcttgttttcccttgacattgataacataaacatagtaaaactttgtcagtttgtgaaagaaagcaatataatccataaggtttgtggatatgcaaacaagttaagtagcatccaaaatcagtttgatctccagctccatgatgaaggaagcagtatagcatgctttcaggcattggttgactttctacgctcccttctgaacagcaatgatgatggaagaatcatagttgcaaagcaaaagctaggtggacaacctgatgaagcatatcttaaatttgtgatgctttgtgcggaaaaaatattttctgaggttacgcaggatgcttatgctgttatcctggctggtggaactctccagcctattgaagaaactaggctgcgcttgtgtccaagcttaccaccaactgatataaaattcttcacttgcaaccatattgttcctcctgagagtattcttccaatagcagttacacgtggaccctcaggcaaggcatttgatttcagctacaattcaaggagctctccttccatgattgaggaacttggtcgtttcatctgtaacattataacagtcgtgcctgagggagttgttatgtttttttcttcatatgattatgaaaggcgtgtatatgatgcatggatgacaacaggcacaatttccaggatttctaaaaagaaacatgttttcagagagccaaggaacagtgctgatgtcgaggctgtcctcaacaaatacaaggaggcaattgaatcctgtagtaatttttcccaagacacaggtgtcaatggggcacttctattagctgttgttggtgggaagatttctgaaggcataaatttcagcaatgggatgggtcgttgtgtcataatggttggcttgccttatccaagtccatctgatgttgagcttatagagacaataaagcatatcgaaagtatttctagctcattttcggttggagatgataaggccttaagcagaaaatatgatgatgaatgtgaacttcagcctggttatgatatattacggaagtgcactagaggtggaagagagtattatgagaatttatgcatgaaagctgtgaatcaatctattggcagagcaatcaggcacataaatgactatgctgcaatgctattggttgactcgcgttatgcacagacttcatcaaccaagagtttttcctgcccggctgataagcttcctcaatggataaaagcacgactctcttgtgctcaaaactatggagaagttcatagatcgttgcatcagttcttcaagttcaataaaaaaaatgttgaaatactctagaaaccaccaagcattgccattgttgattcattgcaaacaaaaatacaggtgtatgtactcgtaaaacgtagcattgtgtttgtgtatccttatgctgcttacttatgagcaaggcttcagcctgcgcctgcgaatgcgatcagagttatgtacagaattatggtgacagtaacgcttcctcttaaggaattatggttagatccatatttcttttgctcgagattgtaaaacaatatcacaaatgtgattattcagtccttatcattgtttcaattctttcatgatagcaaatcttatagacctcattttactgacgcagaacaaatgaaattcatgtgttactacactaatatgttggtatattttcgaagtgaagtgggatcagtg

SEQ ID NO: 62618 - DNA, 3033 bp, Zea Mays
gtttcccaccgcgcgctcgctgaaaaatgccaatgccgccgccgccgcgaaaagacttcccggcgttcccgtttgcgccgtacccgatccagtcggaattcatgtcgtttctctacgccgctctctcttcaggccccggcgccctcgccctactcgagagccctaccggcacgggcaagacgctcagcatcatctgcagtgcgctgcagtggctcctcgatcaccgcgaagctgccgtagttgccgctacggcattggcccaccccagcggcgcctccggctccggtggtgacgatgacgagcccgactggttgcgggatttcaagccggcggcggcggttaaagagagcactaagaagaaggcgaagcctcccgcgatgaggaaaacgctggtttcacggaaaccagatggatttggggaggaagacggcggcgacgacgagggggagttcctacttgaggagtatgagagcgacagcgaagacgtcgcgaggcggggtgtagggaaacgagcacattgcggtagtagtagcagcagtagcagcgaggacgacgatgagatgacgcccaaggttttcttcacaagccgcacgcactcgcagctctctcagttcgtcggggagctcaagaggacggagttcgctgggcggatcaggacggtgtgcttggggtccaggaagaacttatgcatcaacaaggatgttctgaagatgggcagtggaaacaggattaatgagaggtgcttggaactgcagaagaacaagaagagcaccaaaattaagcttgaggatgataaacgaaaggtgcgcccagcaaagcgctcttgtggctgcccgatgttaagaagcagaagtctgctgaaagagttcagtagcgaagtgtcaaaccaaggtgcattagacatcgaggatttggcacaaatagggaagaagattggaacctgtccctactatggttcacgagacatggtccgctcagctgaccttgtagtccttccttatcaatctttgttactcaagtctgctagagaatcacttggccttaatctgaagaacagtgttgtcatcatagatgaagctcacaacttagctgattccttgagtaacatgtacaactcaaagatcacgtcttctcagttgaaggcagtcctttcctgcctggatgaataccttgatagattttacaatgttttgggagctgggaatcgacgatacatccagaccttaacagttttaacaaagtctttcatacgtgttttgatcaacaatcaagatggtgccagcactatgtcttctatgaccataaaccaattcttgttttcccttgacattgataacataaacatagtaaaactttgtcagtttgtgaaagaaagcaatataatccataaggtattttttccccaaaatgtactcattcagttgcccaacgcccatgtgatctgactgttgccttttcaggtttgtggatatgcaaacaagttaagtagcatccaaaatcagtttgatctccagctccatgatgaaggaagcagtatagcatgctttcaggcattggttgactttctacgctcccttctgaacagcaatgatgatggaagaatcatagttgcaaagcaaaagctaggtggacaacctgatgaagcatatcttaaatttgtgatgctttgtgcggaaaaaatattttctgaggttacgcaggatgcttatgctgttatcctggctggtggaactctccagcctattgaagaaactaggctgcgcttgtgtccaagcttaccaccaactgatataaaattcttcacttgcaaccatattgttcctcctgagagtattcttccaatagcagttacacgtggaccctcagattgaggaacttggtcgtttcatctgtaacattataacagtcgtgcctgagggagttgttatgtttttttcttcatatgattatgaaaggcgtgtatatgatgcatggatgacaacaggcacaatttccaggatttctaaaaagaaacatgttttcagagagccaaggaacagtgctgatgtcgaggctgtcctcaacaaatacaaggaggcaattgaatcctgtagtaatttttcccaagacacaggtgtcaatggggcacttctattagctgttgttggtgggaagatttctgaaggcataaatttcagcaatgggatgggtcgttgtgtcataatggttggcttgccttatccaagtccatctgatgttgagcttatagagacaataaagcatatcgaaagtatttctagctcattttcggttggagatgataaggccttaagcagaaaatatgatgatgaatgtgaacttcagcctggttatgatatattacggaagtgcactagaggtggaagagagtattatgagaatttatgcatgaaagctgtgaatcaatctattggcagagcaatcaggcacataaatgactatgctgcaatgctattggttgactcgcgttatgcacagacttcatcaaccaagagtttttcctgcccggctgataagcttcctcaatggataaaagcacgactctcttgtgctcaaaactatggagaagttcatagatcgttgcatcagttcttcaagttcaataaaaaaaatgttgaaatactctagaaaccaccaagcattgccattgttgattcattgcaaacaaaaatacaggtgtatgtactcgtaaaacgtagcattgtgtttgtgtatccttatgctgcttacttatgagcaaggcttcagcctgcgcctgcgaatgcgatcagagttatgtacagaattatggtgacagtaacgcttcctcttaaggaattatggttagatccatatttcttttgctcgagattgtaaaacaatatcacaaatgtgattattcagtccttatcattgtttcaattctttcatgatagcaaatcttatagacctcattttactgacgcagaacaaatgaaattcatgtgttactacactaatatgttggtatattttcgaagtgaagtgggatcagtg

SEQ ID NO: 62619 - DNA, 2404 bp, Zea Mays
cagtttcccaccgcgcgctcgctgaaaaatgccaatgccgccgccgccgcgaaaagacttcccggcgttcccgtttgcgccgtacccgatccagtcggaattcatgtcgtttctctacgccgctctctcttcaggccccggcgccctcgccctactcgagagccctaccggcacgggcaagacgctcagcatcatctgcagtgcgctgcagtggctcctcgatcaccgcgaagctgccgtagttgccgctacggcattggcccaccccagcggcgcctccggctccggtggtgacgatgacgagcccgactggttgcgggatttcaagccggcggcggcggttaaagagagcactaagaagaaggcgaagcctcccgcgatgaggaaaacgctggtttcacggaaaccagatggatttggggaggaagacggcggcgacgacgagggggagttcctacttgaggagtatgagagcgacagcgaagacgtcgcgaggcggggtgtagggaaacgagcacattgcggtagtagtagcagcagtagcagcgaggacgacgatgagatgacgcccaaggttttcttcacaagccgcacgcactcgcagctctctcagttcgtcggggagctcaagaggacggagttcgctgggcggatcaggacggtgtgcttggggtccaggaagaacttatgcatcaacaaggatgttctgaagatgggcagtggaaacaggattaatgagaggtgcttggaactgcagaagaacaagaagagcaccaaaattaaggtttgtggatatgcaaacaagttaagtagcatccaaaatcagtttgatctccagctccatgatgaaggaagcagtatagcatgctttcaggcattggttgactttctacgctcccttctgaacagcaatgatgatggaagaatcatagttgcaaagcaaaagctaggtggacaacctgatgaagcatatcttaaatttgtgatgctttgtgcggaaaaaatattttctgaggttacgcaggatgcttatgctgttatcctggctggtggaactctccagcctattgaagaaactaggctgcgcttgtgtccaagcttaccaccaactgatataaaattcttcacttgcaaccatattgttcctcctgagagtattcttccaatagcagttacacgtggaccctcaggcaaggcatttgatttcagctacaattcaaggagctctccttccatgattgaggaacttggtcgtttcatctgtaacattataacagtcgtgcctgagggagttgttatgtttttttcttcatatgattatgaaaggcgtgtatatgatgcatggatgacaacaggcacaatttccaggatttctaaaaagaaacatgttttcagagagccaaggaacagtgctgatgtcgaggctgtcctcaacaaatacaaggaggcaattgaatcctgtagtaatttttcccaagacacaggtgtcaatggggcacttctattagctgttgttggtgggaagatttctgaaggcataaatttcagcaatgggatgggtcgttgtgtcataatggttggcttgccttatccaagtccatctgatgttgagcttatagagacaataaagcatatcgaaagtatttctagctcattttcggttggagatgataaggccttaagcagaaaatatgatgatgaatgtgaacttcagcctggttatgatatattacggaagtgcactagaggtggaagagagtattatgagaatttatgcatgaaagctgtgaatcaatctattggcagagcaatcaggcacataaatgactatgctgcaatgctattggttgactcgcgttatgcacagacttcatcaaccaagagtttttcctgcccggctgataagcttcctcaatggataaaagcacgactctcttgtgctcaaaactatggagaagttcatagatcgttgcatcagttcttcaagttcaataaaaaaaatgttgaaatactctagaaaccaccaagcattgccattgttgattcattgcaaacaaaaatacaggtgtatgtactcgtaaaacgtagcattgtgtttgtgtatccttatgctgcttacttatgagcaaggcttcagcctgcgcctgcgaatgcgatcagagttatgtacagaattatggtgacagtaacgcttcctcttaaggaattatggttagatccatatttcttttgctcgagattgtaaaacaatatcacaaatgtgattattcagtccttatcattgtttcaattctttcatgatagcaaatcttatagacctcattttactgacgcagaacaaatgaaattcatgtgttactacactaatatgttggtatattttcgaagtgaagtgggatcagtg

SEQ ID NO: 62620 - DNA, 2670 bp, Zea Mays
gaaaaccccgccagtttcccaccgcgcgctcgctgaaaaatgccaatgccgccgccgccgcgaaaagacttcccggcgttcccgtttgcgccgtacccgatccagtcggaattcatgtcgtttctctacgccgctctctcttcaggccccggcgccctcgccctactcgagagccctaccggcacgggcaagacgctcagcatcatctgcagtgcgctgcagtggctcctcgatcaccgcgaagctgccgtagttgccgctacggcattggcccaccccagcggcgcctccggctccggtggtgacgatgacgagcccgactggttgcgggatttcaagccggcggcggcggttaaagagagcactaagaagaaggcgaagcctcccgcgatgaggaaaacgctggtttcacggaaaccagatggatttggggaggaagacggcggcgacgacgagggggagttcctacttgaggagtatgagagcgacagcgaagacgtcgcgaggcggggtgtagggaaacgagcacattgcggtagtagtagcagcagtagcagcgaggacgacgatgagatgacgcccaaggttttcttcacaagccgcacgcactcgcagctctctcagttcgtcggggagctcaagaggacggagttcgctgggcggatcaggacggtgtgcttggggtccaggaagaacttatgcatcaacaaggatgttctgaagatgggcagtggaaacaggattaatgagaggtgcttggaactgcagaagaacaagaagagcaccaaaattaagttgaaggcagtcctttcctgcctggatgaataccttgatagattttacaatgttttgggagctgggaatcgacgatacatccagaccttaacagttttaacaaagtctttcatacgtgttttgatcaacaatcaagatggtgccagcactatgtcttctatgaccataaaccaattcttgttttcccttgacattgataacataaacatagtaaaactttgtcagtttgtgaaagaaagcaatataatccataaggtttgtggatatgcaaacaagttaagtagcatccaaaatcagtttgatctccagctccatgatgaaggaagcagtatagcatgctttcaggcattggttgactttctacgctcccttctgaacagcaatgatgatggaagaatcatagttgcaaagcaaaagctaggtggacaacctgatgaagcatatcttaaatttgtgatgctttgtgcggaaaaaatattttctgaggttacgcaggatgcttatgctgttatcctggctggtggaactctccagcctattgaagaaactaggctgcgcttgtgtccaagcttaccaccaactgatataaaattcttcacttgcaaccatattgttcctcctgagagtattcttccaatagcagttacacgtggaccctcaggcaaggcatttgatttcagctacaattcaaggagctctccttccatgattgaggaacttggtcgtttcatctgtaacattataacagtcgtgcctgagggagttgttatgtttttttcttcatatgattatgaaaggcgtgtatatgatgcatggatgacaacaggcacaatttccaggatttctaaaaagaaacatgttttcagagagccaaggaacagtgctgatgtcgaggctgtcctcaacaaatacaaggaggcaattgaatcctgtagtaatttttcccaagacacaggtgtcaatggggcacttctattagctgttgttggtgggaagatttctgaaggcataaatttcagcaatgggatgggtcgttgtgtcataatggttggcttgccttatccaagtccatctgatgttgagcttatagagacaataaagcatatcgaaagtatttctagctcattttcggttggagatgataaggccttaagcagaaaatatgatgatgaatgtgaacttcagcctggttatgatatattacggaagtgcactagaggtggaagagagtattatgagaatttatgcatgaaagctgtgaatcaatctattggcagagcaatcaggcacataaatgactatgctgcaatgctattggttgactcgcgttatgcacagacttcatcaaccaagagtttttcctgcccggctgataagcttcctcaatggataaaagcacgactctcttgtgctcaaaactatggagaagttcatagatcgttgcatcagttcttcaagttcaataaaaaaaatgttgaaatactctagaaaccaccaagcattgccattgttgattcattgcaaacaaaaatacaggtgtatgtactcgtaaaacgtagcattgtgtttgtgtatccttatgctgcttacttatgagcaaggcttcagcctgcgcctgcgaatgcgatcagagttatgtacagaattatggtgacagtaacgcttcctcttaaggaattatggttagatccatatttcttttgctcgagattgtaaaacaatatcacaaatgtgattattcagtccttatcattgtttcaattctttcatgatagcaaatcttatagacctcattttactgacgcagaacaaatgaaattcatgtgttactacactaatatgttggtatattttcgaagtgaagtgggatcagtg

SEQ ID NO: 62621 - DNA, 1182 bp, Zea Mays
tctccggtgcccctcaagaccaggagcactgccgcgcgccgcgtcgtcgactcgtcggtgagtgagtgagtcccggcctggcgtggcgttcgtcgcggggcatcatcatcagagccaggtgagtccatccatctcgctctccacttactgcacatgaacaaatggaacgcagcattgcctgtaccgtacttggtcgggtcatgtgatccgactcctatcttctgggcaagtaaaagatggagggggaaaaaattcaagcttctgcgtagggtctgtggcacaacataggggatcgacggacgactaaattattactatccacgagtaaaaattgcatattttttttggacttgggaaccactttgtaccttacctgtctggaatctgcacctagtagtacaacttaaatgtcccttgtggccatgcgcccatgccacagccactatggcagccagttgggctgggcaggctgacgacggacggacagaggcacggctgacaagatccccggcgatcctttgttgccggccgggcctgccctgcgcccctgcccctaccacgtggcctctgccgcccgcactcgttttcgactggaaaaaggaaccacgtactgctgcatgcgtggtgcgtggtctgggacccaaaaaagcaaaaaaaaaaaaaaagcggttcagtttatacgcgtgaccgaaaaacaggccgtctgcgctttcggcatcgtgggtggacgactggacggacgcggcaggccagccaggcactccttctcccggggggtgcgccaatcacggcggcggccatgtttagcgtccgtccatcccagcctggagtggagcagcatgaacgacgaacttattagcaacccccggccgggccgcggggtctcgggtggggccgtgcgtcgctgctggtgctcctcccggctcccggcgggcgggcgagtggcgacgccatgcaccacggtctacacgttgctgcacgggccgggcggcgcgccttcgtgttactgcggacggtggtggccgccgtcgacggcgacagctccgatccctgagctctatctctcacccacggccagacctatcactatcactataccggatggaacaatatcacgatccctccaacatgcctgagtactatcactatgactcgagataaatatgtgagtattgtgaaata

SEQ ID NO: 62622 - DNA, 1167 bp, Zea Mays
tttctggctcatcagcttatcagtagggcactaaccattccaggcacatcggtccattggtacgcaaagccagagatgcggaagcaaaggaagatgggtcatattacaattgtggggccttctaagataagtgtaaaatcacgcttggacaacttgctgcaaagaaactcgtctgatcccaaggaagttagccctcgtgttgctattataatggggtcccaatctgatcttcctgtgatgaaagatgctgagagggttttgaaagagttcgacataccttgtgcaggcggagcagctcatttaccagggatggtggcttcattgactcctcttcctgtaatcggagttcccattaagacttcaacactatcaggatttgattccctcctatctattgtgcaaatgccaaaaggtattcctgttgcgactgttgctatcgggattgcagaaaatgcaggtttgctggcagctaggattctggctgcaagagatcctgagctccaggacagggtaactaagtaccaggatgatctgagggacatggttttggagacagcagaaaggctggaggaccaaggcccggaggaatttctgaagggaatggattgaccccttttgaagccctggctctggggcctgggaggaatacgaatatatgggtcggcgataactcagtccactcgattatggtttaagatcgggagtcatcaaaaagatactttaaggactagttccggagctacaaaacctgaggggattgggggctagaatctccgtgactcttagagctgttttgatgaccaagaatcacgaagggatccataggcttggctgccttattcagtgattttagcctctctaatcccatgcggttttgtggttttcaaactagcactaataggcttggctgcactcgattttccttacaattcttttttgataattgtgctatcttaacccatcgcaacatgtccttttccccttctaatatagggtatgaattgggtttagaggggaaaaaagaacgggagtaaacgttgtacgtacgaaaagtaaaacggttgcctggatttttcagccgcacaaggtgctttgagtcaagtagttttacatattccctccgtaaagtgttgttttagcattcatcgatttaggtgtggggtccta

SEQ ID NO: 62623 - DNA, 1252 bp, Zea Mays
tttctggctcatcagcttatcagtagggcactaaccattccaggcacatcggtccattggtacgcaaagccagcaaaggaagatgggtcatattacaattgtggggccttctaagataagtgtaaaatcacgcttggacaacttgctgcaaagaaactcgtctgatcccaaggaagttagccctcgtgttgctattataatggggtcccaatctgatcttcctgtgatgaaagatgctgagagggttttgaaagagttcgacataccttgtgagctaactattgtttctgcacatcgtacaccagagcggatgtatgattatgcgaagtctgctaaagacaggggtttcgaggtcataattgcaggtgcaggcggagcagctcatttaccagggatggtggcttcattgactcctcttcctgtaatcggagttcccattaagacttcaacactatcaggatttgattccctcctatctattgtgcaaatgccaaaaggtattcctgttgcgactgttgctatcgggattgcagaaaatgcaggtttgctggcagctaggattctggctgcaagagatcctgagctccaggacagggtaactaagtaccaggatgatctgagggacatggttttggagacagcagaaaggctggaggaccaaggcccggaggaatttctgaagggaatggattgaccccttttgaagccctggctctggggcctgggaggaatacgaatatatgggtcggcgataactcagtccactcgattatggtttaagatcgggagtcatcaaaaagatactttaaggactagttccggagctacaaaacctgaggggattgggggctagaatctccgtgactcttagagctgttttgatgaccaagaatcacgaagggatccataggcttggctgccttattcagtgattttagcctctctaatcccatgcggttttgtggttttcaaactagcactaataggcttggctgcactcgattttccttacaattcttttttgataattgtgctatcttaacccatcgcaacatgtccttttccccttctaatatagggtatgaattgggtttagaggggaaaaaagaacgggagtaaacgttgtacgtacgaaaagtaaaacggttgcctggatttttcagccgcacaaggtgctttgagtcaagtagttttacatattccctccgtaaagtgttgttttagcattcatcgatttaggtgtggggtccta

SEQ ID NO: 62624 - DNA, 1253 bp, Zea Mays
gttctttctggctcatcagcttatcagtagggcactaaccattccaggcacatcggtccattgagatgcggaagcaaaggaagatgggtcatattacaattgtggggccttctaagataagtgtaaaatcacgcttggacaacttgctgcaaagaaactcgtctgatcccaaggaagttagccctcgtgttgctattataatggggtcccaatctgatcttcctgtgatgaaagatgctgagagggttttgaaagagttcgacataccttgtgagctaactattgtttctgcacatcgtacaccagagcggatgtatgattatgcgaagtctgctaaagacaggggtttcgaggtcataattgcaggtgcaggcggagcagctcatttaccagggatggtggcttcattgactcctcttcctgtaatcggagttcccattaagacttcaacactatcaggatttgattccctcctatctattgtgcaaatgccaaaaggtattcctgttgcgactgttgctatcgggattgcagaaaatgcaggtttgctggcagctaggattctggctgcaagagatcctgagctccaggacagggtaactaagtaccaggatgatctgagggacatggttttggagacagcagaaaggctggaggaccaaggcccggaggaatttctgaagggaatggattgaccccttttgaagccctggctctggggcctgggaggaatacgaatatatgggtcggcgataactcagtccactcgattatggtttaagatcgggagtcatcaaaaagatactttaaggactagttccggagctacaaaacctgaggggattgggggctagaatctccgtgactcttagagctgttttgatgaccaagaatcacgaagggatccataggcttggctgccttattcagtgattttagcctctctaatcccatgcggttttgtggttttcaaactagcactaataggcttggctgcactcgattttccttacaattcttttttgataattgtgctatcttaacccatcgcaacatgtccttttccccttctaatatagggtatgaattgggtttagaggggaaaaaagaacgggagtaaacgttgtacgtacgaaaagtaaaacggttgcctggatttttcagccgcacaaggtgctttgagtcaagtagttttacatattccctccgtaaagtgttgttttagcattcatcgatttaggtgtggggtccta

SEQ ID NO: 62625 - DNA, 1348 bp, Zea Mays
ctattcttggccttcctcttggtgatccctcaatgaaagcacctgcagcaataatgtacaacatcctgggcgaggatgagggttctttctggctcatcagcttatcagtagggcactaaccattccaggcacatcggtccattggtacgcaaagccagagatgcggaagcaaaggaagatgggtcatattacaattgtggggccttctaagataagtgtaaaatcacgcttggacaacttgctgcaaagaaactcgtctgatcccaaggaagttagccctcgtgttgctattataatggggtcccaatctgatcttcctgtgatgaaagatgctgagagggttttgaaagagttcgacataccttgtgagctaactattgtttctgcacatcgtacaccagagcggatgtatgattatgcgaagtctgctaaagacaggggtttcgaggtcataattgcaggtgcaggcggagcagctcatttaccagggatggtggcttcattgactcctcttcctgtaatcggagttcccattaagacttcaacactatcaggatttgattccctcctatctattgtgcaaatgccaaaaggtattcctgttgcgactgttgctatcgggattgcagaaaatgcaggtttgctggcagctaggattctggctgcaagagatcctgagctccaggacagggtaactaagtaccaggatgatctgagggacatggttttggagacagcagaaaggctggaggaccaaggcccggaggaatttctgaagggaatggattgaccccttttgaagccctggctctggggcctgggaggaatacgaatatatgggtcggcgataactcagtccactcgattatggtttaagatcgggagtcatcaaaaagatactttaaggactagttccggagctacaaaacctgaggggattgggggctagaatctccgtgactcttagagctgttttgatgaccaagaatcacgaagggatccataggcttggctgccttattcagtgattttagcctctctaatcccatgcggttttgtggttttcaaactagcactaataggcttggctgcactcgattttccttacaattcttttttgataattgtgctatcttaacccatcgcaacatgtccttttccccttctaatatagggtatgaattgggtttagaggggaaaaaagaacgggagtaaacgttgtacgtacgaaaagtaaaacggttgcctggatttttcagccgcacaaggtgctttgagtcaagtagttttacatattccctccgtaaagtgttgttttagcattcatcgatttaggtgtggggtccta

SEQ ID NO: 62626 - DNA, 1135 bp, Zea Mays
gtgattggttctcttccctgtcgatcctggctcacgctagtcagccaggctataggtggcctggtttcatctatgcaattgttcaatgtttggttacttgatttaatttagcctggctactatgagacattgtttggttgcttgtatcaaaacatgaaccaaagaaaaatttacaaataaatcttcaaattttatacaacatatatgatctagttttgtccgaaaaaatatcaaaaatacaaatacgaaatcggttcagtgattaaatcttttaattggaaaatataattaaaaaacaaactaaacaatcttttagtagaacgtgtcgctgcatcccactgtcctggccgcgcgcagatgctcagattgggcatcgccagccggcctggctcaggcctcctatttgcatctatgtagcctgacttagtagagatatcaaccaaactaactatgttttaaagatccgcggctgcagcttctgcactcagccacccaaccaaacacacggcatggtggtccgccggtgcacggcgtctccaacaccgtcatcggggtcctggggggcggtcagctcgggaagatgctctgccatgcagcgagtcagatggggattagaattgtcatcctcgaccctcttcccggctgccccgcgagctcggtttgcgatgagcacgtcattgggagcttcaatgatgaggacacggtccgggagttcgccaagaggtgtggggtcctaacagtggagattgagcatgttgatgtcaccacactggagaaactggaaaaacagggcgttgactgcgagcctaacgcctccacaatcatgattattcaggacaagtacaggcagaaaaagcatttctcaagatgcgagatcccattgcctgacttcatggaagtagatactttacgcagtatagaggaggctggagaaaagtttggctatcccctaatggtcaaaagcaagagattagcatatgatggtcgaggaaatgctgtagccaagaacaaagaggagctaccttctgttgttgcttcactaggtgggtttgagcggggcttgtatgttgagagatggactcctttcgtaaaggagctttctgtaatcgtggcaaggagcagagacaactctact

SEQ ID NO: 62627 - DNA, 1022 bp, Zea Mays
gggttttttaacagcccattgcatagcctatcgagcgacgccccacgctcaaaaagcacaaatcgcttcccgcgccgccgccgcgccgccgaccggcgctcctcacctctcccgccgcacccatcgtctcccgttcccggctaaaccctgcttgagccctagacaccgcccgcctccgggaggtagagagcatgcacgccaggttcctcagcgcgccgtcccctgcctccgccgccccctccccgtacgttcgcttggccttcacgggcgcccgcccgcgccgcgcgtgttggaagccgcgaggccccgcgtccgcgtccgcgccgccgcctcggcctctccactcgctgtgcgcccgggcctccatgcagcccgcctctcccgcgcacgacgggcatggtggtccgccggtgcacggcgtctccaacaccgtcatcggggtcctggggggcggtcagctcgggaagatgctctgccatgcagcgagtcagatggggattagaattgtcatcctcgaccctcttcccggctgccccgcgagctcggtttgcgatgagcacgtcattgggagcttcaatgatgaggacacggtccgggagttcgccaagaggtgtggggtcctaacagtggagattgagcatgttgatgtcaccacactggagaaactggaaaaacagggcgttgactgcgagcctaacgcctccacaatcatgattattcaggacaagtacaggcagaaaaagcatttctcaagatgcgagatcccattgcctgacttcatggaagtagatactttacgcagtatagaggaggctggagaaaagtttggctatcccctaatggtcaaaagcaagagattagcatatgatggtcgaggaaatgctgtagccaagaacaaagaggagctaccttctgttgttgcttcactaggtgggtttgagcggggcttgtatgttgagagatggactcctttcgtaaaggagctttctgtaatcgtggcaaggagcagagacaactctact

SEQ ID NO: 62628 - DNA, 514 bp, Zea Mays
ggaaatcgttgaagaaggcctggcatggtggtccgccggtgcacggcgtctccaacaccgtcatcggggtcctggggggcggtcagctcgggaagatgctctgccatgcagcgagtcagatggggattagaattgtcatcctcgaccctcttcccggctgccccgcgagctcggtttgcgatgagcacgtcattgggagcttcaatgatgaggacacggtccgggagttcgccaagaggtgtggggtcctaacagtggagattgagcatgttgatgtcaccacactggagaaactggaaaaacagggcgttgactgcgagcctaacgcctccacaatcatgattattcaggacaagtacaggcagaaaaagcatttctcaagatgcgagatcccattgcctgacttcatggaagtagatactttacgcagtatagaggaggctggagaaaagtttggctatcccctaatggtcaaaagcaagagattagcatatgatggtcgaggaaatgctgt

SEQ ID NO: 62629 - DNA, 2011 bp, Zea Mays
aaaaacagaaaagactaacattttttttttgttactccgctccggtagtacccaatatacatggacatgaacgaatggaattcacgttacatatcagctactcccttgtggcaaaccaatcctgcagaagcaagagggatcagtcgaccatgtcctcgagcacgacggtggcgagcggcgggtgcgcgtaggggcccttgacccaggtgttggcgatgaagcggtagggcgcctcggtgaggtggatgccgtcccagctgacgtgcgcgtcggggtcctcgcaggtggtggcgccagggagcccgcacgacgcgctcacgttgtagttgtacggcccgccgccgccgcagcacgcccgcagagcgccgcgcttgtagcctgtatttacgagttgagtacaatcaggtccgatgcgcgtcctccacccaccacccctagcaaattttcgggaggacagatagcttgtcgtggcgtggcagcacggtgccaagttggtcctggtggccattcgggccgtatatggaaggatccatggacggggtggagtggagtggaggtggagccaagccgagggggggacgggagatgggcgttcggtacgccgtgctgctagcacaggctgtgccaggatctgctctgctgtgcgggttggtgaactcaactcccgctcacactcacaccaatgttgctctggcaatccctgacacacctcgccagcgtaggccatgaccctagctctctctcccgtcccctggctgtggctggcgtacgagcgtcccccgcgacaggcgggagggagaattcacgcgattgttcggttggtcggtcagtgattagtggtggaccaggaccagtgctctgctcgtggcagaggcccagagcagcaaagcagagcagagcagagcagatagatcttcctggtcctatgagagaagagaagagaaaagaagagaatagaatcaaatcaaaacgatcgaagaagcgactgaccgtagaggtgcggtgtgcgcgcgaactgtatgtagggcgtgtagtagtcggcgtagacgacgcgggactccgggcggcggcgctgcaggcggtcgagtgcgacgcggagcatggcgttgtggtagagcgcgacgctgttgtacttcttgaggcagccggtgcgcgggtcgtactcggagcggtcctcggacgggtacatggtgagcgtgatggggatgcatccggcggggaggttgcccggcaccacgacgtggcgggcgccctcgtccagcagccgctccacgccgcccaccagcgacgccaccaccgccggcaccatcgtcttcaccttctccagcgaccagtccgccttccacgcgaagctgtagtcgttgccgccgaactcgccgaacacgaacagggccctcccgaacagggcgcggcacgcggcggggtcgtcggggcagatgctgcgcttcacctcctggaaccactccagctgcacgcccatggacgtgttgaagggcgggatgctccacacgttgttgtccttgaagtacttgaggtccagcgccgtcgcgcccatcaccgcgaagttggcgccctggctgaagttggtgcccttgttcgccgacggagggagcagcgggagaccgaacgcctcggctgcggaagtcgatcacgaggcggccgttggagcacctcgcgtacggcggcgggaacttgggcatgttgggcagcttgcccgagttgatgatgacgaagttgcccgtgtcggagaaggagtcgccgaagctgaagatggcattgtagtactgctgcagcggctcgcccgacgccgcgcctgccaggaacaggagcaccgccggcagccacgccggcggcaccaccgccgagaagcccctcctccgcgccatggccggccgccactaagtacgcaccaaccacaacggaagggaaaccaaccggcagtgtgagtggttgtgtgaaagagagagagagagagggtaaggcgaaaggcaggcaagggctgctgctatgc

SEQ ID NO: 62630 - DNA, 611 bp, Zea Mays
gtagtgcacctgccaaatctcctttttggaaaggagacaccgacaaatccgaatccctgagagttcagaaaccgagccactgcggggcaagaataacagtggcaggagtgatgctcctgagcatgaagcgaggccaccacgacctaagagccgaactttttcgtccaaatgaaagaaaaagggcatattaggaggtatatggtagacgctgagacgcgcaatgtgggaagcaggaaatctcagcttcgatacatgacgacacagattgatggattttttttcgttcttggatgtgatgcttgacaatacatttttgtgttccttgacacatgtacagtggcgtgtggtagttgaagggtgtatagttgtattacttagttcctagttcgtaaaaaaaaacttcaaaagaagaatgcattcctaccaaaaaagggaaagggaaaaaagatgggcgtctgtggtggtcggttgcagcaactgttgtctggttgctatgaactccaaagtgcatgaagagatcaatgtaaccttggatgatgtttgtgtttgtttcgtttactcgtagaatataaaggggagatagaagaattggcttcactttctgggctcag

SEQ ID NO: 62631 - DNA, 845 bp, Zea Mays
agaatttttcaggtcaataaaattattttacaactcactgaagaagataaaggtaaacctggttgactggcttaaaatgatggttgccaacagacgttctgaacaagtggtggacccaaaccttgagagaaggccttcgacaaaggagctgaaacgtgcccttttgactgctctgaggtgtatcgatttgaatgctgagaagaggcctagcatggaccaggtggtccggatgttggattctaatgaactcataccgcaagaggaaaggagacaccgacaaatccgaatccctgagagttcagaaaccgagccactgcggggcaagaataacagtggcaggagtgatgctcctgagcatgaagcgaggccaccacgacctaagagccgaactttttcgtccaaatgaaagaaaaagggcatattaggaggtatatggtagacgctgagacgcgcaatgtgggaagcaggaaatctcagcttcgatacatgacgacacagattgatggattttttttcgttcttggatgtgatgcttgacaatacatttttgtgttccttgacacatgtacagtggcgtgtggtagttgaagggtgtatagttgtattacttagttcctagttcgtaaaaaaaaacttcaaaagaagaatgcattcctaccaaaaaagggaaagggaaaaaagatgggcgtctgtggtggtcggttgcagcaactgttgtctggttgctatgaactccaaagtgcatgaagagatcaatgtaaccttggatgatgtttgtgtttgtttcgtttactcgtagaatataaaggggagatagaagaattggcttcactttctgggctcag

SEQ ID NO: 62632 - DNA, 2505 bp, Zea Mays
gagcacggcccggcacgaggccgcccgccagtgccagtgccagtgccggtccctccctctcttggctggtgctggcctggatcctccacgcgacgccgccgcggctcccttctcgtctcgtcgtccagtggtgggtggtggcggtggtggtggagtgcagatccgcgcatccgtacgtggattgccttccgtctttgcccattgctgttggccagtcggcgtggatttgagagctgcgtgtgtgtgtgtgcatccgtggtttggttacttctccggcactcaagatcgaagtcgcaggacttgtttgggttcaactgaactcccgtgtcctgcgccaggaccgccactgatgagacactcagatttaggatggctttcatccgccgccattgctgagcttctccagtaaagactggaatttttcgccgcgccaacctttaactgtatttcatgatacaaaaaaatgtcatcagactccagtctaaccgaatccctacatgagagaacaattgtctttggccttaaactttgggttgtgattgggatcgctgttggagcgtccctcttgggtattcttctcattcttctcatatgccttaccattcaaagttgtatcaagaggtcacgcaagccactcaatgaccgtcgactgcaccagatccctccagcgtacaaagatatcaaggaagtggggatggtagaccaatttcctgccaaagattttgttgtacatgatgggcttctactcactattcagaatgggcctgagcctgttgaaccagttgatagagatgcgattcagttggctcaggaggaaaagttgaaacaaagagaagagaccaatgtctctgcttcttttcccattatggatggctgcgagggaactcagattgtttctgtcgatgaacagtcttccacgcacgctactgttgactctgcaccattggcaggtttacctgaattttcttatcttggttggggccattggttcactctcagagatctagaccttgcaactgaccattttgcaaaggataatgtaattggtgagggtgggtatggtgttgtatatcgtggcagattatcaaatggcaccccagttgctgtcaagaaaatccttaacaatttaggacaggctgagagagaattcagagtggaagtcgaggcaattggccatgttcgtcacaagaatttggtccgccttttgggttactgtgttgagggtactcaaaggatgcttgtgtatgagtatgtgaataatggaaatcttgaaagttggctccatggggaattgtcccagtacagttctctcacttggttggctcgcatgaaaatccttctgggaactgcaaaggcgtgaccttgcttacttacatgaggcaattgaaccaaaagttgtgcaccgtgacatcaagtccagcaatatcttgattgacgatgagtttaatgccaaaatatcagactttggtttggccaagatgcttggtgctggtaaaagccatattgctacacgagttatgggtacctttggctatgttgcacctgaatatgctaacagtggacttctaaatgaaaagagtgatgtctatagctttggggttgttctgttggaagctattacaggtagagatccaattgattatgatcgccctacaaatgaggtaaacctggttgactggcttaaaatgatggttgccaacagacgttctgaacaagtggtggacccaaaccttgagagaaggccttcgacaaaggagctgaaacgtgcccttttgactgctctgaggtgtatcgatttgaatgctgagaagaggcctagcatggaccaggtggtccggatgttggattctaatgaactcataccgcaagagcatatctgtatctgatatgggatgatatgtcccctgcctggagtatcgagggaaaggagacaccgacaaatccgaatccctgagagttcagaaaccgagccactgcggggcaagaataacagtggcaggagtgatgctcctgagcatgaagcgaggccaccacgacctaagagccgaactttttcgtccaaatgaaagaaaaagggcatattaggaggtatatggtagacgctgagacgcgcaatgtgggaagcaggaaatctcagcttcgatacatgacgacacagattgatggattttttttcgttcttggatgtgatgcttgacaatacatttttgtgttccttgacacatgtacagtggcgtgtggtagttgaagggtgtatagttgtattacttagttcctagttcgtaaaaaaaaacttcaaaagaagaatgcattcctaccaaaaaagggaaagggaaaaaagatgggcgtctgtggtggtcggttgcagcaactgttgtctggttgctatgaactccaaagtgcatgaagagatcaatgtaaccttggatgatgtttgtgtttgtttcgtttactcgtagaatataaaggggagatagaagaattggcttcactttctgggctcag

SEQ ID NO: 62633 - DNA, 2894 bp, Zea Mays
atccacacctgccccccgactgaccccggacggactatgggtttgcttccgcgtcggaaagcgtcactgcgtccgctttacttcacctttactgcggcgctacctacgtgacgcgaactgagccagagctcgctcacctggcactggcaggcacttccgcgcactggcagcagcagctccgtcggtctcccttccccgtcactcccccaggtctgccactccggcgcgcgtccggctgaaccagctacggccggcagtattgctgaggaagtaaagatgagtggacgtggccgtgaaaatttgtaaacgaagcaagtgcggtgcggcaggggagagggagagggggcgaccgaccgtcggaaggtggctgcgatcgacctgccaaccgcccccacgccgcgcacgcactgctgccccagcacacgcctctagaaattccaaaacgagcacggcccggcacgaggccgcccgccagtgccagtgccagtgccggtccctccctctcttggctggtgctggcctggatcctccacgcgacgccgccgcggctcccttctcgtctcgtcgtccagtggtgggtggtggcggtggtggtggagtgcagatccgcgcatccgtacgtggattgccttccgtctttgcccattgctgttggccagtcggcgtggatttgagagctgcgtgtgtgtgtgtgcatccgtggtttggttacttctccggcactcaagatcgaagtcgcaggacttgtttgggttcaactgaactcccgtgtcctgcgccaggaccgccactgatgagacactcagatttaggatggctttcatccgccgccattgctgagcttctccagtaaagactggaatttttcgccgcgccaacctttaactgtatttcatgatacaaaaaaatgtcatcagactccagtctaaccgaatccctacatgagagaacaattgtctttggccttaaactttgggttgtgattgggatcgctgttggagcgtccctcttgggtattcttctcattcttctcatatgccttaccattcaaagttgtatcaagaggtcacgcaagccactcaatgaccgtcgactgcaccagatccctccagcgtacaaagatatcaaggaagtggggatggtagaccaatttcctgccaaagattttgttgtacatgatgggcttctactcactattcagaatgggcctgagcctgttgaaccagttgatagagatgcgattcagttggctcaggaggaaaagttgaaacaaagagaagagaccaatgtctctgcttcttttcccattatggatggctgcgagggaactcagattgtttctgtcgatgaacagtcttccacgcacgctactgttgactctgcaccattggcaggtttacctgaattttcttatcttggttggggccattggttcactctcagagatctagaccttgcaactgaccattttgcaaaggataatgtaattggtgagggtgggtatggtgttgtatatcgtggcagattatcaaatggcaccccagttgctgtcaagaaaatccttaacaatttaggacaggctgagagagaattcagagtggaagtcgaggcaattggccatgttcgtcacaagaatttggtccgccttttgggttactgtgttgagggtactcaaaggatgcttgtgtatgagtatgtgaataatggaaatcttgaaagttggctccatggggaattgtcccagtacagttctctcacttggttggctcgcatgaaaatccttctgggaactgcaaaggcccttgcttacttacatgaggcaattgaaccaaaagttgtgcaccgtgacatcaagtccagcaatatcttgattgacgatgagtttaatgccaaaatatcagactttggtttggccaagatgcttggtgctggtaaaagccatattgctacacgagttatgggtacctttggctatgttgcacctgaatatgctaacagtggacttctaaatgaaaagagtgatgtctatagctttggggttgttctgttggaagctattacaggtagagatccaattgattatgatcgccctacaaatgaggtaaacctggttgactggcttaaaatgatggttgccaacagacgttctgaacaagtggtggacccaaaccttgagagaaggccttcgacaaaggagctgaaacgtgcccttttgactgctctgaggtgtatcgatttgaatgctgagaagaggcctagcatggaccaggtggtccggatgttggattctaatgaactcataccgcaagaggaaaggagacaccgacaaatccgaatccctgagagttcagaaaccgagccactgcggggcaagaataacagtggcaggagtgatgctcctgagcatgaagcgaggccaccacgacctaagagccgaactttttcgtccaaatgaaagaaaaagggcatattaggaggtatatggtagacgctgagacgcgcaatgtgggaagcaggaaatctcagcttcgatacatgacgacacagattgatggattttttttcgttcttggatgtgatgcttgacaatacatttttgtgttccttgacacatgtacagtggcgtgtggtagttgaagggtgtatagttgtattacttagttcctagttcgtaaaaaaaaacttcaaaagaagaatgcattcctaccaaaaaagggaaagggaaaaaagatgggcgtctgtggtggtcggttgcagcaactgttgtctggttgctatgaactccaaagtgcatgaagagatcaatgtaaccttggatgatgtttgtgtttgtttcgtttactcgtagaatataaaggggagatagaagaattggcttcactttctgggctcag

SEQ ID NO: 62634 - DNA, 1360 bp, Zea Mays
gagcacggcccggcacgaggccgcccgccagtgccagtgccagtgccggtccctccctctcttggctggtgctggcctggatcctccacgcgacgccgccgcggctcccttctcgtctcgtcgtccagtggtgggtggtggcggtggtggtggagtgcagatccgcgcatccgtacgtggattgccttccgtctttgcccattgctgttggccagtcggcgtggatttgagagctgcgtgtgtgtgtgtgcatccgtggtttggttacttctccggcactcaagatcgaagtcgcaggacttgtttgggttcaactgaactcccgtgtcctgcgccaggaccgccactgatgagacactcagatttaggatggctttcatccgccgccattgctgagcttctccagtaaagactggaatttttcgccgcgccaacctttaactgtatttcatgatacaaaaaaatgtcatcagactccagtctaaccgaatccctacatgagagaacaattgtctttggccttaaactttgggttgtgattgggatcgctgttggagcgtccctcttgggtattcttctcattcttctcatatgccttaccattcaaagttgtatcaagaggtcacgcaagccactcaatgaccgtcgactgcaccagatccctccagcgtacaaagatatcaaggaagtggggatggtagaccaatttcctgccaaagattttgttgtacatgatgggcttctactcactattcagaatgggcctgagcctgttgaaccagttgatagagatgcgattcagttggctcaggaggaaaagttgaaacaaagagaagagaccaatgtctctgcttcttttcccattatggatggctgcgagggaactcagattgtttctgtcgatgaacagtcttccacgcacgctactgttgactctgcaccattggcaggtttacctgaattttcttatcttggttggggccattggttcactctcagagatctagaccttgcaactgaccattttgcaaaggataatgtaattggtgagggtgggtatggtgttgtatatcgtggcagattatcaaatggcaccccagttgctgtcaagaaaatccttaacaatttaggacaggctgagagagaattcagagtggaagtcgaggcaattggccatgttcgtcacaagaatttggtccgccttttgggttactgtgttgagggtactcaaaggatgcttgtgtatgagtatgtgaataatggaaatcttgaaagttggctccatggggaattgtcccagtacagttctctcacttggttggctcgcatgaaaatccttctgggaactgcaaagccttgc

SEQ ID NO: 62635 - DNA, 3236 bp, Zea Mays
cagccgttctcctctcagccgtcgccgtcgctctcctctcctccacactgctctcctctctcctccgagccgcagctcttctctctccctctcccctgcgcgccgccactgcgggcatctacaccgctgccgctcctctcttctccgagccgcagctcttctctctccttctcccctgcgcgccgccgctgcgtggccctacacgccaccgctacgggtgccctacgcgccgccgtcactgctccagctctcctctgtttcccagccaatgccgccgctctaactccccaaggcatcgccccgacgacggctcaacgacgccccgtcgacgcctcgcggacgccctgcgccgcagcgggcgctttacgctccatggcaaggcgcgttagatgcctcaggttccacgcgcgccttagcccctaagcgacgctaaggcggcgcttcaaggacgccttgataagcatgattgggaggtgaaaacatggattacgactttggtggcacctcacccgatccctatgggggtggaagcatccacctagtgtgtgatcattgcggtaccagtgacaactacaccactgacgacgctgatgatggccaattcacgtgccgtacatgctctgccgtgcacactacacaggcaactgctgctgatcctcatgacttccccgccactggcaacatctctgtccgtcgtgttgccacccagcccacccccaagcttggtgcccgcacacccgcgccttacctgaggacccctcaggctgctcccgtgcctgctactgccgcttttgatgacttcacagagctgagtgagccgcgggactttgtgtctggatctggcacgtgtggggagcctgaggatctggcagtgcaggtccgctggcgctatgtacggggtctccaggtgatcctgcagcggcagctggaggtgctggtggagcggcaccaggtaggcgcgtttgtgtgtgctgttgccggcattgtctgggtgcggtgggttgctgcatccagggtgtttgatggaatctgggcccgccaggtgcttgaggaccacaaggccgtggggagacagaagtgttatgatgacaagaaacctgatgagatgaagtatgaatgggatgatgatatgtcgctccaacgaaaagacaggcacaagctggagtttgcctttttgcgttcgttgaggatgatgctgccggtttactcaacattggctgtttgtttcttggcctgtcatattgcccgtgaagccatcttgccaagtgacatttacaggtgggcaatggaggggaatatcccatatgtggctgcttttactgaagtagacaggttccttgggagctctttccaagactgccctttggatgcaaggcagctgttcaggccggtgcgagttatcggagcatggcaactggaagctgcagctggatccatagcacaaagagtagccttgaggcttccttcagttaacttctatgcaattgctcaacgttgtttgaaggacttgttactgcctatagatagaatcctcccccacgcatgccaaatttatgagtgggcaatgcctgcagaattatggttgtctagtaatcctgctagagtcccaacacgggtttgtgtgatggctatcctaattgtggccctacgacttctttataacatcaacggtcaagggatatgggagaagatttgtgaggaaggaagaaacccaagtgaatctcactatgatgcaaattcatctacttccaggaagcttgaggctagtaacagtgaggagtttggcacaagagaactgttgtgtgctatttcagttgcctatgataaaatcaatacgtcacatgactactcgagtgatctccgctcttatctcaaatactgcaaggaagttgtttttgctggaattacatcttcagatgaacagactcatctaatagagatcttttgggatatgtacaaagccagggaggatgataatatagaagatcatgtaaaatcccagtcccattctatggcagacattccaattacaaatggagtgaggaaacactaccgagatggagcttttgttaaagcaagttccttttctgcatcttcaggtcatgatgcaatgcaaatgctcaagtcagagatgcaagatcatggatttcattatatgccacctaggaaaccaaggaaatcagatggttatcttcgttataggcggcggcggctaagtggtggctttatttttgttgcacatgctgattattacttgttgctacgtgcttttgcaaagcttgcagaaattgatattcgtatcatgcatattagtgtgttgaaacttgagaagagactcgcatgtattgaggagcgaattgaaagaagcttgaacaccttacataacttttctactggaacagtagatgagctaagatctgtatctgactgaagttcctagtgtagtctcatactctgctagcatggaataccccctccattccttctggaaaaaaacatgtggtgccattgcgtaactgtggttttgaagaatatacgtagcttgatacctcaggaattgagggcttctttctgtggcctcttggcattggtaagcaacctgagcacaaggacagggcaggatgtgggtctgtatttgctgaagcaatatgtaccaagaattatgccccccttctttagaacggacataattatatcagggtcctaatcagtactgtggtagattcagcaacagttccagtagtagacctcagtgcttggcagcaatggcactggggatctgcaatcatgaggcagtttcagtttgggaactggagtggcaagaggaaaaaggctggaacctgggctttttaaagaggctaatcagtactgtggtggattcagcaacagttccagtagtagacctcactgcgcggcagcaatggcactaagggatctgggttctgcaatcatgcggcagtttcagtttgggaactggagtggcaagaggaaaaagcatggaatttaggctttttaaagaaatgctatcagtattgtggtcgattcagcaacagttccagtagtggattcagcaacagttcaaggttagtacaattggtcttgtcaaagctgccgacagaactaaaaagatatccagcatagtgtaatgcatcttgatgtactgccgacatttatttcgttccagcttctgcagcaagagctgatcgtttcaaaggtgtttatgttttatagttcac

SEQ ID NO: 62636 - DNA, 2916 bp, Zea Mays
cagccgttctcctctcagccgtcgccgtcgctctcctctcctccacactgctctcctctctcctccgagccgcagctcttctctctccctctcccctgcgcgccgccactgcgggcatctacaccgctgccgctcctctcttctccgagccgcagctcttctctctccttctcccctgcgcgccgccgctgcgtggccctacacgccaccgctacgggtgccctacgcgccgccgtcactgctccagctctcctctgtttcccagccaatgccgccgctctaactccccaaggcatcgccccgacgacggctcaacgacgccccgtcgacgcctcgcggacgccctgcgccgcagcgggcgctttacgctccatggcaaggcgcgttagatgcctcaggttccacgcgcgccttagcccctaagcgacgctaaggcggcgcttcaaggacgccttgataagcatgattgggaggtgaaaacatggattacgactttggtggcacctcacccgatccctatgggggtggaagcatccacctagtgtgtgatcattgcggtaccagtgacaactacaccactgacgacgctgatgatggccaattcacgtgccgtacatgctctgccgtgcacactacacagatgacaagaaacctgatgagatgaagtatgaatgggatgatgatatgtcgctccaacgaaaagacaggcacaagctggagtttgcctttttgcgttcgttgaggatgatgctgccggtttactcaacattggctgtttgtttcttggcctgtcatattgcccgtgaagccatcttgccaagtgacatttacaggtgggcaatggaggggaatatcccatatgtggctgcttttactgaagtagacaggttccttgggagctctttccaagactgccctttggatgcaaggcagctgttcaggccggtgcgagttatcggagcatggcaactggaagctgcagctggatccatagcacaaagagtagccttgaggcttccttcagttaacttctatgcaattgctcaacgttgtttgaaggacttgttactgcctatagatagaatcctcccccacgcatgccaaatttatgagtgggcaatgcctgcagaattatggttgtctagtaatcctgctagagtcccaacacgggtttgtgtgatggctatcctaattgtggccctacgacttctttataacatcaacggtcaagggatatgggagaagatttgtgaggaaggaagaaacccaagtgaatctcactatgatgcaaattcatctacttccaggaagcttgaggctagtaacagtgaggagtttggcacaagagaactgttgtgtgctatttcagttgcctatgataaaatcaatacgtcacatgactactcgagtgatctccgctcttatctcaaatactgcaaggaagttgtttttgctggaattacatcttcagatgaacagactcatctaatagagatcttttgggatatgtacaaagccagggaggatgataatatagaagatcatgtaaaatcccagtcccattctatggcagacattccaattacaaatggagtgaggaaacactaccgagatggagcttttgttaaagcaagttccttttctgcatcttcaggtcatgatgcaatgcaaatgctcaagtcagagatgcaagatcatggatttcattatatgccacctaggaaaccaaggaaatcagatggttatcttcgttataggcggcggcggctaagtggtggctttatttttgttgcacatgctgattattacttgttgctacgtgcttttgcaaagcttgcagaaattgatattcgtatcatgcatattagaataccccctccattccttctggaaaaaaacatgtggtgccattgcgtaactgtggttttgaagaatatacgtagcttgatacctcaggaattgagggcttctttctgtggcctcttggcattggtaagcaacctgagcacaaggacagggcaggatgtgggtctgtatttgctgaagcaatatgtaccaagaattatgccccccttctttagaacggacataattatatcagggtcctaatcagtactgtggtagattcagcaacagttccagtagtagacctcagtgcttggcagcaatggcactggggatctgcaatcatgaggcagtttcagtttgggaactggagtggcaagaggaaaaaggctggaacctgggctttttaaagaggctaatcagtactgtggtggattcagcaacagttccagtagtagacctcactgcgcggcagcaatggcactaagggatctgggttctgcaatcatgcggcagtttcagtttgggaactggagtggcaagaggaaaaagcatggaatttaggctttttaaagaaatgctatcagtattgtggtcgattcagcaacagttccagtagtggattcagcaacagttcaaggttagtacaattggtcttgtcaaagctgccgacagaactaaaaagatatccagcatagtgtaatgcatcttgatgtactgccgacatttatttcgttccagcttctgcagcaagagctgatcgtttcaaaggtgacgagaaattggtcgtactagagatgtactgtctattcgctgtatttgcaagtttaaaccaattattcgaactactgcagctgtaatccagagacaatataatatagaaaaaatagaagtcggtggttaaagccgtaacaaacatgctaacaaacatgctagtaggcttcaattgttaagggcttctttgtttcagcttttttgatgaacttttatgagaatctaactatggtgaaaatctgagtatcatgtgtattacatgcgtagaaagataaaagggtttataggatatttttc

SEQ ID NO: 62637 - DNA, 3381 bp, Zea Mays
cagccgttctcctctcagccgtcgccgtcgctctcctctcctccacactgctctcctctctcctccgagccgcagctcttctctctccctctcccctgcgcgccgccactgcgggcatctacaccgctgccgctcctctcttctccgagccgcagctcttctctctccttctcccctgcgcgccgccgctgcgtggccctacacgccaccgctacgggtgccctacgcgccgccgtcactgctccagctctcctctgtttcccagccaatgccgccgctctaactccccaaggcatcgccccgacgacggctcaacgacgccccgtcgacgcctcgcggacgccctgcgccgcagcgggcgctttacgctccatggcaaggcgcgttagatgcctcaggttccacgcgcgccttagcccctaagcgacgctaaggcggcgcttcaaggacgccttgataagcatgattgggaggtgaaaacatggattacgactttggtggcacctcacccgatccctatgggggtggaagcatccacctagtgtgtgatcattgcggtaccagtgacaactacaccactgacgacgctgatgatggccaattcacgtgccgtacatgctctgccgtgcacactacacaggcaactgctgctgatcctcatgacttccccgccactggcaacatctctgtccgtcgtgttgccacccagcccacccccaagcttggtgcccgcacacccgcgccttacctgaggacccctcaggctgctcccgtgcctgctactgccgcttttgatgacttcacagagctgagtgagccgcgggactttgtgtctggatctggcacgtgtggggagcctgaggatctggcagtgcaggtccgctggcgctatgtacggggtctccaggtgatcctgcagcggcagctggaggtgctggtggagcggcaccagatgacaagaaacctgatgagatgaagtatgaatgggatgatgatatgtcgctccaacgaaaagacaggcacaagctggagtttgcctttttgcgttcgttgaggatgatgctgccggtttactcaacattggctgtttgtttcttggcctgtcatattgcccgtgaagccatcttgccaagtgacatttacaggtgggcaatggaggggaatatcccatatgtggctgcttttactgaagtagacaggttccttgggagctctttccaagactgccctttggatgcaaggcagctgttcaggccggtgcgagttatcggagcatggcaactggaagctgcagctggatccatagcacaaagagtagccttgaggcttccttcagttaacttctatgcaattgctcaacgttgtttgaaggacttgttactgcctatagatagaatcctcccccacgcatgccaaatttatgagtgggcaatgcctgcagaattatggttgtctagtaatcctgctagagtcccaacacgggtttgtgtgatggctatcctaattgtggccctacgacttctttataacatcaacggtcaagggatatgggagaagatttgtgaggaaggaagaaacccaagtgaatctcactatgatgcaaattcatctacttccaggaagcttgaggctagtaacagtgaggagtttggcacaagagaactgttgtgtgctatttcagttgcctatgataaaatcaatacgtcacatgactactcgagtgatctccgctcttatctcaaatactgcaaggaagttgtttttgctggaattacatcttcagatgaacagactcatctaatagagatcttttgggatatgtacaaagccagggaggatgataatatagaagatcatgtaaaatcccagtcccattctatggcagacattccaattacaaatggagtgaggaaacactaccgagatggagcttttgttaaagcaagttccttttctgcatcttcaggtcatgatgcaatgcaaatgctcaagtcagagatgcaagatcatggatttcattatatgccacctaggaaaccaaggaaatcagatggttatcttcgttataggcggcggcggctaagtggtggctttatttttgttgcacatgctgattattacttgttgctacgtgcttttgcaaagcttgcagaaattgatattcgtatcatgcatattagtgtgttgaaacttgagaagagactcgcatgtattgaggagcgaattgaaagaagcttgaacaccttacataacttttctactggaacagtagatgagctaagatctgtatctgactgaagttcctagtgtagtctcatactctgctagcatggaataccccctccattccttctggaaaaaaacatgtggtgccattgcgtaactgtggttttgaagaatatacgtagcttgatacctcaggaattgagggcttctttctgtggcctcttggcattggtaagcaacctgagcacaaggacagggcaggatgtgggtctgtatttgctgaagcaatatgtaccaagaattatgccccccttctttagaacggacataattatatcagggtcctaatcagtactgtggtagattcagcaacagttccagtagtagacctcagtgcttggcagcaatggcactggggatctgcaatcatgaggcagtttcagtttgggaactggagtggcaagaggaaaaaggctggaacctgggctttttaaagaggctaatcagtactgtggtggattcagcaacagttccagtagtagacctcactgcgcggcagcaatggcactaagggatctgggttctgcaatcatgcggcagtttcagtttgggaactggagtggcaagaggaaaaagcatggaatttaggctttttaaagaaatgctatcagtattgtggtcgattcagcaacagttccagtagtggattcagcaacagttcaaggttagtacaattggtcttgtcaaagctgccgacagaactaaaaagatatccagcatagtgtaatgcatcttgatgtactgccgacatttatttcgttccagcttctgcagcaagagctgatcgtttcaaaggtgacgagaaattggtcgtactagagatgtactgtctattcgctgtatttgcaagtttaaaccaattattcgaactactgcagctgtaatccagagacaatataatatagaaaaaatagaagtcggtggttaaagccgtaacaaacatgctaacaaacatgctagtaggcttcaattgttaagggcttctttgtttcagcttttttgatgaacttttatgagaatctaactatggtgaaaatctgagtatcatgtgtattacatgcgtagaaagataaaagggtttataggatatttttc

SEQ ID NO: 62638 - DNA, 3766 bp, Zea Mays
cagccgttctcctctcagccgtcgccgtcgctctcctctcctccacactgctctcctctctcctccgagccgcagctcttctctctccctctcccctgcgcgccgccactgcgggcatctacaccgctgccgctcctctcttctccgagccgcagctcttctctctccttctcccctgcgcgccgccgctgcgtggccctacacgccaccgctacgggtgccctacgcgccgccgtcactgctccagctctcctctgtttcccagccaatgccgccgctctaactccccaaggcatcgccccgacgacggctcaacgacgccccgtcgacgcctcgcggacgccctgcgccgcagcgggcgctttacgctccatggcaaggcgcgttagatgcctcaggttccacgcgcgccttagcccctaagcgacgctaaggcggcgcttcaaggacgccttgataagcatgattgggaggttatctatgcttatagcttttgctctggggttagtgttgttgaattggaatgaatatgtgtggtagtggtactgtggaccgtggaggatagctgagcatgcttttactatcttttagtttcaattttatcatatgccaaaagtgttggtttccttgttttatctttaatctttcattggcaattggaatctctgtctgtaacacccttttattcctggtaaaataactctaattttatgcttcttcatcaggtgaaaacatggattacgactttggtggcacctcacccgatccctatgggggtggaagcatccacctagtgtgtgatcattgcggtaccagtgacaactacaccactgacgacgctgatgatggccaattcacgtgccgtacatgctctgccgtgcacactacacaggcaactgctgctgatcctcatgacttccccgccactggcaacatctctgtccgtcgtgttgccacccagcccacccccaagcttggtgcccgcacacccgcgccttacctgaggacccctcaggctgctcccgtgcctgctactgccgcttttgatgacttcacagagctgagtgagccgcgggactttgtgtctggatctggcacgtgtggggagcctgaggatctggcagtgcaggtccgctggcgctatgtacggggtctccaggtgatcctgcagcggcagctggaggtgctggtggagcggcaccaggtaggcgcgtttgtgtgtgctgttgccggcattgtctgggtgcggtgggttgctgcatccagggtgtttgatggaatctgggcccgccaggtgcttgaggaccacaaggccgtggggagacagaagtgttatgatgacaagaaacctgatgagatgaagtatgaatgggatgatgatatgtcgctccaacgaaaagacaggcacaagctggagtttgcctttttgcgttcgttgaggatgatgctgccggtttactcaacattggctgtttgtttcttggcctgtcatattgcccgtgaagccatcttgccaagtgacatttacaggtgggcaatggaggggaatatcccatatgtggctgcttttactgaagtagacaggttccttgggagctctttccaagactgccctttggatgcaaggcagctgttcaggccggtgcgagttatcggagcatggcaactggaagctgcagctggatccatagcacaaagagtagccttgaggcttccttcagttaacttctatgcaattgctcaacgttgtttgaaggacttgttactgcctatagatagaatcctcccccacgcatgccaaatttatgagtgggcaatgcctgcagaattatggttgtctagtaatcctgctagagtcccaacacgggtttgtgtgatggctatcctaattgtggccctacgacttctttataacatcaacggtcaagggatatgggagaagatttgtgaggaaggaagaaacccaagtgaatctcactatgatgcaaattcatctacttccaggaagcttgaggctagtaacagtgaggagtttggcacaagagaactgttgtgtgctatttcagttgcctatgataaaatcaatacgtcacatgactactcgagtgatctccgctcttatctcaaatactgcaaggaagttgtttttgctggaattacatcttcagatgaacagactcatctaatagagatcttttgggatatgtacaaagccagggaggatgataatatagaagatcatgtaaaatcccagtcccattctatggcagacattccaattacaaatggagtgaggaaacactaccgagatggagcttttgttaaagcaagttccttttctgcatcttcaggtcatgatgcaatgcaaatgctcaagtcagagatgcaagatcatggatttcattatatgccacctaggaaaccaaggaaatcagatggttatcttcgttataggcggcggcggctaagtggtggctttatttttgttgcacatgctgattattacttgttgctacgtgcttttgcaaagcttgcagaaattgatattcgtatcatgcatattagtgtgttgaaacttgagaagagactcgcatgtattgaggagcgaattgaaagaagcttgaacaccttacataacttttctactggaacagtagatgagctaagatctgtatctgactgaagttcctagtgtagtctcatactctgctagcatggaataccccctccattccttctggaaaaaaacatgtggtgccattgcgtaactgtggttttgaagaatatacgtagcttgatacctcaggaattgagggcttctttctgtggcctcttggcattggtaagcaacctgagcacaaggacagggcaggatgtgggtctgtatttgctgaagcaatatgtaccaagaattatgccccccttctttagaacggacataattatatcagggtcctaatcagtactgtggtagattcagcaacagttccagtagtagacctcagtgcttggcagcaatggcactggggatctgcaatcatgaggcagtttcagtttgggaactggagtggcaagaggaaaaaggctggaacctgggctttttaaagaggctaatcagtactgtggtggattcagcaacagttccagtagtagacctcactgcgcggcagcaatggcactaagggatctgggttctgcaatcatgcggcagtttcagtttgggaactggagtggcaagaggaaaaagcatggaatttaggctttttaaagaaatgctatcagtattgtggtcgattcagcaacagttccagtagtggattcagcaacagttcaaggttagtacaattggtcttgtcaaagctgccgacagaactaaaaagatatccagcatagtgtaatgcatcttgatgtactgccgacatttatttcgttccagcttctgcagcaagagctgatcgtttcaaaggtgacgagaaattggtcgtactagagatgtactgtctattcgctgtatttgcaagtttaaaccaattattcgaactactgcagctgtaatccagagacaatataatatagaaaaaatagaagtcggtggttaaagccgtaacaaacatgctaacaaacatgctagtaggcttcaattgttaagggcttctttgtttcagcttttttgatgaacttttatgagaatctaactatggtgaaaatctgagtatcatgtgtattacatgcgtagaaagataaaagggtttataggatatttttc

SEQ ID NO: 62639 - DNA, 3424 bp, Zea Mays
cagccgttctcctctcagccgtcgccgtcgctctcctctcctccacactgctctcctctctcctccgagccgcagctcttctctctccctctcccctgcgcgccgccactgcgggcatctacaccgctgccgctcctctcttctccgagccgcagctcttctctctccttctcccctgcgcgccgccgctgcgtggccctacacgccaccgctacgggtgccctacgcgccgccgtcactgctccagctctcctctgtttcccagccaatgccgccgctctaactccccaaggcatcgccccgacgacggctcaacgacgccccgtcgacgcctcgcggacgccctgcgccgcagcgggcgctttacgctccatggcaaggcgcgttagatgcctcaggttccacgcgcgccttagcccctaagcgacgctaaggcggcgcttcaaggacgccttgataagcatgattgggaggtgaaaacatggattacgactttggtggcacctcacccgatccctatgggggtggaagcatccacctagtgtgtgatcattgcggtaccagtgacaactacaccactgacgacgctgatgatggccaattcacgtgccgtacatgctctgccgtgcacactacacaggcaactgctgctgatcctcatgacttccccgccactggcaacatctctgtccgtcgtgttgccacccagcccacccccaagcttggtgcccgcacacccgcgccttacctgaggacccctcaggctgctcccgtgcctgctactgccgcttttgatgacttcacagagctgagtgagccgcgggactttgtgtctggatctggcacgtgtggggagcctgaggatctggcagtgcaggtccgctggcgctatgtacggggtctccaggtgatcctgcagcggcagctggaggtgctggtggagcggcaccaggtgcttgaggaccacaaggccgtggggagacagaagtgttatgatgacaagaaacctgatgagatgaagtatgaatgggatgatgatatgtcgctccaacgaaaagacaggcacaagctggagtttgcctttttgcgttcgttgaggatgatgctgccggtttactcaacattggctgtttgtttcttggcctgtcatattgcccgtgaagccatcttgccaagtgacatttacaggtgggcaatggaggggaatatcccatatgtggctgcttttactgaagtagacaggttccttgggagctctttccaagactgccctttggatgcaaggcagctgttcaggccggtgcgagttatcggagcatggcaactggaagctgcagctggatccatagcacaaagagtagccttgaggcttccttcagttaacttctatgcaattgctcaacgttgtttgaaggacttgttactgcctatagatagaatcctcccccacgcatgccaaatttatgagtgggcaatgcctgcagaattatggttgtctagtaatcctgctagagtcccaacacgggtttgtgtgatggctatcctaattgtggccctacgacttctttataacatcaacggtcaagggatatgggagaagatttgtgaggaaggaagaaacccaagtgaatctcactatgatgcaaattcatctacttccaggaagcttgaggctagtaacagtgaggagtttggcacaagagaactgttgtgtgctatttcagttgcctatgataaaatcaatacgtcacatgactactcgagtgatctccgctcttatctcaaatactgcaaggaagttgtttttgctggaattacatcttcagatgaacagactcatctaatagagatcttttgggatatgtacaaagccagggaggatgataatatagaagatcatgtaaaatcccagtcccattctatggcagacattccaattacaaatggagtgaggaaacactaccgagatggagcttttgttaaagcaagttccttttctgcatcttcaggtcatgatgcaatgcaaatgctcaagtcagagatgcaagatcatggatttcattatatgccacctaggaaaccaaggaaatcagatggttatcttcgttataggcggcggcggctaagtggtggctttatttttgttgcacatgctgattattacttgttgctacgtgcttttgcaaagcttgcagaaattgatattcgtatcatgcatattagtgtgttgaaacttgagaagagactcgcatgtattgaggagcgaattgaaagaagcttgaacaccttacataacttttctactggaacagtagatgagctaagatctgtatctgactgaagttcctagtgtagtctcatactctgctagcatggaataccccctccattccttctggaaaaaaacatgtggtgccattgcgtaactgtggttttgaagaatatacgtagcttgatacctcaggaattgagggcttctttctgtggcctcttggcattggtaagcaacctgagcacaaggacagggcaggatgtgggtctgtatttgctgaagcaatatgtaccaagaattatgccccccttctttagaacggacataattatatcagggtcctaatcagtactgtggtagattcagcaacagttccagtagtagacctcagtgcttggcagcaatggcactggggatctgcaatcatgaggcagtttcagtttgggaactggagtggcaagaggaaaaaggctggaacctgggctttttaaagaggctaatcagtactgtggtggattcagcaacagttccagtagtagacctcactgcgcggcagcaatggcactaagggatctgggttctgcaatcatgcggcagtttcagtttgggaactggagtggcaagaggaaaaagcatggaatttaggctttttaaagaaatgctatcagtattgtggtcgattcagcaacagttccagtagtggattcagcaacagttcaaggttagtacaattggtcttgtcaaagctgccgacagaactaaaaagatatccagcatagtgtaatgcatcttgatgtactgccgacatttatttcgttccagcttctgcagcaagagctgatcgtttcaaaggtgacgagaaattggtcgtactagagatgtactgtctattcgctgtatttgcaagtttaaaccaattattcgaactactgcagctgtaatccagagacaatataatatagaaaaaatagaagtcggtggttaaagccgtaacaaacatgctaacaaacatgctagtaggcttcaattgttaagggcttctttgtttcagcttttttgatgaacttttatgagaatctaactatggtgaaaatctgagtatcatgtgtattacatgcgtagaaagataaaagggtttataggatatttttc

SEQ ID NO: 62640 - DNA, 3361 bp, Zea Mays
cagccgttctcctctcagccgtcgccgtcgctctcctctcctccacactgctctcctctctcctccgagccgcagctcttctctctccctctcccctgcgcgccgccactgcgggcatctacaccgctgccgctcctctcttctccgagccgcagctcttctctctccttctcccctgcgcgccgccgctgcgtggccctacacgccaccgctacgggtgccctacgcgccgccgtcactgctccagctctcctctgtttcccagccaatgccgccgctctaactccccaaggcatcgccccgacgacggctcaacgacgccccgtcgacgcctcgcggacgccctgcgccgcagcgggcgctttacgctccatggcaaggcgcgttagatgcctcaggttccacgcgcgccttagcccctaagcgacgctaaggcggcgcttcaaggacgccttgataagcatgattgggaggtgaaaacatggattacgactttggtggcacctcacccgatccctatgggggtggaagcatccacctagtgtgtgatcattgcggtaccagtgacaactacaccactgacgacgctgatgatggccaattcacgtgccgtacatgctctgccgtgcacactacacaggcaactgctgctgatcctcatgacttccccgccactggcaacatctctgtccgtcgtgttgccacccagcccacccccaagcttggtgcccgcacacccgcgccttacctgaggacccctcaggctgctcccgtgcctgctactgccgcttttgatgacttcacagagctgagtgagccgcgggactttgtgtctggatctggcacgtgtggggagcctgaggatctggcagtgcaggtccgctggcgctatgtacggggtctccaggtgatcctgcagcggcagctggaggtgctggtggagcggcaccaggtaggcgcgtttgtgtgtgctgttgccggcattgtctgggtgcggtgggttgctgcatccagggtgtttgatggaatctgggcccgccaggtgcttgaggaccacaaggccgtggggagacagaagtgttatgatgacaagaaacctgatgagatgaagtatgaatgggatgatgatatgtcgctccaacgaaaagacaggcacaagctggagtttgcctttttgcgttcgttgaggatgatgctgccggtttactcaacattggctgtttgtttcttggcctgtcatattgcccgtgaagccatcttgccaagtgacatttacaggtgggcaatggaggggaatatcccatatgtggctgcttttactgaagtagacaggttccttgggagctctttccaagactgccctttggatgcaaggcagctgttcaggccggtgcgagttatcggagcatggcaactggaagctgcagctggatccatagcacaaagagtagccttgaggcttccttcagttaacttctatgcaattgctcaacgttgtttgaaggacttgttactgcctatagatagaatcctcccccacgcatgccaaatttatgagtgggcaatgcctgcagaattatggttgtctagtaatcctgctagagtcccaacacgggtttgtgtgatggctatcctaattgtggccctacgacttctttataacatcaacggtcaagggatatgggagaagatttgtgaggaaggaagaaacccaagtgaatctcactatgatgcaaattcatctacttccaggaagcttgaggctagtaacagtgaggagtttggcacaagagaactgttgtgtgctatttcagttgcctatgataaaatcaatacgtcacatgactactcgagtgatctccgctcttatctcaaatactgcaaggaagttgtttttgctggaattacatcttcagatgaacagactcatctaatagagatcttttgggatatgtacaaagccagggaggatgataatatagaagatcatgtaaaatcccagtcccattctatggcagacattccaattacaaatggagtgaggaaacactaccgagatggagcttttgttaaagcaagttccttttctgcatcttcaggtcatgatgcaatgcaaatgctcaagtcagagatgcaagatcatggatttcattatatgccacctaggaaaccaaggaaatcagatggttatcttcgttataggcggcggcggctaagtggtggctttatttttgttgcacatgctgattattacttgttgctacgtgcttttgcaaagcttgcagaaattgatattcgtatcatgcatattagaataccccctccattccttctggaaaaaaacatgtggtgccattgcgtaactgtggttttgaagaatatacgtagcttgatacctcaggaattgagggcttctttctgtggcctcttggcattggtaagcaacctgagcacaaggacagggcaggatgtgggtctgtatttgctgaagcaatatgtaccaagaattatgccccccttctttagaacggacataattatatcagggtcctaatcagtactgtggtagattcagcaacagttccagtagtagacctcagtgcttggcagcaatggcactggggatctgcaatcatgaggcagtttcagtttgggaactggagtggcaagaggaaaaaggctggaacctgggctttttaaagaggctaatcagtactgtggtggattcagcaacagttccagtagtagacctcactgcgcggcagcaatggcactaagggatctgggttctgcaatcatgcggcagtttcagtttgggaactggagtggcaagaggaaaaagcatggaatttaggctttttaaagaaatgctatcagtattgtggtcgattcagcaacagttccagtagtggattcagcaacagttcaaggttagtacaattggtcttgtcaaagctgccgacagaactaaaaagatatccagcatagtgtaatgcatcttgatgtactgccgacatttatttcgttccagcttctgcagcaagagctgatcgtttcaaaggtgacgagaaattggtcgtactagagatgtactgtctattcgctgtatttgcaagtttaaaccaattattcgaactactgcagctgtaatccagagacaatataatatagaaaaaatagaagtcggtggttaaagccgtaacaaacatgctaacaaacatgctagtaggcttcaattgttaagggcttctttgtttcagcttttttgatgaacttttatgagaatctaactatggtgaaaatctgagtatcatgtgtattacatgcgtagaaagataaaagggtttataggatatttttc

SEQ ID NO: 62641 - DNA, 3639 bp, Zea Mays
cagccgttctcctctcagccgtcgccgtcgctctcctctcctccacactgctctcctctctcctccgagccgcagctcttctctctccctctcccctgcgcgccgccactgcgggcatctacaccgctgccgctcctctcttctccgagccgcagctcttctctctccttctcccctgcgcgccgccgctgcgtggccctacacgccaccgctacgggtgccctacgcgccgccgtcactgctccagctctcctctgtttcccagccaatgccgccgctctaactccccaaggcatcgccccgacgacggctcaacgacgccccgtcgacgcctcgcggacgccctgcgccgcagcgggcgctttacgctccatggcaaggcgcgttagatgcctcaggttccacgcgcgccttagcccctaagcgacgctaaggcggcgcttcaaggacgccttgataagcatgattgggaggttatctatgcttatagcttttgctctggggtgaaaacatggattacgactttggtggcacctcacccgatccctatgggggtggaagcatccacctagtgtgtgatcattgcggtaccagtgacaactacaccactgacgacgctgatgatggccaattcacgtgccgtacatgctctgccgtgcacactacacaggcaactgctgctgatcctcatgacttccccgccactggcaacatctctgtccgtcgtgttgccacccagcccacccccaagcttggtgcccgcacacccgcgccttacctgaggacccctcaggctgctcccgtgcctgctactgccgcttttgatgacttcacagagctgagtgagccgcgggactttgtgtctggatctggcacgtgtggggagcctgaggatctggcagtgcaggtccgctggcgctatgtacggggtctccaggtgatcctgcagcggcagctggaggtgctggtggagcggcaccaggtaggcgcgtttgtgtgtgctgttgccggcattgtctgggtgcggtgggttgctgcatccagggtgtttgatggaatctgggcccgccaggtgcttgaggaccacaaggccgtggggagacagaagtgttatggtagcagatatgagctgtttttatgctttcccttgttaatcatttccatcggaagaactgaatggactctgacataaatctatctcttgttgcagatgacaagaaacctgatgagatgaagtatgaatgggatgatgatatgtcgctccaacgaaaagacaggcacaagctggagtttgcctttttgcgttcgttgaggatgatgctgccggtttactcaacattggctgtttgtttcttggcctgtcatattgcccgtgaagccatcttgccaagtgacatttacaggtgggcaatggaggggaatatcccatatgtggctgcttttactgaagtagacaggttccttgggagctctttccaagactgccctttggatgcaaggcagctgttcaggccggtgcgagttatcggagcatggcaactggaagctgcagctggatccatagcacaaagagtagccttgaggcttccttcagttaacttctatgcaattgctcaacgttgtttgaaggacttgttactgcctatagatagaatcctcccccacgcatgccaaatttatgagtgggcaatgcctgcagaattatggttgtctagtaatcctgctagagtcccaacacgggtttgtgtgatggctatcctaattgtggccctacgacttctttataacatcaacggtcaagggatatgggagaagatttgtgaggaaggaagaaacccaagtgaatctcactatgatgcaaattcatctacttccaggaagcttgaggctagtaacagtgaggagtttggcacaagagaactgttgtgtgctatttcagttgcctatgataaaatcaatacgtcacatgactactcgagtgatctccgctcttatctcaaatactgcaaggaagttgtttttgctggaattacatcttcagatgaacagactcatctaatagagatcttttgggatatgtacaaagccagggaggatgataatatagaagatcatgtaaaatcccagtcccattctatggcagacattccaattacaaatggagtgaggaaacactaccgagatggagcttttgttaaagcaagttccttttctgcatcttcaggtcatgatgcaatgcaaatgctcaagtcagagatgcaagatcatggatttcattatatgccacctaggaaaccaaggaaatcagatggttatcttcgttataggcggcggcggctaagtggtggctttatttttgttgcacatgctgattattacttgttgctacgtgcttttgcaaagcttgcagaaattgatattcgtatcatgcatattagtgtgttgaaacttgagaagagactcgcatgtattgaggagcgaattgaaagaagcttgaacaccttacataacttttctactggaacagtagatgagctaagatctgtatctgactgaagttcctagtgtagtctcatactctgctagcatggaataccccctccattccttctggaaaaaaacatgtggtgccattgcgtaactgtggttttgaagaatatacgtagcttgatacctcaggaattgagggcttctttctgtggcctcttggcattggtaagcaacctgagcacaaggacagggcaggatgtgggtctgtatttgctgaagcaatatgtaccaagaattatgccccccttctttagaacggacataattatatcagggtcctaatcagtactgtggtagattcagcaacagttccagtagtagacctcagtgcttggcagcaatggcactggggatctgcaatcatgaggcagtttcagtttgggaactggagtggcaagaggaaaaaggctggaacctgggctttttaaagaggctaatcagtactgtggtggattcagcaacagttccagtagtagacctcactgcgcggcagcaatggcactaagggatctgggttctgcaatcatgcggcagtttcagtttgggaactggagtggcaagaggaaaaagcatggaatttaggctttttaaagaaatgctatcagtattgtggtcgattcagcaacagttccagtagtggattcagcaacagttcaaggttagtacaattggtcttgtcaaagctgccgacagaactaaaaagatatccagcatagtgtaatgcatcttgatgtactgccgacatttatttcgttccagcttctgcagcaagagctgatcgtttcaaaggtgacgagaaattggtcgtactagagatgtactgtctattcgctgtatttgcaagtttaaaccaattattcgaactactgcagctgtaatccagagacaatataatatagaaaaaatagaagtcggtggttaaagccgtaacaaacatgctaacaaacatgctagtaggcttcaattgttaagggcttctttgtttcagcttttttgatgaacttttatgagaatctaactatggtgaaaatctgagtatcatgtgtattacatgcgtagaaagataaaagggtttataggatatttttc

SEQ ID NO: 62642 - DNA, 3636 bp, Zea Mays
cagccgttctcctctcagccgtcgccgtcgctctcctctcctccacactgctctcctctctcctccgagccgcagctcttctctctccctctcccctgcgcgccgccactgcgggcatctacaccgctgccgctcctctcttctccgagccgcagctcttctctctccttctcccctgcgcgccgccgctgcgtggccctacacgccaccgctacgggtgccctacgcgccgccgtcactgctccagctctcctctgtttcccagccaatgccgccgctctaactccccaaggcatcgccccgacgacggctcaacgacgccccgtcgacgcctcgcggacgccctgcgccgcagcgggcgctttacgctccatggcaaggcgcgttagatgcctcaggttccacgcgcgccttagcccctaagcgacgctaaggcggcgcttcaaggacgccttgataagcatgattgggaggttatctatgcttatagcttttgctctggggtgaaaacatggattacgactttggtggcacctcacccgatccctatgggggtggaagcatccacctagtgtgtgatcattgcggtaccagtgacaactacaccactgacgacgctgatgatggccaattcacgtgccgtacatgctctgccgtgcacactacacaggcaactgctgctgatcctcatgacttccccgccactggcaacatctctgtccgtcgtgttgccacccagcccacccccaagcttggtgcccgcacacccgcgccttacctgaggacccctcaggctgctcccgtgcctgctactgccgcttttgatgacttcacagagctgagtgagccgcgggactttgtgtctggatctggcacgtgtggggagcctgaggatctggcagtgcaggtccgctggcgctatgtacggggtctccaggtgatcctgcagcggcagctggaggtgctggtggagcggcaccaggtaggcgcgtttgtgtgtgctgttgccggcattgtctgggtgcggtgggttgctgcatccagggtgtttgatggaatctgggcccgccaggtgcttgaggaccacaaggccgtggggagacagaagtgttatggtagcagatatgagctgtttttatgctttcccttgttaatcatttccatcggaagaactgaatggactctgacataaatctatctcttgttgcagatgacaagaaacctgatgagatgaagtatgaatgggatgatgatatgtcgctccaacgaaaagacaggcacaagctggagtttgcctttttgcgttcgttgaggatgatgctgccggtttactcaacattggctgtttgtttcttggcctgtcatattgcccgtgaagccatcttgccaagtgacatttacaggtgggcaatggaggggaatatcccatatgtggctgcttttactgaagtagacaggttccttgggagctctttccaagactgccctttggatgcaaggcagctgttcaggccggtgcgagttatcggagcatggcaactggaagctgcagctggatccatagcacaaagagtagccttgaggcttccttcagttaacttctatgcaattgctcaacgttgtttgaaggacttgttactgcctatagatagaatcctcccccacgcatgccaaatttatgagtgggcaatgcctgcagaattatggttgtctagtaatcctgctagagtcccaacacgggtttgtgtgatggctatcctaattgtggccctacgacttctttataacatcaacggtcaagggatatgggagatttgtgaggaaggaagaaacccaagtgaatctcactatgatgcaaattcatctacttccaggaagcttgaggctagtaacagtgaggagtttggcacaagagaactgttgtgtgctatttcagttgcctatgataaaatcaatacgtcacatgactactcgagtgatctccgctcttatctcaaatactgcaaggaagttgtttttgctggaattacatcttcagatgaacagactcatctaatagagatcttttgggatatgtacaaagccagggaggatgataatatagaagatcatgtaaaatcccagtcccattctatggcagacattccaattacaaatggagtgaggaaacactaccgagatggagcttttgttaaagcaagttccttttctgcatcttcaggtcatgatgcaatgcaaatgctcaagtcagagatgcaagatcatggatttcattatatgccacctaggaaaccaaggaaatcagatggttatcttcgttataggcggcggcggctaagtggtggctttatttttgttgcacatgctgattattacttgttgctacgtgcttttgcaaagcttgcagaaattgatattcgtatcatgcatattagtgtgttgaaacttgagaagagactcgcatgtattgaggagcgaattgaaagaagcttgaacaccttacataacttttctactggaacagtagatgagctaagatctgtatctgactgaagttcctagtgtagtctcatactctgctagcatggaataccccctccattccttctggaaaaaaacatgtggtgccattgcgtaactgtggttttgaagaatatacgtagcttgatacctcaggaattgagggcttctttctgtggcctcttggcattggtaagcaacctgagcacaaggacagggcaggatgtgggtctgtatttgctgaagcaatatgtaccaagaattatgccccccttctttagaacggacataattatatcagggtcctaatcagtactgtggtagattcagcaacagttccagtagtagacctcagtgcttggcagcaatggcactggggatctgcaatcatgaggcagtttcagtttgggaactggagtggcaagaggaaaaaggctggaacctgggctttttaaagaggctaatcagtactgtggtggattcagcaacagttccagtagtagacctcactgcgcggcagcaatggcactaagggatctgggttctgcaatcatgcggcagtttcagtttgggaactggagtggcaagaggaaaaagcatggaatttaggctttttaaagaaatgctatcagtattgtggtcgattcagcaacagttccagtagtggattcagcaacagttcaaggttagtacaattggtcttgtcaaagctgccgacagaactaaaaagatatccagcatagtgtaatgcatcttgatgtactgccgacatttatttcgttccagcttctgcagcaagagctgatcgtttcaaaggtgacgagaaattggtcgtactagagatgtactgtctattcgctgtatttgcaagtttaaaccaattattcgaactactgcagctgtaatccagagacaatataatatagaaaaaatagaagtcggtggttaaagccgtaacaaacatgctaacaaacatgctagtaggcttcaattgttaagggcttctttgtttcagcttttttgatgaacttttatgagaatctaactatggtgaaaatctgagtatcatgtgtattacatgcgtagaaagataaaagggtttataggatatttttc

SEQ ID NO: 62643 - DNA, 903 bp, Zea Mays
ttcaaagtttaatgctagaagactaggggcttcagatcagtgcatcatattctaaggaagacaaggatggccaggcgcgagagagtatttaaggtggtgatcaaatttgcggcccgtgctgatctccaccatctggctatgtttctagctggaaggcaagcagatgcccctcaggaagctcttcaagtgcttgacattgtactacgtgaattgcctaccgcgaggtattctcctgttggtaggtcattttactctcccaacttagggagacgtcaaaaacttggtgagggataggaaagttggcgtggtttttaccaaagcataaggccgacaaagatgggcctttcactgaatattgatatgtcctctactgcatttatcgagcctctccctatgatcgattttgttgctcagcttcttaacagagatatcttagttagaccattatctgattctgatcgcgtgaagattaaaaaaaccctaagaggtgtgaaggttgaggtgactcacaggggaaacatgcgcagaaaatatcgcatttctggcctcacctcacaagcaacaagagagctatcattccctgttgatgatcgtggtactgtgaagactgtggtgcaatacttcatggagacttatggttttagtatccagcacaccactttaccatgcttgcaagtgggcaatcaacaaagaccaaattatctgcctatggaggtttgcaagattgttgaaggacagcgttactcaaagcgactcaatgagaaacaaatcacttctctactgaaagtgacctgccagcgccctcaagagcgtgagctagacatcttacaggattccggctctcatcaagtgactcctccccatcacgatgactttgcggacaaatgtctcaattctagtggt

SEQ ID NO: 62644 - DNA, 1004 bp, Zea Mays
catattcaaagtttaatgctagaagactaggggcttcagatcagtgcatcatattctaaggaagacaaggatggccagatcgttgacatgtaactaaaccaaaactacttcctgagaatctgcacacaaggcgcgagagagtatttaaggtggtgatcaaatttgcggcccgtgctgatctccaccatctggctatgtttctagctggaaggcaagcagatgcccctcaggaagctcttcaagtgcttgacattgtactacgtgaattgcctaccgcgaggtattctcctgttggtaggtcattttactctcccaacttagggagacgtcaaaaacttgatatgtcctctactgcatttatcgagcctctccctatgatcgattttgttgctcagcttcttaacagagatatcttagttagaccattatctgattctgatcgcgtgaagattaaaaaaaccctaagaggtgtgaaggttgaggtgactcacaggggaaacatgcgcagaaaatatcgcatttctggcctcacctcacaagcaacaagagagctatcattccctgttgatgatcgtggtactgtgaagactgtggtgcaatacttcatggagacttatggttttagtatccagcacaccactttaccatgcttgcaagtgggcaatcaacaaagaccaaattatctgcctatggaggtttgcaagattgttgaaggacagcgttactcaaagcgactcaatgagaaacaaatcacttctctactgaaagtgacctgccagcgccctcaagagcgtgagctagacatcttacaggttttagttgcactgcttactgttgctacttgtcttttcttaacatgattatacattttcccgtgcatccaaaatgatctctggctctctggggttggaaacaacgtatctgtaacagttgtttgattattaaaatgtttgtgtgaattgtatttttctgtaaatagtgccatctgttatttcagaatactg

SEQ ID NO: 62645 - DNA, 1547 bp, Zea Mays
cccgcccacgcacttctctctctcaccagcaggtcgcgccgccgccgcgccaccgctctccggatcatcggccacccacctcctcttcctcctcgcccgctcactggccgtccctgctgcggtgccgcgcgttcaagtaggaggccggcgacggcgacccggctgaggccaacgcacggaagcgcaggaagggcccgctgtataagctcaaggcggcgatccagggcctcgcgagatctcgcttcaccgccgcggaggtgtacgggggagagtaccagtaccagcgcgccgttgagaaggcggaggagatattcttctcgctcatggattcgtcccgacaaaccaagctcaacaagcagaagatgttggaattggctactttgattcccttcttaaagtagggttccttcaagaccaggatcgagaccaaatttacaacagttgagcttgtttgttattggagacaatactaagcacgcattgcagggaaggagtgggggaggattggccccttgtctcacatattcaaagtttaatgctagaagactaggggcttcagatcagtgcatcatattctaaggaagacaaggatggccaggcgcgagagagtatttaaggtggtgatcaaatttgcggcccgtgctgatctccaccatctggctatgtttctagctggaaggcaagcagatgcccctcaggaagctcttcaagtgcttgacattgtactacgtgaattgcctaccgcgaggtattctcctgttggtaggtcattttactctcccaacttagggagacgtcaaaaacttggtgagggataggaaagttggcgtggtttttaccaaagcataaggccgacaaagatgggcctttcactgaatattgatatgtcctctactgcatttatcgagcctctccctatgatcgattttgttgctcagcttcttaacagagatatcttagttagaccattatctgattctgatcgcgtgaagattaaaaaaaccctaagaggtgtgaaggttgaggtgactcacaggggaaacatgcgcagaaaatatcgcatttctggcctcacctcacaagcaacaagagagctatcattccctgttgatgatcgtggtactgtgaagactgtggtgcaatacttcatggagacttatggttttagtatccagcacaccactttaccatgcttgcaagtgggcaatcaacaaagaccaaattatctgcctatggaggtttgcaagattgttgaaggacagcgttactcaaagcgactcaatgagaaacaaatcacttctctactgaaagtgacctgccagcgccctcaagagcgtgagctagacatcttacaggttttagttgcactgcttactgttgctacttgtcttttcttaacatgattatacattttcccgtgcatccaaaatgatctctggctctctggggttggaaacaacgtatctgtaacagttgtttgattattaaaatgtttgtgtgaattgtatttttctgtaaatagtgccatctgttatttcagaatactg

SEQ ID NO: 62646 - DNA, 1351 bp, Zea Mays
gctctagggacaaatgtcgagacaggtccaaaaggccaagaaccaccatcaattagctctggcaatattagttttgttgttcgtgtattggctaagttattgcagatggcgcttgccttttgcttcagctgatcaagatctagaattcgaattgtgccatgtgaagcatttcgcatttcacgatctgcaaagtgcaacggacaattttaattccaagaatatattaggtcaaggaggttttggaattgtgtataaaggctgtttgagaaatggaactttagtggtagtgaagagattaaaagatcctgatgttattggtgaagtccaatttcaaacagaagttgagttgattggccttgctgtgcacaggaatctcttgcgtttgtatggattttgcatgacctctaaagaacgattgcttgtatatccatatatgccaaatggcagtgttgctgaccgcttgagagattatcgcaatggaaaaccatctcttgattggagtaaacgcatgcggattgctcttggcactgccagggggttactctaccttcatgaacaatgcaatcctaagatcatccacagggacgtcaaagctgcaaacatattgctcgatggaaatttcgaagcaatcgtcggggattttggattagcaaaacttcttgaccgtcaggaatcacatgttaccactgcaattcggggcactattgggcatattgctcctgagtatctctcaactggacagtcctcggaaaagactgatgtttatgggattggcattctcctattggaactgattactggtcctaagaccttgagcaatggacatggccagtctcagaaaggcatgattctagactgggttagagagctaaaggaggacaagagactggataagctggtcgacagggatctcagagattcatttgatattcttgagctggagtgttcagttgacgtgatcatccaatgcacacagacgaaccctatgctgtggcctaagttgtctgaaattctacacgctcttgaagccaatgtcacgctggcggaaaccagcgtcgaattgaacagggaacctcttccttatggcgtgccttgcagttcctctatgaggcatgaggaccctcacgattcatcgtccttcataatagagccaatcgagctatctggtcccagatgacagctgttgtcggtgtggttgaggcgaaaagaaaagaaaagaaaacagggaaatgatacaattgtacaaaacatgtatatcctagatgtagttcaacttggcaatagtttgctgggcgtgttgccgtaccttacataatattttgaacgtgaggctggggcgaaccttgttggc

SEQ ID NO: 62647 - DNA, 763 bp, Zea Mays
gtggcatccgttttgtcaggctagctagctagcttcttgcctaaaggaggcatcagagagtacgtataggacactgaggaatgggtcactggaagagccgtcaccgcagcggaagggacgaggcagctcgagcgaaggaaacccggtgcttggctctggcctgctgcccctgctactacgtgctcggctccgtcgccaggggggttgcgaggtgcctcttcgtggcttgctatccagtgatacaatgctgtggcctcgacgagtgcaggcaccaccaccatgccagcaacttcagccacttcagatgatgcatgcatatatatacatccatcaagctagtaggagtgcatcttctacttgatcagcagttccatttgccctctctttcagcgaagaaagtcgggtttgttagaagtttaactaaatcgtgcaagattctgaagaaattttcttcacgtctttttacaagttctcggtgttcttggactcctgttttggtttactagttgtccacttcttcgctggaggagacagacctgcctgcatcaagactatgactaacgcaataagatagatgagtaaagctgaagaaaactgcctgctaaatggctattggtctcctggaagttattcatagagtggttggttggtgacaacgctttccgattgtttcttccctacaataatgtgcctctcaggggaaaaaacatactcctaataatttcttacagctggttctgggtcccctttctttagcccctaa

SEQ ID NO: 62648 - DNA, 1567 bp, Zea Mays
cagctgaacgcctgaacccaatcctaaggagtagccatttcccccactcttcccgccaccatggccgccgccgctatctctttgccccgctctccctctctccttcaacccacgcgccggcgctcagcgccaccagcctgcacgcagtccgagcgcggcgtctccttcgaccccggctccgccttctaccgcagcgacagcgccgcgggtcgtgacctcgccgtcctcgcagccactctccaccgccgccgtggccgtcccgacccttccgccccattcctctgcctcgatgctatgtgcggctgtggcgtccgcgcgctccgctacctcgcgcaggccggcgccgacttcgtctgggccaacgacgcctccgaggcgcttcgccccatcatccttgccaacctctgtcgctttgagcggggctcgccggaagcggtggcggggtgcaggaggtgggtggtgtcgcacaacgacgccacccgtctgctcgcagagcgctacctccggcgcgagtacttcgatgtcatcgacgtcgactcgttcggcggcgacgccgcttacgtgagggcagcgctcttggcgctcaaaattggggggctgctctacctgacgtccacggattggcggtcggcgagaggatatgggtcgagaaggtggcgctgcacgggaagcatctcttttgggatttcacataacacccctattctcgtattttgcgtatcatggtcctatttatcgagtaatggtacaactatgcaacggaaaagatgatggcatcagtaactatggcttcatttgtcattgcaagagttgtggtcagtctcaaacttttggatttgatgagctggggcagatttcttgtggatgtacagacacaacagtaggcccactttggacaggtcctctccacgatgcctctttccttaccgaaatgctaggcttggccaacgaatggggatgggcatgcacaattgaaaatggtgtctctttggaaaaacttcttggcatgatgattgaagagagtgacccgaggttgcctcctggatatataagacttgatgagatttcgagacgagcaaaagttaactctcccccactcggcaccctcatcaattcattgcggaaggaggggttttctgcttgtagatctcatattagtgcaaatacaatcaagaccaactgttcaatggcttcttgcatcgatgttgcccggggcatccgaaactcaagatgaatatcaattaccaactatatatggtatggctgcgtgtgcccagcgaggctcacgcgagcttggtgcataaggggctgattggttggatgcacagccagctatccaggctagttaagtatatgcaaatctaggtgtttggtttcctgtattgcttcagtagcctgactaaactgtgcaaaagtggcatccaaacttggctctaggcttgttcgttttgctcttaatccatgtggatttggtaggattaagtgggttttaatttcaaacaagataaaatcttttataatttttttccaatctcatccaatacatataagatgggaataaccggac

SEQ ID NO: 62649 - DNA, 1638 bp, Zea Mays
cagctgaacgcctgaacccaatcctaaggagtagccatttcccccactcttcccgccaccatggccgccgccgctatctctttgccccgctctccctctctccttcaacccacgcgccggcgctcagcgccaccagcctgcacgcagtccgagcgcggcgtctccttcgaccccggctccgccttctaccgcagcgacagcgccgcgggtcgtgacctcgccgtcctcgcagccactctccaccgccgccgtggccgtcccgacccttccgccccattcctctgcctcgatgctatgtgcggctgtggcgtccgcgcgctccgctacctcgcgcaggccggcgccgacttcgtctgggccaacgacgcctccgaggcgcttcgccccatcatccttgccaacctctgtcgctttgagcggggctcgccggaagcggtggcggggtgcaggaggtgggtggtgtcgcacaacgacgccacccgtctgctcgcagagcgctacctccggcgcgagtacttcgatgtcatcgacgtcgactcgttcggcggcgacgccgcttacgtgagggcagcgctcttggcgctcaaaattggggggctgctctacctgacgtccacggattggcggtcggcgagaggatatgggtcgagaagctctttgtcttcatatggagcgtatgttcgtccaatgccatatccaaatgaggtcggtttgcgaatggttataggtggcgctgcacgggaagcatctcttttgggatttcacataacacccctattctcgtattttgcgtatcatggtcctatttatcgagtaatggtacaactatgcaacggaaaagatgatggcatcagagttgtggtcagtctcaaacttttggatttgatgagctggggcagatttcttgtggatgtacagacacaacagtaggatgccgattcaatcactgttgtaggcccactttggacaggtcctctccacgatgcctctttccttaccgaaatgctaggcttggccaacgaatggggatgggcatgcacaattgaaaatggtgtctctttggaaaaacttcttggcatgatgattgaagagagtgacccgaggttgcctcctggatatataagacttgatgagatttcgagacgagcaaaagttaactctcccccactcggcaccctcatcaattcattgcggaaggaggggttttctgcttgtagatctcatattagtgcaaatacaatcaagaccaactgttcaatggcttcttgcatcgatgttgcccggggcatccgaaactcaagatgaatatcaattaccaactatatatggtatggctgcgtgtgcccagcgaggctcacgcgagcttggtgcataaggggctgattggttggatgcacagccagctatccaggctagttaagtatatgcaaatctaggtgtttggtttcctgtattgcttcagtagcctgactaaactgtgcaaaagtggcatccaaacttggctctaggcttgttcgttttgctcttaatccatgtggatttggtaggattaagtgggttttaatttcaaacaagataaaatcttttataatttttttccaatctcatccaatacatataagatgggaataaccggac

SEQ ID NO: 62650 - DNA, 1634 bp, Zea Mays
cagctgaacgcctgaacccaatcctaaggagtagccatttcccccactcttcccgccaccatggccgccgccgctatctctttgccccgctctccctctctccttcaacccacgcgccggcgctcagcgccaccagcctgcacgcagtccgagcgcggcgtctccttcgaccccggctccgccttctaccgcagcgacagcgccgcgggtcgtgacctcgccgtcctcgcagccactctccaccgccgccgtggccgtcccgacccttccgccccattcctctgcctcgatgctatgtgcggctgtggcgtccgcgcgctccgctacctcgcgcaggccggcgccgacttcgtctgggccaacgacgcctccgaggcgcttcgccccatcatccttgccaacctctgtcgctttgagcggggctcgccggaagcggtggcggggtgcaggaggtgggtggtgtcgcacaacgacgccacccgtctgctcgcagagcgctacctccggcgcgagtacttcgatgtcatcgacgtcgactcgttcggcggcgacgccgcttacgtgagggcagcgctcttggcgctcaaaattggggggctgctctacctgacgtccacggattggcggtcggcgagaggatatgggtcgagaagctctttgtcttcatatggagcgtatgttcgtccaatgccatatccaaatgaggtcggtttgcgaatggttataggtggcgctgcacgggaagcatctcttttgggatttcacataacacccctattctcgtattttgcgtatcatggtcctatttatcgagtaatggtacaactatgcaacggaaaagatgatggcatcagagttgtggtcagtctcaaacttttggatttgatgagctggggcagatttcttgtggatgtacagacacaacagatgccgattcaatcactgttgtaggcccactttggacaggtcctctccacgatgcctctttccttaccgaaatgctaggcttggccaacgaatggggatgggcatgcacaattgaaaatggtgtctctttggaaaaacttcttggcatgatgattgaagagagtgacccgaggttgcctcctggatatataagacttgatgagatttcgagacgagcaaaagttaactctcccccactcggcaccctcatcaattcattgcggaaggaggggttttctgcttgtagatctcatattagtgcaaatacaatcaagaccaactgttcaatggcttcttgcatcgatgttgcccggggcatccgaaactcaagatgaatatcaattaccaactatatatggtatggctgcgtgtgcccagcgaggctcacgcgagcttggtgcataaggggctgattggttggatgcacagccagctatccaggctagttaagtatatgcaaatctaggtgtttggtttcctgtattgcttcagtagcctgactaaactgtgcaaaagtggcatccaaacttggctctaggcttgttcgttttgctcttaatccatgtggatttggtaggattaagtgggttttaatttcaaacaagataaaatcttttataatttttttccaatctcatccaatacatataagatgggaataaccggac

SEQ ID NO: 62651 - DNA, 2527 bp, Zea Mays
cacaggggcacgcgaagagcagcgggaaaaagaaacctagtctcatgataccatgaaagcaatgtaattgcacaagaaattagtagatttattaggaggcaatagacactggtacatatattggcaaggaggacccaagagagtgaccgattgggtatctcagtgcaaggaatttcttgagagaagaacatctcctgaagcaacaaaagccttagaattgatctccaatgcattgcacatatgtccacattcggacagcgtcaaggagatgaaagcagaggcattgttgatgctacgaagatatgaagaagtgattcaactatgccaagagtctgtgaatctgactgaaagaaattcagttttattcaaagacaatggagaaccaaagaattccagagtctctgaacggatgcagttttctggaaggtattggcggccctacctcatttgcaagtcttatttcctttcaggcaagcttgatgaggctcttgaattgttaaagaaacatgagcaagtcacacctgtcaaagaaagtgaagtgaacacatatgaagaaaaattctcatcattgtcagcgactataagagaactactttctcttaaggctgctggaaatgaatcatttcaagctggtagatattcagatgctgtcaaacagtattcagcagctttggcatggaatagtgaatcacgcccattttcagctgtatgtttttgcaatcgtgcagcggcttatcaagcactcggtcaagttactgatgcaatatcagattgttcacttgccatggttcttgatacaaattatccaaaggcaatttcaagacgagccaccttatacaagatgataagggattatgaccaagctgctaatgatgtaaggaagctaatctctcttcttgaaaagaaagtcaatgtgtctggagtatcaccaaaagcttttaacaagcacaatgatctcaagcaagcacatgtgaggctttcatccatagaggatgaagcaaaaaatgacacccccctgaatttgtatttaatcttgggagtggagccatcctgctcttcagaagatattaagaaggcataccggaaagcagcattgagacatcacccagacaaggctactcaattattaataaggaacgagaacgcagaagatggattttggagggatgttgtcaaggaagtctatgcagacgctgatcatctgttcaaaacaattggggaggcatataatgttctttctgacccggccaagcgtgaagagtacaactttgaagaggatctaagaaatgccaggaggagagtatctagttctaggagcatgcataggtcacctgaacagaactacagcaacagaggctttaatccacgccagcggcagtcaagcagagcatcacgttcacgttggtacagcaattcagacgattactggtaaagaagccattacatatggagtgggcatgtggtgcgaagcaacttttgcatgtgtggagcaaaaggcctccttgcaccaagatggcacctgcctttctggggttttttaggtgccggtgctgacgcaccagccttcgcagtctcagctttcgtgtctgtttgctgtgtttcttttccagagggtcagccttcgcagtctcagctttcgtgtctgtttgctgtgtttcttttccagagggtgaaaatattaggattgatcaactggggatctgggatgattggttgacacttgattagcacagaaaatacgtgggattaggaagtggtacatcaaattatcttttgttggcctggtgatttctgaacactgactgcttgggagtggctggcatgatggtatccactcttgaggagttgaacactgagaacaacttcgaaggttaggagcaaggataaagatgttggttcctcgaatatctgcaggcactcttttgctggatgcatggctactgtttagcacgggcagtttgcagcagatcaactggaaggagacatgctcagatgctcctgtttggcgcgtgcagttctgttctgttgcttctgtttaatccaaacgacgtagcgctggaaacagagtggctacatattacaactggctaactgctcaatgtcggaactcggaatcacgattttttatttattcattgttattagaggttttagctagcccaatgttgagagtattttattcagatcaaggttccttcgaagaaaaaagaggctcgggttacggtgacattggccaattgcaggttctgtcatgttgcttatgatgaaatatttggaacgacttaaacccttggactgctgcatatgtttttttttgcgtgaacgtttcgttgataaacgggatatatacacatattcgaaggccttaaggcacaaagaaaaggagactaattaagggtgtgtttggttggagagtcaactaaaatgagcgaaatgagcggctgtattacagtttttgagaatgaatctattctattttatgtttggcaaacagaatttagccgctctattttttatttgattgaag

SEQ ID NO: 62652 - DNA, 5398 bp, Zea Mays
ccaccggcggtagcgctcgcttcgccgcgccaaaaacctagcggctccgagctccccgccgcctccgtggcttatatggcgaacccgggcctagggcttggactcgcgccaccgggcgccgagccctccgccggagcgccgccctcttcacgtcgcgcgccgcgcttggccaaacggcgccacgcgcccgcctcctcccgctcccgcatgccgcagacctcagccggaatatggaacccgtttggtggtggcggaggtacggatagacagaccggaggctttgtgtttggtgctgcttcggcagtgagccaacagcctttggagccagcagtgtcagtagcttcacccactgaggcgcccttcgtgtttgggagcgtgagggagagcctgcctcggtttgacgagggatcgcccgcttcatcaaagctccctgataagatggagaagttgaacctgcgaacatcaagtgaggttgacgatggtctcggtcaggggagggatcgaaaggatggaagttcggtatttggtgctgatatatctggtttgttttctagtaacaaggaatctaatgtgctccaggagaagcttacacagttgaatttaggccacaaagaacccttgcaaagtaagaagagggatagtgctaatggtgtgccgcaagcatttgtgtttggaggtaatggagctgggagttttgctgactgtaagaacaaagccgcccctggtgcacattcagatgatcctagttcagttcatggcactgatgcaaaaggtatggctgggaagtcgatgcagttcaatataggcagtcaagcaccttccaggggtggggggattgatcgtactaatggagcaccagaagctttcacgtttcgaagtaccacattaagtggtcatgtggataatataaacaatgttgactctggtgccaataccagttcttccactgttgctaaatgtgtttgtgatgcagattttcctctggaaaagataacacggttgtgtataggaagtgacatgcccttgcatgagacgaaaagtggttatcaacccaaagtgtttacgtttggaagtggaggaatcccaggcgctgtttttgggaaggaaactggcagcacatcagataggagcagtgaattcctctctgcaaatagcaatacttctagttcaagcagtgattttttctctacagcaaatagcaacgtttctaattccgctaatggcacttattgtttgccaccagagaagacaccagatttgaatgcaggagacagagtcatgtcacagagcttggaaggtgataattctaattgtccaacagagacctttctatttgaaagaaatgaaacccgaagctctgtttcgcactctgcaagcatagccatggatgacggtgggaattttgtcaatgatgaaaatactgacacctgtagttcagctcacagtacagtggagtgtgcaggtgctctcccagagaagatgacaaagttaggtataggatgcagaattccacatcatagcaggaaagatgaaactgctaccgatccaccagaagtatatgtatttggatgtaatctttctagcttttcttctgcccagacttcaagtaaatcgaatgatcgcacgactcctgaattttgttttcaaagcaaaacaggggcaacttcaggatatggtgctgttccccaaaccaaagttcaggattcatacccatttacaattttgaataattcatgtactttctctacttttgagaatgcagttcctgctttcagttttgggacactgaatgcagaaacagaaacagctccagatgatcctttttctttttctgtcaaacatgatttgcctgggtattccagagagaccttatttggtttagacagtataaaatctgcatacaaggacaaaagggaagcatgtaaaggaaaaatgaaaaacaagaggccaactaggctaaagcaacatgctcagctccatcaggttatttctaaggaagcctgtaccagtggagaagcatcagatttagcaggtgactgttcaccaatggattgttcgccatatcctgcagaatctgaacatgtgccaacagaggcatatgtggcttctgatcagcccgttcacataggtgatactgttatctcgaacgggaacaccagttgtgctgaggatgatgtagtttctgcagccgagcacttggttactgatgcagacctactgatgtttggagatgaaggtagaggaccgaaactagatgcatctgagagcaattttggtagcagcgtttctagttttgaaggagatcaaagcaatgcatcacaacattctttcactaatattgggcaaaactgtaatgagaatacctacagaactccccatgattttgttgaggctgctgcttttcaatcaaactcatcaaatttcagtgggctgaactttagattcggtgtgtcatcctctccacaaatctctgctgcggcacaaagacgtagcacaagaaggaagttaagaacaaagggtagtctagcatcgaaaccttcaactatcgactctttagaacagccaaaatcttcacaagatactaagggcatgcagtttttctgtgaagcaagtaaaaatgaagactcagtgaaagcgcaacaatcaagagattcttctacttctgtggccttggagacttgtgaaacctggcgtactagtggaaataaagcctatgcaaatggacattttactgctgcagaggattattatacccgtggaataaactctgttacccacaatggcgtttctggacaatgttcccgtgcattgatgctgtgttacagcaaccgtgcagctacaagaatgtcacttggcatgatgtgggaggcgcttcaggattgtttgactgctacatcaattgaccccacttttcttaaagctaaagttagagctgccaagtgccagcttgcattgggcgatcttgaagatgcatcaatgagttacatgtcctgtttgaacagtaacaccgagagctctgaccctaaaatatttgctgaggcttctgatggtttggaaggagtcaagagagtgaccgattgggtatctcagtgcaaggaatttcttgagagaagaacatctcctgaagcaacaaaagccttagaattgatctccaatgcattgcacatatgtccacattcggacagcgtcaaggagatgaaagcagaggcattgttgatgctacgaagatatgaagaagtgattcaactatgccaagagtctgtgaatctgactgaaagaaattcagttttattcaaagacaatggagaaccaaagaattccagagtctctgaacggatgcagttttctggaaggtattggcggccctacctcatttgcaagtcttatttcctttcaggcaagcttgatgaggctcttgaattgttaaagaaacatgagcaagtcacacctgtcaaagaaagtgaagtgaacacatatgaagaaaaattctcatcattgtcagcgactataagagaactactttctcttaaggctgctggaaatgaatcatttcaagctggtagatattcagatgctgtcaaacagtattcagcagctttggcatggaatagtgaatcacgcccattttcagctgtatgtttttgcaatcgtgcagcggcttatcaagcactcggtcaagttactgatgcaatatcagattgttcacttgccatggttcttgatacaaattatccaaaggcaatttcaagacgagccaccttatacaagatgataagggattatgaccaagctgctaatgatgtaaggaagctaatctctcttcttgaaaagaaagtcaatgtgtctggagtatcaccaaaagcttttaacaagcacaatgatctcaagcaagcacatgtgaggctttcatccatagaggatgaagcaaaaaatgacacccccctgaatttgtatttaatcttgggagtggagccatcctgctcttcagaagatattaagaaggcataccggaaagcagcattgagacatcacccagacaaggctactcaattattaataaggaacgagaacgcagaagatggattttggagggatgttgtcaaggaagtctatgcagacgctgatcatctgttcaaaacaattggggaggcatataatgttctttctgacccggccaagcgtgaagagtacaactttgaagaggatctaagaaatgccaggaggagagtatctagttctaggagcatgcataggtcacctgaacagaactacagcaacagaggctttaatccacgccagcggcagtcaagcagagcatcacgttcacgttggtacagcaattcagacgattactggtaaagaagccattacatatggagtgggcatgtggtgcgaagcaacttttgcatgtgtggagcaaaaggcctccttgcaccaagatggcacctgcctttctggggttttttaggtgccggtgctgacgcaccagccttcgcagtctcagctttcgtgtctgtttgctgtgtttcttttccagagggtgaaaatattaggattgatcaactggggatctgggatgattggttgacacttgattagcacagaaaatacgtgggattaggaagtggtacatcaaattatcttttgttggcctggtgatttctgaacactgactgcttgggagtggctggcatgatggtatccactcttgaggagttgaacactgagaacaacttcgaaggttaggagcaaggataaagatgttggttcctcgaatatctgcaggcactcttttgctggatgcatggctactgtttagcacgggcagtttgcagcagatcaactggaaggagacatgctcagatgctcctgtttggcgcgtgcagttctgttctgttgcttctgtttaatccaaacgacgtagcgctggaaacagagtggctacatattacaactggctaactgctcaatgtcggaactcggaatcacgattttttatttattcattgttattagaggttttagctagcccaatgttgagagtattttattcagatcaaggttccttcgaagaaaaaagaggctcgggttacggtgacattggccaattgcaggttctgtcatgttgcttatgatgaaatatttggaacgacttaaacccttggactgctgcatatgtttttttttgcgtgaacgtttcgttgataaacgggatatatacacatattcgaaggccttaaggcacaaagaaaaggagactaattaagggtgtgtttggttggagagtcaactaaaatgagcgaaatgagcggctgtattacagtttttgagaatgaatctattctattttatgtttggcaaacagaatttagccgctctattttttatttgattgaag

SEQ ID NO: 62653 - DNA, 5216 bp, Zea Mays
ccaccggcggtagcgctcgcttcgccgcgccaaaaacctagcggctccgagctccccgccgcctccgtggcttatatggcgaacccgggcctagggcttggactcgcgccaccgggcgccgagccctccgccggagcgccgccctcttcacgtcgcgcgccgcgcttggccaaacggcgccacgcgcccgcctcctcccgctcccgcatgccgcagacctcagccggaatatggaacccgtttggtggtggcggaggtacggatagacagaccggaggctttgtgtttggtgctgcttcggcagtgagccaacagcctttggagccagcagtgtcagtagcttcacccactgaggcgcccttcgtgtttgggagcgtgagggagagcctgcctcggtttgacgagggatcgcccgcttcatcaaagctccctgataagatggagaagttgaacctgcgaacatcaagtgaggttgacgatggtctcggtcaggggagggatcgaaaggatggaagttcggtatttggtgctgatatatctggtttgttttctagtaacaaggaatctaatgtgctccaggagaagcttacacagttgaatttaggccacaaagaacccttgcaaagtaagaagagggatagtgctaatggtgtgccgcaagcatttgtgtttggaggtaatggagctgggagttttgctgactgtaagaacaaagccgcccctggtgcacattcagatgatcctagttcagttcatggcactgatgcaaaaggtatggctgggaagtcgatgcagttcaatataggcagtcaagcaccttccaggggtggggggattgatcgtactaatggagcaccagaagctttcacgtttcgaagtaccacattaagtggtcatgtggataatataaacaatgttgactctggtgccaataccagttcttccactgttgctaaatgtgtttgtgatgcagattttcctctggaaaagataacacggttgtgtataggaagtgacatgcccttgcatgagacgaaaagtggttatcaacccaaagtgtttacgtttggaagtggaggaatcccaggcgctgtttttgggaaggaaactggcagcacatcagataggagcagtgaattcctctctgcaaatagcaatacttctagttcaagcagtgattttttctctacagcaaatagcaacgtttctaattccgctaatggcacttattgtttgccaccagagaagacaccagatttgaatgcaggagacagagtcatgtcacagagcttggaaggtgataattctaattgtccaacagagacctttctatttgaaagaaatgaaacccgaagctctgtttcgcactctgcaagcatagccatggatgacggtgggaattttgtcaatgatgaaaatactgacacctgtagttcagctcacagtacagtggagtgtgcaggtgctctcccagagaagatgacaaagttaggtataggatgcagaattccacatcatagcaggaaagatgaaactgctaccgatccaccagaagtatatgtatttggatgtaatctttctagcttttcttctgcccagacttcaagtaaatcgaatgatcgcacgactcctgaattttgttttcaaagcaaaacaggggcaacttcaggatatggtgctgttccccaaaccaaagttcaggattcatacccatttacaattttgaataattcatgtactttctctacttttgagaatgcagttcctgctttcagttttgggacactgaatgcagaaacagaaacagctccagatgatcctttttctttttctgtcaaacatgatttgcctgggtattccagagagaccttatttggtttagacagtataaaatctgcatacaaggacaaaagggaagcatgtaaaggaaaaatgaaaaacaagaggccaactaggctaaagcaacatgctcagctccatcaggttatttctaaggaagcctgtaccagtggagaagcatcagatttagcaggtgactgttcaccaatggattgttcgccatatcctgcagaatctgaacatgtgccaacagaggcatatgtggcttctgatcagcccgttcacataggtgatactgttatctcgaacgggaacaccagttgtgctgaggatgatgtagtttctgcagccgagcacttggttactgatgcagacctactgatgtttggagatgaaggtagaggaccgaaactagatgcatctgagagcaattttggtagcagcgtttctagttttgaaggagatcaaagcaatgcatcacaacattctttcactaatattgggcaaaactgtaatgagaatacctacagaactccccatgattttgttgaggctgctgcttttcaatcaaactcatcaaatttcagtgggctgaactttagattcggtgtgtcatcctctccacaaatctctgctgcggcacaaagacgtagcacaagaaggaagttaagaacaaagggtagtctagcatcgaaaccttcaactatcgactctttagaacagccaaaatcttcacaagatactaagggcatgcagtttttctgtgaagcaagtaaaaatgaagactcagtgaaagcgcaacaatcaagagattcttctacttctgtggccttggagacttgtgaaacctggcgtactagtggaaataaagcctatgcaaatggacattttactgctgcagaggattattatacccgtggaataaactctgttacccacaatggcgtttctggacaatgttcccgtgcattgatgctgtgttacagcaaccgtgcagctacaagaatgtcacttggcatgatgtgggaggcgcttcaggattgtttgactgctacatcaattgaccccacttttcttaaagctaaagttagagctgccaagtgccagcttgcattgggcgatcttgaagatgcatcaatgagttacatgtcctgtttgaacagtaacaccgagagctctgaccctaaaatatttgctgaggcttctgatggtttggaaggagtcaagagagtgaccgattgggtatctcagtgcaaggaatttcttgagagaagaacatctcctgaagcaacaaaagccttagaattgatctccaatgcattgcacatatgtccacattcggacagcgtcaaggagatgaaagcagaggcattgttgatgctacgaagatatgaagaagtgattcaactatgccaagagtctgtgaatctgactgaaagaaattcagttttattcaaagacaatggagaaccaaagaattccagagtctctgaacggatgcagttttctggaaggtattggcggccctacctcatttgcaagtcttatttcctttcaggcaagcttgatgaggctcttgaattgttaaagaaacatgagcaagtcacacctgtcaaagaaagtgaagtgaacacatatgaagaaaaattctcatcattgtcagcgactataagagaactactttctcttaaggctgctggaaatgaatcatttcaagctggtagatattcagatgctgtcaaacagtattcagcagctttggcatggaatagtgaatcacgcccattttcagctgtatgtttttgcaatcgtgcagcggcttatcaagcactcggtcaagttactgatgcaatatcagattgttcacttgccatggttcttgatacaaattatccaaaggcaatttcaagacgagccaccttatacaagatgataagggattatgaccaagctgctaatgatgtaaggaagctaatctctcttcttgaaaagaaagtcaatgtgtctggagtatcaccaaaagcttttaacaagcacaatgatctcaagcaagcacatgtgaggctttcatccatagaggatgaagcaaaaaatgacacccccctgaatttgtatttaatcttgggagtggagccatcctgctcttcagaagatattaagaaggcataccggaaagcagcattgagacatcacccagacaaggctactcaattattaataaggaacgagaacgcagaagatggattttggagggatgttgtcaaggaagtctatgcagacgctgatcatctgttcaaaacaattggggaggcatataatgttctttctgacccggccaagcgtgaagagtacaactttgaagaggatctaagaaatgccaggaggagagtatctagttctaggagcatgcataggtcacctgaacagaactacagcaacagaggctttaatccacgccagcggcagtcaagcagagcatcacgttcacgttggtacagcaattcagacgattactgagggtgaaaatattaggattgatcaactggggatctgggatgattggttgacacttgattagcacagaaaatacgtgggattaggaagtggtacatcaaattatcttttgttggcctggtgatttctgaacactgactgcttgggagtggctggcatgatggtatccactcttgaggagttgaacactgagaacaacttcgaaggttaggagcaaggataaagatgttggttcctcgaatatctgcaggcactcttttgctggatgcatggctactgtttagcacgggcagtttgcagcagatcaactggaaggagacatgctcagatgctcctgtttggcgcgtgcagttctgttctgttgcttctgtttaatccaaacgacgtagcgctggaaacagagtggctacatattacaactggctaactgctcaatgtcggaactcggaatcacgattttttatttattcattgttattagaggttttagctagcccaatgttgagagtattttattcagatcaaggttccttcgaagaaaaaagaggctcgggttacggtgacattggccaattgcaggttctgtcatgttgcttatgatgaaatatttggaacgacttaaacccttggactgctgcatatgtttttttttgcgtgaacgtttcgttgataaacgggatatatacacatattcgaaggccttaaggcacaaagaaaaggagactaattaagggtgtgtttggttggagagtcaactaaaatgagcgaaatgagcggctgtattacagtttttgagaatgaatctattctattttatgtttggcaaacagaatttagccgctctattttttatttgattgaag

SEQ ID NO: 62654 - DNA, 5382 bp, Zea Mays
ccaccggcggtagcgctcgcttcgccgcgccaaaaacctagcggctccgagctccccgccgcctccgtggcttatatggcgaacccgggcctagggcttggactcgcgccaccgggcgccgagccctccgccggagcgccgccctcttcacgtcgcgcgccgcgcttggccaaacggcgccacgcgcccgcctcctcccgctcccgcatgccgcagacctcagccggaatatggaacccgtttggtggtggcggaggtacggatagacagaccggaggctttgtgtttggtgctgcttcggcagtgagccaacagcctttggagccagcagtgtcagtagcttcacccactgaggcgcccttcgtgtttgggagcgtgagggagagcctgcctcggtttgacgagggatcgcccgcttcatcaaagctccctgataagatggagaagttgaacctgcgaacatcaagtgaggttgacgatggtctcggtcaggggagggatcgaaaggatggaagttcggtatttggtgctgatatatctggtttgttttctagtaacaaggaatctaatgtgctccaggagaagcttacacagttgaatttaggccacaaagaacccttgcaaagtaagaagagggatagtgctaatggtgtgccgcaagcatttgtgtttggaggtaatggagctgggagttttgctgactgtaagaacaaagccgcccctggtgcacattcagatgatcctagttcagttcatggcactgatgcaaaaggtatggctgggaagtcgatgcagttcaatataggcagtcaagcaccttccaggggtggggggattgatcgtactaatggagcaccagaagctttcacgtttcgaagtaccacattaagtggtcatgtggataatataaacaatgttgactctggtgccaataccagttcttccactgttgctaaatgtgtttgtgatgcagattttcctctggaaaagataacacggttgtgtataggaagtgacatgcccttgcatgagacgaaaagtggttatcaacccaaagtgtttacgtttggaagtggaggaatcccaggcgctgtttttgggaaggaaactggcagcacatcagataggagcagtgaattcctctctgcaaatagcaatacttctagttcaagcagtgattttttctctacagcaaatagcaacgtttctaattccgctaatggcacttattgtttgccaccagagaagacaccagatttgaatgcaggagacagagtcatgtcacagagcttggaaggtgataattctaattgtccaacagagacctttctatttgaaagaaatgaaacccgaagctctgtttcgcactctgcaagcatagccatggatgacggtgggaattttgtcaatgatgaaaatactgacacctgtagttcagctcacagtacagtggagtgtgcaggtgctctcccagagaagatgacaaagttaggtataggatgcagaattccacatcatagcaggaaagatgaaactgctaccgatccaccagaagtatatgtatttggatgtaatctttctagcttttcttctgcccagacttcaagtaaatcgaatgatcgcacgactcctgaattttgttttcaaagcaaaacaggggcaacttcaggatatggtgctgttccccaaaccaaagttcaggattcatacccatttacaattttgaataattcatgtactttctctacttttgagaatgcagttcctgctttcagttttgggacactgaatgcagaaacagaaacagctccagatgatcctttttctttttctgtcaaacatgatttgcctgggtattccagagagaccttatttggtttagacagtataaaatctgcatacaaggacaaaagggaagcatgtaaaggaaaaatgaaaaacaagaggccaactaggctaaagcaacatgctcagctccatcaggttatttctaaggaagcctgtaccagtggagaagcatcagatttagcaggtgactgttcaccaatggattgttcgccatatcctgcagaatctgaacatgtgccaacagaggcatatgtggcttctgatcagcccgttcacataggtgatactgttatctcgaacgggaacaccagttgtgctgaggatgatgtagtttctgcagccgagcacttggttactgatgcagacctactgatgtttggagatgaaggtagaggaccgaaactagatgcatctgagagcaattttggtagcagcgtttctagttttgaaggagatcaaagcaatgcatcacaacattctttcactaatattgggcaaaactgtaatgagaatacctacagaactccccatgattttgttgaggctgctgcttttcaatcaaactcatcaaatttcagtgggctgaactttagattcggtgtgtcatcctctccacaaatctctgctgcggcacaaagacgtagcacaagaaggaagttaagaacaaagggtagtctagcatcgaaaccttcaactatcgactctttagaacagccaaaatcttcacaagatactaagggcatgcagtttttctgtgaagcaagtaaaaatgaagactcagtgaaagcgcaacaatcaagagattcttctacttctgtggccttggagacttgtgaaacctggcgtactagaggattattatacccgtggaataaactctgttacccacaatggcgtttctggacaatgttcccgtgcattgatgctgtgttacagcaaccgtgcagctacaagaatgtcacttggcatgatgtgggaggcgcttcaggattgtttgactgctacatcaattgaccccacttttcttaaagctaaagttagagctgccaagtgccagcttgcattgggcgatcttgaagatgcatcaatgagttacatgtcctgtttgaacagtaacaccgagagctctgaccctaaaatatttgctgaggcttctgatggtttggaaggagtcaagagagtgaccgattgggtatctcagtgcaaggaatttcttgagagaagaacatctcctgaagcaacaaaagccttagaattgatctccaatgcattgcacatatgtccacattcggacagcgtcaaggagatgaaagcagaggcattgttgatgctacgaagatatgaagaagtgattcaactatgccaagagtctgtgaatctgactgaaagaaattcagttttattcaaagacaatggagaaccaaagaattccagagtctctgaacggatgcagttttctggaaggtattggcggccctacctcatttgcaagtcttatttcctttcaggcaagcttgatgaggctcttgaattgttaaagaaacatgagcaagtcacacctgtcaaagaaagtgaagtgaacacatatgaagaaaaattctcatcattgtcagcgactataagagaactactttctcttaaggctgctggaaatgaatcatttcaagctggtagatattcagatgctgtcaaacagtattcagcagctttggcatggaatagtgaatcacgcccattttcagctgtatgtttttgcaatcgtgcagcggcttatcaagcactcggtcaagttactgatgcaatatcagattgttcacttgccatggttcttgatacaaattatccaaagaccttatgtgctgtacctatttcaggcaatttcaagacgagccaccttatacaagatgataagggattatgaccaagctgctaatgatgtaaggaagctaatctctcttcttgaaaagaaagtcaatgtgtctggagtatcaccaaaagcttttaacaagcacaatgatctcaagcaagcacatgtgaggctttcatccatagaggatgaagcaaaaaatgacacccccctgaatttgtatttaatcttgggagtggagccatcctgctcttcagaagatattaagaaggcataccggaaagcagcattgagacatcacccagacaaggctactcaattattaataaggaacgagaacgcagaagatggattttggagggatgttgtcaaggaagtctatgcagacgctgatcatctgttcaaaacaattggggaggcatataatgttctttctgacccggccaagcgtgaagagtacaactttgaagaggatctaagaaatgccaggaggagagtatctagttctaggagcatgcataggtcacctgaacagaactacagcaacagaggctttaatccacgccagcggcagtcaagcagagcatcacgttcacgttggtacagcaattcagacgattactggtaaagaagccattacatatggagtgggcatgtggtgcgaagcaacttttgcatgtgtggagcaaaaggcctccttgcaccaagatggcacctgcctttctggggttttttaggtgccggtgctgacgcaccagccttcgcagtctcagctttcgtgtctgtttgctgtgtttcttttccagagggtgaaaatattaggattgatcaactggggatctgggatgattggttgacacttgattagcacagaaaatacgtgggattaggaagtggtacatcaaattatcttttgttggcctggtgatttctgaacactgactgcttgggagtggctggcatgatggtatccactcttgaggagttgaacactgagaacaacttcgaaggttaggagcaaggataaagatgttggttcctcgaatatctgcaggcactcttttgctggatgcatggctactgtttagcacgggcagtttgcagcagatcaactggaaggagacatgctcagatgctcctgtttggcgcgtgcagttctgttctgttgcttctgtttaatccaaacgacgtagcgctggaaacagagtggctacatattacaactggctaactgctcaatgtcggaactcggaatcacgattttttatttattcattgttattagaggttttagctagcccaatgttgagagtattttattcagatcaaggttccttcgaagaaaaaagaggctcgggttacggtgacattggccaattgcaggttctgtcatgttgcttatgatgaaatatttggaacgacttaaacccttggactgctgcatatgtttttttttgcgtgaacgtttcgttgataaacgggatatatacacatattcgaaggccttaaggcacaaagaaaaggagactaattaagggtgtgtttggttggagagtcaactaaaatgagcgaaatgagcggctgtattacagtttttgagaatgaatctattctattttatgtttggcaaacagaatttagccgctctattttttatttgattgaag

SEQ ID NO: 62655 - DNA, 5574 bp, Zea Mays
gtcctcgcctcctcggccccctcgaatcacacgcgccccgcctcattcgtccattccccagccttccagagcccgccgccgccggccgctgctcccccgacgcgggggaagccaccggcggtagcgctcgcttcgccgcgccaaaaacctagcggctccgagctccccgccgcctccgtggcttatatggcgaacccgggcctagggcttggactcgcgccaccgggcgccgagccctccgccggagcgccgccctcttcacgtcgcgcgccgcgcttggccaaacggcgccacgcgcccgcctcctcccgctcccgcatgccgcagacctcagccggaatatggaacccgtttggtggtggcggaggtacggatagacagaccggaggctttgtgtttggtgctgcttcggcagtgagccaacagcctttggagccagcagtgtcagtagcttcacccactgaggcgcccttcgtgtttgggagcgtgagggagagcctgcctcggtttgacgagggatcgcccgcttcatcaaagctccctgataagatggagaagttgaacctgcgaacatcaagtgaggttgacgatggtctcggtcaggggagggatcgaaaggatggaagttcggtatttggtgctgatatatctggtttgttttctagtaacaaggaatctaatgtgctccaggagaagcttacacagttgaatttaggccacaaagaacccttgcaaagtaagaagagggatagtgctaatggtgtgccgcaagcatttgtgtttggaggtaatggagctgggagttttgctgactgtaagaacaaagccgcccctggtgcacattcagatgatcctagttcagttcatggcactgatgcaaaaggtatggctgggaagtcgatgcagttcaatataggcagtcaagcaccttccaggggtggggggattgatcgtactaatggagcaccagaagctttcacgtttcgaagtaccacattaagtggtcatgtggataatataaacaatgttgactctggtgccaataccagttcttccactgttgctaaatgtgtttgtgatgcagattttcctctggaaaagataacacggttgtgtataggaagtgacatgcccttgcatgagacgaaaagtggttatcaacccaaagtgtttacgtttggaagtggaggaatcccaggcgctgtttttgggaaggaaactggcagcacatcagataggagcagtgaattcctctctgcaaatagcaatacttctagttcaagcagtgattttttctctacagcaaatagcaacgtttctaattccgctaatggcacttattgtttgccaccagagaagacaccagatttgaatgcaggagacagagtcatgtcacagagcttggaaggtgataattctaattgtccaacagagacctttctatttgaaagaaatgaaacccgaagctctgtttcgcactctgcaagcatagccatggatgacggtgggaattttgtcaatgatgaaaatactgacacctgtagttcagctcacagtacagtggagtgtgcaggtgctctcccagagaagatgacaaagttaggtataggatgcagaattccacatcatagcaggaaagatgaaactgctaccgatccaccagaagtatatgtatttggatgtaatctttctagcttttcttctgcccagacttcaagtaaatcgaatgatcgcacgactcctgaattttgttttcaaagcaaaacaggggcaacttcaggatatggtgctgttccccaaaccaaagttcaggattcatacccatttacaattttgaataattcatgtactttctctacttttgagaatgcagttcctgctttcagttttgggacactgaatgcagaaacagaaacagctccagatgatcctttttctttttctgtcaaacatgatttgcctgggtattccagagagaccttatttggtttagacagtataaaatctgcatacaaggacaaaagggaagcatgtaaaggaaaaatgaaaaacaagaggccaactaggctaaagcaacatgctcagctccatcaggttatttctaaggaagcctgtaccagtggagaagcatcagatttagcaggtgactgttcaccaatggattgttcgccatatcctgcagaatctgaacatgtgccaacagaggcatatgtggcttctgatcagcccgttcacataggtgatactgttatctcgaacgggaacaccagttgtgctgaggatgatgtagtttctgcagccgagcacttggttactgatgcagacctactgatgtttggagatgaaggtagaggaccgaaactagatgcatctgagagcaattttggtagcagcgtttctagttttgaaggagatcaaagcaatgcatcacaacattctttcactaatattgggcaaaactgtaatgagaatacctacagaactccccatgattttgttgaggctgctgcttttcaatcaaactcatcaaatttcagtgggctgaactttagattcggtgtgtcatcctctccacaaatctctgctgcggcacaaagacgtagcacaagaaggaagttaagaacaaagggtagtctagcatcgaaaccttcaactatcgactctttagaacagccaaaatcttcacaagatactaagggcatgcagtttttctgtgaagcaagtaaaaatgaagactcagtgaaagcgcaacaatcaagagattcttctacttctgtggccttggagacttgtgaaacctggcgtactagtggaaataaagcctatgcaaatggacattttactgctgcagaggattattatacccgtggaataaactctgttacccacaatggcgtttctggacaatgttcccgtgcattgatgctgtgttacagcaaccgtgcagctacaagaatgtcacttggcatgatgtgggaggcgcttcaggattgtttgactgctacatcaattgaccccacttttcttaaagctaaagttagagctgccaagtgccagcttgcattgggcgatcttgaagatgcatcaatgagttacatgtcctgtttgaacagtaacaccgagagctctgaccctaaaatatttgctgaggcttctgatggtttggaaggagtcaagagagtgaccgattgggtatctcagtgcaaggaatttcttgagagaagaacatctcctgaagcaacaaaagccttagaattgatctccaatgcattgcacatatgtccacattcggacagcgtcaaggagatgaaagcagaggcattgttgatgctacgaagatatgaagaagtgattcaactatgccaagagtctgtgaatctgactgaaagaaattcagttttattcaaagacaatggagaaccaaagaattccagagtctctgaacggatgcagttttctggaaggtattggcggccctacctcatttgcaagtcttatttcctttcaggcaagcttgatgaggctcttgaattgttaaagaaacatgagcaagtcacacctgtcaaagaaaggtaaacttgtgaagtgaacacatatgaagaaaaattctcatcattgtcagcgactataagagaactactttctcttaaggctgctggaaatgaatcatttcaagctggtagatattcagatgctgtcaaacagtattcagcagctttggcatggaatagtgaatcacgcccattttcagctgtatgtttttgcaatcgtgcagcggcttatcaagcactcggtcaagttactgatgcaatatcagattgttcacttgccatggttcttgatacaaattatccaaaggcaatttcaagacgagccaccttatacaagatgataagggattatgaccaagctgctaatgatgtaaggaagctaatctctcttcttgaaaagaaagtcaatgtgtctggagtatcaccaaaagcttttaacaagcacaatgatctcaagcaagcacatgtgaggctttcatccatagaggatgaagcaaaaaatgacacccccctgaatttgtatttaatcttgggagtggagccatcctgctcttcagaagatattaagaaggcataccggaaagcagcattgagacatcacccagacaaggctactcaattattaataaggaacgagaacgcagaagatggattttggagggatgttgtcaaggaagtctatgcagacgctgatcatctgttcaaaacaattggggaggcatataatgttctttctgacccggccaagcgtgaagagtacaactttgaagaggatctaagaaatgccaggaggagagtatctagttctaggagcatgcataggtcacctgaacagaactacagcaacagaggctttaatccacgccagcggcagtcaagcagagcatcacgttcacgttggtacagcaattcagacgattactggtaaagaagccattacatatggagtgggcatgtggtgcgaagcaacttttgcatgtgtggagcaaaaggcctccttgcaccaagatggcacctgcctttctggggttttttaggtgccggtgctgacgcaccagccttcgcagtctcagctttcgtgtctgtttgctgtgtttcttttccagagggtcagccttcgcagtctcagctttcgtgtctgtttgctgtgtttcttttccagagggtgaaaatattaggattgatcaactggggatctgggatgattggttgacacttgattagcacagaaaatacgtgggattaggaagtggtacatcaaattatcttttgttggcctggtgatttctgaacactgactgcttgggagtggctggcatgatggtatccactcttgaggagttgaacactgagaacaacttcgaaggttaggagcaaggataaagatgttggttcctcgaatatctgcaggcactcttttgctggatgcatggctactgtttagcacgggcagtttgcagcagatcaactggaaggagacatgctcagatgctcctgtttggcgcgtgcagttctgttctgttgcttctgtttaatccaaacgacgtagcgctggaaacagagtggctacatattacaactggctaactgctcaatgtcggaactcggaatcacgattttttatttattcattgttattagaggttttagctagcccaatgttgagagtattttattcagatcaaggttccttcgaagaaaaaagaggctcgggttacggtgacattggccaattgcaggttctgtcatgttgcttatgatgaaatatttggaacgacttaaacccttggactgctgcatatgtttttttttgcgtgaacgtttcgttgataaacgggatatatacacatattcgaaggccttaaggcacaaagaaaaggagactaattaagggtgtgtttggttggagagtcaactaaaatgagcgaaatgagcggctgtattacagtttttgagaatgaatctattctattttatgtttggcaaacagaatttagccgctctattttttatttgattgaag

SEQ ID NO: 62656 - DNA, 5557 bp, Zea Mays
cgaacggcccaacccaacgtcacaactgcgagtctacgaattccgtaaaccggccgaccaacaaagctgccgtgtgcccgtgtggaagcgtcctcgcctcctcggccccctcgaatcacacgcgccccgcctcattcgtccattccccagccttccagagcccgccgccgccggccgctgctcccccgacgcgggggaagccaccggcggtagcgctcgcttcgccgcgccaaaaacctagcggctccgagctccccgccgcctccgtggcttatatggcgaacccgggcctagggcttggactcgcgccaccgggcgccgagccctccgccggagcgccgccctcttcacgtcgcgcgccgcgcttggccaaacggcgccacgcgcccgcctcctcccgctcccgcatgccgcagacctcagccggaatatggaacccgtttggtggtggcggaggtacggatagacagaccggaggctttgtgtttggtgctgcttcggcagtgagccaacagcctttggagccagcagtgtcagtagcttcacccactgaggcgcccttcgtgtttgggagcgtgagggagagcctgcctcggtttgacgagggatcgcccgcttcatcaaagctccctgataagatggagaagttgaacctgcgaacatcaagtgaggttgacgatggtctcggtcaggggagggatcgaaaggatggaagttcggtatttggtgctgatatatctggtttgttttctagtaacaaggaatctaatgtgctccaggagaagcttacacagttgaatttaggccacaaagaacccttgcaaagtaagaagagggatagtgctaatggtgtgccgcaagcatttgtgtttggaggtaatggagctgggagttttgctgactgtaagaacaaagccgcccctggtgcacattcagatgatcctagttcagttcatggcactgatgcaaaaggtatggctgggaagtcgatgcagttcaatataggcagtcaagcaccttccaggggtggggggattgatcgtactaatggagcaccagaagctttcacgtttcgaagtaccacattaagtggtcatgtggataatataaacaatgttgactctggtgccaataccagttcttccactgttgctaaatgtgtttgtgatgcagattttcctctggaaaagataacacggttgtgtataggaagtgacatgcccttgcatgagacgaaaagtggttatcaacccaaagtgtttacgtttggaagtggaggaatcccaggcgctgtttttgggaaggaaactggcagcacatcagataggagcagtgaattcctctctgcaaatagcaatacttctagttcaagcagtgattttttctctacagcaaatagcaacgtttctaattccgctaatggcacttattgtttgccaccagagaagacaccagatttgaatgcaggagacagagtcatgtcacagagcttggaaggtgataattctaattgtccaacagagacctttctatttgaaagaaatgaaacccgaagctctgtttcgcactctgcaagcatagccatggatgacggtgggaattttgtcaatgatgaaaatactgacacctgtagttcagctcacagtacagtggagtgtgcaggtgctctcccagagaagatgacaaagttaggtataggatgcagaattccacatcatagcaggaaagatgaaactgctaccgatccaccagaagtatatgtatttggatgtaatctttctagcttttcttctgcccagacttcaagtaaatcgaatgatcgcacgactcctgaattttgttttcaaagcaaaacaggggcaacttcaggatatggtgctgttccccaaaccaaagttcaggattcatacccatttacaattttgaataattcatgtactttctctacttttgagaatgcagttcctgctttcagttttgggacactgaatgcagaaacagaaacagctccagatgatcctttttctttttctgtcaaacatgatttgcctgggtattccagagagaccttatttggtttagacagtataaaatctgcatacaaggacaaaagggaagcatgtaaaggaaaaatgaaaaacaagaggccaactaggctaaagcaacatgctcagctccatcaggttatttctaaggaagcctgtaccagtggagaagcatcagatttagcaggtgactgttcaccaatggattgttcgccatatcctgcagaatctgaacatgtgccaacagaggcatatgtggcttctgatcagcccgttcacataggtgatactgttatctcgaacgggaacaccagttgtgctgaggatgatgtagtttctgcagccgagcacttggttactgatgcagacctactgatgtttggagatgaaggtagaggaccgaaactagatgcatctgagagcaattttggtagcagcgtttctagttttgaaggagatcaaagcaatgcatcacaacattctttcactaatattgggcaaaactgtaatgagaatacctacagaactccccatgattttgttgaggctgctgcttttcaatcaaactcatcaaatttcagtgggctgaactttagattcggtgtgtcatcctctccacaaatctctgctgcggcacaaagacgtagcacaagaaggaagttaagaacaaagggtagtctagcatcgaaaccttcaactatcgactctttagaacagccaaaatcttcacaagatactaagggcatgcagtttttctgtgaagcaagtaaaaatgaagactcagtgaaagcgcaacaatcaagagattcttctacttctgtggccttggagacttgtgaaacctggcgtactagaggattattatacccgtggaataaactctgttacccacaatggcgtttctggacaatgttcccgtgcattgatgctgtgttacagcaaccgtgcagctacaagaatgtcacttggcatgatgtgggaggcgcttcaggattgtttgactgctacatcaattgaccccacttttcttaaagctaaagttagagctgccaagtgccagcttgcattgggcgatcttgaagatgcatcaatgagttacatgtcctgtttgaacagtaacaccgagagctctgaccctaaaatatttgctgaggcttctgatggtttggaaggagtcaagagagtgaccgattgggtatctcagtgcaaggaatttcttgagagaagaacatctcctgaagcaacaaaagccttagaattgatctccaatgcattgcacatatgtccacattcggacagcgtcaaggagatgaaagcagaggcattgttgatgctacgaagatatgaagaagtgattcaactatgccaagagtctgtgaatctgactgaaagaaattcagttttattcaaagacaatggagaaccaaagaattccagagtctctgaacggatgcagttttctggaaggtattggcggccctacctcatttgcaagtcttatttcctttcaggcaagcttgatgaggctcttgaattgttaaagaaacatgagcaagtcacacctgtcaaagaaagtgaagtgaacacatatgaagaaaaattctcatcattgtcagcgactataagagaactactttctcttaaggctgctggaaatgaatcatttcaagctggtagatattcagatgctgtcaaacagtattcagcagctttggcatggaatagtgaatcacgcccattttcagctgtatgtttttgcaatcgtgcagcggcttatcaagcactcggtcaagttactgatgcaatatcagattgttcacttgccatggttcttgatacaaattatccaaaggcaatttcaagacgagccaccttatacaagatgataagggattatgaccaagctgctaatgatgtaaggaagctaatctctcttcttgaaaagaaagtcaatgtgtctggagtatcaccaaaagcttttaacaagcacaatgatctcaagcaagcacatgtgaggctttcatccatagaggatgaagcaaaaaatgacacccccctgaatttgtatttaatcttgggagtggagccatcctgctcttcagaagatattaagaaggcataccggaaagcagcattgagacatcacccagacaaggctactcaattattaataaggaacgagaacgcagaagatggattttggagggatgttgtcaaggaagtctatgcagacgctgatcatctgttcaaaacaattggggaggcatataatgttctttctgacccggccaagcgtgaagagtacaactttgaagaggatctaagaaatgccaggaggagagtatctagttctaggagcatgcataggtcacctgaacagaactacagcaacagaggctttaatccacgccagcggcagtcaagcagagcatcacgttcacgttggtacagcaattcagacgattactggtaaagaagccattacatatggagtgggcatgtggtgcgaagcaacttttgcatgtgtggagcaaaaggcctccttgcaccaagatggcacctgcctttctggggttttttaggtgccggtgctgacgcaccagccttcgcagtctcagctttcgtgtctgtttgctgtgtttcttttccagagggtgaaaatattaggattgatcaactggggatctgggatgattggttgacacttgattagcacagaaaatacgtgggattaggaagtggtacatcaaattatcttttgttggcctggtgatttctgaacactgactgcttgggagtggctggcatgatggtatccactcttgaggagttgaacactgagaacaacttcgaaggttaggagcaaggataaagatgttggttcctcgaatatctgcaggcactcttttgctggatgcatggctactgtttagcacgggcagtttgcagcagatcaactggaaggagacatgctcagatgctcctgtttggcgcgtgcagttctgttctgttgcttctgtttaatccaaacgacgtagcgctggaaacagagtggctacatattacaactggctaactgctcaatgtcggaactcggaatcacgattttttatttattcattgttattagaggttttagctagcccaatgttgagagtattttattcagatcaaggttccttcgaagaaaaaagaggctcgggttacggtgacattggccaattgcaggttctgtcatgttgcttatgatgaaatatttggaacgacttaaacccttggactgctgcatatgtttttttttgcgtgaacgtttcgttgataaacgggatatatacacatattcgaaggccttaaggcacaaagaaaaggagactaattaagggtgtgtttggttggagagtcaactaaaatgagcgaaatgagcggctgtattacagtttttgagaatgaatctattctattttatgtttggcaaacagaatttagccgctctattttttatttgattgaag

SEQ ID NO: 62657 - DNA, 1941 bp, Zea Mays
cgtggtggttcaggacttcaaaaggtactaggtgaaggcacttcaagatgggcgaggtacacgaagctgacaagaacattgagatctggagggtgaagaagttaatcaaggcacttgatgctgcaaggggcaatggcactagcatgatttctctgatcatgccacctcgtgatcagattgcacgcgtcactaagatgctgggtgatgagtacggaactgcctcaaacatcaagagcagagtcaacagacagtctgtgttggctgccataacctcggctcaacagaggttgaagctttacagtcgagttccccccaatggtttggtgctctatactggtaccattgtcaccgatgatggcaaggagaagaaggttacctttgacttcgagccatttaggcccattaatgcttccctgtatctctgtgacaacaagttccacactgagtccctgaacgagcttctgacgtctgatgacaagtttggtttcataatcatcgatggcaatggtacactgtatggtacactgagcggaaacagcagggaggttctgtacaagttcagtgttgatcttccaaagaagcatgggcgaggagggcaatcagcagtccgctttgcccgcctgcgcatggagaggcgacacaattacctgcgcaaggttgctgagcttgcgacacaatacttcatcaatcctggcaccaaccagccgaacatcgttgggcttattcttgccggttctgctgacttcaagagcgagctgggtaaatctgagatgttcgatccacgccttcaggccaaagtagtgaagatgattgacgtgtcttatggtggggacagcggcttcaaccaagccatcgagatgtctgccgaggttctttctgatgttaagtttgtccaagaaaagaagctgatcgggaagtacttcgaggagataagccaagacacagggaagtacgtccttggcatccaggacaccatcacagccctggaaatgggcgcggtagagatcctgatcgtgtgggaaaaccttgatgtcaggcgttatgagctcaagaacagtgccacaggagagacagtcgtgaagtacctgaacccagctcaggaggctgaccagagcaacttcactgacgaggcgacatccggagatctggaggtcattgacaacacgcagctgctggagtggttcgcggagaactaccaccagttcggctgcacgctggagttcgtcaccaacaagtcacaggaaggttctcagttctgccggggattcggcgggattggtgggatccttcgctacccagccgacgtcagtgcctaccaggacggtgacttgtctgatggggagtatgatgaagacttggaatagcaatcaaccagaactcaaatgaatccggtccgggaggagcctgcgctggcccgggccgtgccgggggggggaaccctgaaacttccaaacgatcggtgcaaggagaccatggtggaggatctgtagggaaggaggcttgagcaacttatataggatatatatatggaagcttgtcaagctggtgagtggtgactttggagacggtgttttgctctgttgatccgagcttgcagtctggtgctactaggaatcagccgtggacgctgccttctgttggtcaggagagcctataatcgatcaactagcatcctattagtattgggttggtgccagtagtatggtgaataaaatacctggaggactcccgaggttgcacgttcgctttatgacgtgcgtgatatctatgattgtgaaaatgtctgtgacctgtcatttcttataatccattctctcgttgttgtggattgaggcaatattttgtggatgtcattgggtagtaacttctcgcagagcaagtgcagtaggatgatgtgtgaaagaggaacagagagagaagaaaagccagatgttaatgaac

SEQ ID NO: 62658 - DNA, 1286 bp, Zea Mays
cttaattttatagataagtttaacattggattgttctgacttcttgcactgatctgccatgaatcctgaaatgtagtcccatgtgtgccatatttcctccatgcatgattattaagtctgtgttcttgaagtttccaatctcacacgcatgattaatgtgttcttgaaataccgatgaagttgtgtaaaaagtctttactacgattgagttacacccttagttaaatagggactttattttggagcaatgaatattgatcagcacattcccttagtatgttgctacctgcaatttttttcttacaacctgagaagcggcatgtttactacaaggtatcatcttcacttgtttgcattacacgcccattttcattatccctcttttctcttttctgtgataataatggaattaatggcactctttctcagcttgcagttcaacagttgaatttcatcgagtcccagccagtttgattatatgaaccagaggcaagccaggatgccctaggtgtggatctctgttaggctgtgaagccttttttatcataaagtcactgccttctccattcttgtttgcctatatttttgtgagatatagcctgcccgagagagggagtttttaaaagcggtacataaatgtgtttctggtggaggtaaagttctaattccaacgtttgctctgggaagagctcagtttccctattccttggatgtatcatatgcatcggggatgtcatattgaagaatcagtataataatatggactatttggaggggtctttaaatgagcttggaagttggtgcataaggctgcaacaccgtctagtgagggtgttttggacaaagaaaacttgtaccttaaaacaggaggatacaagaagctggagtggttgtctgaaggcttttgaactgcttgaagcattagtgtagctttggtgcttttgtgactgatcaactctggagcagctagagtgatgtagttgtgggcttttgaacaatagctggagtgatatgaaatattagtgatgtagttgtgggcttttgaactgcttcaagctggagtgatgtcgttgtggtgcttttgtgactgatcatctctggagcttttgtgaatgatctagctagctatctgtaaatgatctagtcgtgaatgatattataattgtgatgcttttgtgaatatataattgtggtgcttttgtgtttatgtgatggatctatggctatggtatactgattaactgtgtatatctttatgatttgtgtataaaaatcagtgatttgtg

SEQ ID NO: 62659 - DNA, 1331 bp, Zea Mays
cctactcagcctctcctgcacgccgccgcccatggtaccaaactcgaccgccaaagcccctggccgagctcccccatggcgtctcccccaaccatggtcgcccaggtcgtggcctcgccggatcccgcgcgctcctgtgtcgtggcgttgtccccatgttttctccgcgccagcgcgccaccggctctacttgagctcctccctcgccgtagctcacaggtcgccaccccatggctgctgctcctctctccctcatctctgcaactcggcgcctcctctactcctccacctgcagttcgccccatgttctggacgccaaccctccatccccctaccctccagccatggacgccctagctcccttttgttgctcgctagggaccagctcggtgccctctcctcacttgaagccggcaacaacgccttggtagtggtcgagcagcacgtcgtcggctccgtgggttttttgggcagcccggttgcggtgtcgtcaaaccccgcttgcagttcaacagttgaatttcatcgagtcccagccagtttgattatatgaaccagaggcaagccaggatgccctaggtacataaatgtgtttctggtggaggtaaagttctaattccaacgtttgctctgggaagagctcagggttctgcaaaacatccttttgtgaaatgatcctcgaccgtcaattctttgaaatgttccctagtaaaatgatttattcttgatggttcaaaagtttccctattccttggatgtatcatatgcatcggggatgtcatattgaagaatcagtataataatatggactatttggaggggtctttaaatgagcttggaagttggtgcataaggctgcaacaccgtctagtgagggtgttttggacaaagaaaacttgtaccttaaaacaggaggatacaagaagctggagtggttgtctgaaggcttttgaactgcttgaagcattagtgtagctttggtgcttttgtgactgatcaactctggagcagctagagtgatgtagttgtgggcttttgaacaatagctggagtgatatgaaatattagtgatgtagttgtgggcttttgaactgcttcaagctggagtgatgtcgttgtggtgcttttgtgactgatcatctctggagcttttgtgaatgatctagctagctatctgtaaatgatctagtcgtgaatgatattataattgtgatgcttttgtgaatatataattgtggtgcttttgtgtttatgtgatggatctatggctatggtatactgattaactgtgtatatctttatgatttgtgtataaaaatcagtgatttgtg

SEQ ID NO: 62660 - DNA, 1324 bp, Zea Mays
cctactcagcctctcctgcacgccgccgcccatggtaccaaactcgaccgccaaagcccctggccgagctcccccatggcgtctcccccaaccatggtcgcccaggtcgtggcctcgccggatcccgcgcgctcctgtgtcgtggcgttgtccccatgttttctccgcgccagcgcgccaccggctctacttgagctcctccctcgccgtagctcacaggtcgccaccccatggctgctgctcctctctccctcatctctgcaactcggcgcctcctctactcctccacctgcagttcgccccatgttctggacgccaaccctccatccccctaccctccagccatggacgccctagctcccttttgttgctcgctagggaccagctcggtgccctctcctcacttgaagccggcaacaacgccttggtagtggtcgagcagcacgtcgtcggctccgtgggttttttgggcagcccggttgcggtgtcgtcaaaccccgttcaacagttgaatttcatcgagtcccagccagtttgattatatgaaccagaggcaagccaggatgccctaggtacataaatgtgtttctggtggaggtaaagttctaattccaacgtttgctctgggaagagctcagggttctgcaaaacatccttttgtgaaatgatcctcgaccgtcaattctttgaaatgttccctagtaaaatgatttattcttgatggttcaaaagtttccctattccttggatgtatcatatgcatcggggatgtcatattgaagaatcagtataataatatggactatttggaggggtctttaaatgagcttggaagttggtgcataaggctgcaacaccgtctagtgagggtgttttggacaaagaaaacttgtaccttaaaacaggaggatacaagaagctggagtggttgtctgaaggcttttgaactgcttgaagcattagtgtagctttggtgcttttgtgactgatcaactctggagcagctagagtgatgtagttgtgggcttttgaacaatagctggagtgatatgaaatattagtgatgtagttgtgggcttttgaactgcttcaagctggagtgatgtcgttgtggtgcttttgtgactgatcatctctggagcttttgtgaatgatctagctagctatctgtaaatgatctagtcgtgaatgatattataattgtgatgcttttgtgaatatataattgtggtgcttttgtgtttatgtgatggatctatggctatggtatactgattaactgtgtatatctttatgatttgtgtataaaaatcagtgatttgtg

SEQ ID NO: 62661 - DNA, 1237 bp, Zea Mays
cctactcagcctctcctgcacgccgccgcccatggtaccaaactcgaccgccaaagcccctggccgagctcccccatggcgtctcccccaaccatggtcgcccaggtcgtggcctcgccggatcccgcgcgctcctgtgtcgtggcgttgtccccatgttttctccgcgccagcgcgccaccggctctacttgagctcctccctcgccgtagctcacaggtcgccaccccatggctgctgctcctctctccctcatctctgcaactcggcgcctcctctactcctccacctgcagttcgccccatgttctggacgccaaccctccatccccctaccctccagccatggacgccctagctcccttttgttgctcgctagggaccagctcggtgccctctcctcacttgaagccggcaacaacgccttggtagtggtcgagcagcacgtcgtcggctccgtgggttttttgggcagcccggttgcggtgtcgtcaaaccccgcttgcagttcaacagttgaatttcatcgagtcccagccagtttgattatatgaaccagaggcaagccaggatgccctaggtacataaatgtgtttctggtggaggtaaagttctaattccaacgtttgctctgggaagagctcagtttccctattccttggatgtatcatatgcatcggggatgtcatattgaagaatcagtataataatatggactatttggaggggtctttaaatgagcttggaagttggtgcataaggctgcaacaccgtctagtgagggtgttttggacaaagaaaacttgtaccttaaaacaggaggatacaagaagctggagtggttgtctgaaggcttttgaactgcttgaagcattagtgtagctttggtgcttttgtgactgatcaactctggagcagctagagtgatgtagttgtgggcttttgaacaatagctggagtgatatgaaatattagtgatgtagttgtgggcttttgaactgcttcaagctggagtgatgtcgttgtggtgcttttgtgactgatcatctctggagcttttgtgaatgatctagctagctatctgtaaatgatctagtcgtgaatgatattataattgtgatgcttttgtgaatatataattgtggtgcttttgtgtttatgtgatggatctatggctatggtatactgattaactgtgtatatctttatgatttgtgtataaaaatcagtgatttgtg

SEQ ID NO: 62662 - DNA, 1328 bp, Zea Mays
cctactcagcctctcctgcacgccgccgcccatggtaccaaactcgaccgccaaagcccctggccgagctcccccatggcgtctcccccaaccatggtgctctctgctcctccacggcgctgagctccaccagccgctgctcttgaacgctagcgccaacctcatctttgctcctctctcccgcatctctgcaggtcgcccaggtcgtggcctcgccggatcccgcgcgctcctgtgtcgtggcgttgtccccatgttttctccgcgccagcgcgccaccggctctacttgagctcctccctcgccgtagctcacaggtcgccaccccatggctgctgctcctctctccctcatctctgcaactcggcgcctcctctactcctccacctgcagttcgccccatgttctggacgccaaccctccatccccctaccctccagccatggacgccctagctcccttttgttgctcgctagggaccagctcggtgccctctcctcacttgaagccggcaacaacgccttggtagtggtcgagcagcacgtcgtcggctccgtgggttttttgggcagcccggttgcggtgtcgtcaaaccccgttcaacagttgaatttcatcgagtcccagccagtttgattatatgaaccagaggcaagccaggatgccctaggtacataaatgtgtttctggtggaggtaaagttctaattccaacgtttgctctgggaagagctcagtttccctattccttggatgtatcatatgcatcggggatgtcatattgaagaatcagtataataatatggactatttggaggggtctttaaatgagcttggaagttggtgcataaggctgcaacaccgtctagtgagggtgttttggacaaagaaaacttgtaccttaaaacaggaggatacaagaagctggagtggttgtctgaaggcttttgaactgcttgaagcattagtgtagctttggtgcttttgtgactgatcaactctggagcagctagagtgatgtagttgtgggcttttgaacaatagctggagtgatatgaaatattagtgatgtagttgtgggcttttgaactgcttcaagctggagtgatgtcgttgtggtgcttttgtgactgatcatctctggagcttttgtgaatgatctagctagctatctgtaaatgatctagtcgtgaatgatattataattgtgatgcttttgtgaatatataattgtggtgcttttgtgtttatgtgatggatctatggctatggtatactgattaactgtgtatatctttatgatttgtgtataaaaatcagtgatttgtg

SEQ ID NO: 62663 - DNA, 2763 bp, Zea Mays
cctactcagcctctcctgcacgccgccgcccatggtaccaaactcgaccgccaaagcccctggccgagctcccccatggcgtctcccccaaccatggtgctctctgctcctccacggcgctgagctccaccagccgctgctcttgaacgctagcgccaacctcatctttgctcctctctcccgcatctctgcaggtcgcccaggtcgtggcctcgccggatcccgcgcgctcctgtgtcgtggcgttgtccccatgttttctccgcgccagcgcgccaccggctctacttgagctcctccctcgccgtagctcacaggtcgccaccccatggctgctgctcctctctccctcatctctgcaactcggcgcctcctctactcctccacctgcagttcgccccatgttctggacgccaaccctccatccccctaccctccagccatggacgccctagctcccttttgttgctcgctagggaccagctcggtgccctctcctcacttgaagccggcaacaacgccttggtagtggtcgagcagcacgtcgtcggctccgtgggttttttgggcagcccggttgcggtgtcgtcaaaccccgcttgcagttcaacagttgaatttcatcgagtcccagccagtttgattatatgaaccagaggcaagccaggatgccctaggtgtggatctctgttaggctgtgaagccttttttatcataaagtcactgccttctccattcttgtttgcctatatttttgtgagatatagcctgcccgagagagggagtttttaaaagcggtacataaatgtgtttctggtggaggtaaagttctaattccaacgtttgctctgggaagagctcaggtattgtagttctcttaattctactttatgagacaaagtgatggttaagtgtgataactatatatgacttaaatgagcaagtttccctgagaagtaccattctgagggcacactgttcgaaggtttcataatttgtgatgacttgttccactttttaaaaaaatcagtagagttgtctggacagctaacctcttgactgcttatgtttgatttgtatttgatatgtgcttttaattatttattaactagcagtagactcctaattccatgcttggttaattactctgaacttaaactagctaaatatagcttatgcaagttcttagactggcacatatcacttgcatccactgcctgtagccctgtacatgcaaaaattcgtgttagtagtatgtaatggccctagctacaactgcaaatagtacaagggatagcagtagagaaaacaaatgcggtgagaatgagaatcaaggtaagttggcttgcaagcttctatgcaagtgtttcctgtatccataactctgcaaaagttttggctaggataggaatcaaagggagagctaattcttccattgacttgctagtttggtggtactcccaacagaaactaaattgcaaggtaatgaacttaactttatatattccgttttgtggtactcccaacagaatctaaaattgcaaggtaattgcaagtgttctttgctaatcctcttgactggtgggataacaggacaaataaggttagactgggattgttcaaagttataaccacttgtcatttacatggtaacagtttacctcgcatctgaataataaaccttccttttgagcgcattctaattagcaaacataaaaaaacagagaacacatgagaactcaagaactaaataaaaaaagttcaaatatttactgagggagagggatatatggtcagtagagtgggtgaatattgagacggaaataataaacagccaaatgagttatgaaaggtattattgtttttctagtgatttaatgcatattttgtgtgtctttttatcatgatccatatgacgtttaatctgagtaacatgttacttgcacgattttttctgatgattgatacttatatgactgactattcaccctttaaaattattgcagtttaccaggatacatatttttgtaattgtttgtgacatgttagtcttttgtttaacctatttcatccatagggttctgcaaaacatccttttgtgaaatgatcctcgaccgtcaattctttgaaatgttccctagtaaaatgatttattcttgatggttcaaaagtttccctattccttggatgtatcatatgcatcggggatgtcatattgaagaatcagtataataatatggactatttggaggggtctttaaatgagcttggaagttggtgcataaggctgcaacaccgtctagtgagggtgttttggacaaagaaaacttgtaccttaaaacaggaggatacaagaagctggagtggttgtctgaaggcttttgaactgcttgaagcattagtgtagctttggtgcttttgtgactgatcaactctggagcagctagagtgatgtagttgtgggcttttgaacaatagctggagtgatatgaaatattagtgatgtagttgtgggcttttgaactgcttcaagctggagtgatgtcgttgtggtgcttttgtgactgatcatctctggagcttttgtgaatgatctagctagctatctgtaaatgatctagtcgtgaatgatattataattgtgatgcttttgtgaatatataattgtggtgcttttgtgtttatgtgatggatctatggctatggtatactgattaactgtgtatatctttatgatttgtgtataaaaatcagtgatttgtg

SEQ ID NO: 62664 - DNA, 3042 bp, Zea Mays
cctactcagcctctcctgcacgccgccgcccatggtaccaaactcgaccgccaaagcccctggccgagctcccccatggcgtctcccccaaccatggtgctctctgctcctccacggcgctgagctccaccagccgctgctcttgaacgctagcgccaacctcatctttgctcctctctcccgcatctctgcaggtcgcccaggtcgtggcctcgccggatcccgcgcgctcctgtgtcgtggcgttgtccccatgttttctccgcgccagcgcgccaccggctctacttgagctcctccctcgccgtagctcacaggtcgccaccccatggctgctgctcctctctccctcatctctgcaactcggcgcctcctctactcctccacctgcagttcgccccatgttctggacgccaaccctccatccccctaccctccagccatggacgccctagctcccttttgttgctcgctagggaccagctcggtgccctctcctcacttgaagccggcaacaacgccttggtagtggtcgagcagcacgtcgtcggctccgtgggttttttgggcagcccggttgcggtgtcgtcaaaccccgcttgcagttcaacagttgaatttcatcgagtcccagccagtttgattatatgaaccagaggcaagccaggatgccctaggtgtggatctctgttaggctgtgaagccttttttatcataaagtcactgccttctccattcttgtttgcctatatttttgtgagatatagcctgcccgagagagggagtttttaaaagcggtatgaaaatctgaactttgctgcagcctgcagtgtatatatttgtagattttcgtaatcaatgcttttccgatggtgtactactctattttctaggttttggatcgtatgtgcttaatattatttgggcacacaacacagttcactaagtgtatctatattttttattcctgatgttttcgtccaagaagatgcactctgactgtattaaaccaatcttctgaagtgtacacagttgattttacttccaaagcataactgagtatatgtttcctctaggtacataaatgtgtttctggtggaggtaaagttctaattccaacgtttgctctgggaagagctcaggtattgtagttctcttaattctactttatgagacaaagtgatggttaagtgtgataactatatatgacttaaatgagcaagtttccctgagaagtaccattctgagggcacactgttcgaaggtttcataatttgtgatgacttgttccactttttaaaaaaatcagtagagttgtctggacagctaacctcttgactgcttatgtttgatttgtatttgatatgtgcttttaattatttattaactagcagtagactcctaattccatgcttggttaattactctgaacttaaactagctaaatatagcttatgcaagttcttagactggcacatatcacttgcatccactgcctgtagccctgtacatgcaaaaattcgtgttagtagtatgtaatggccctagctacaactgcaaatagtacaagggatagcagtagagaaaacaaatgcggtgagaatgagaatcaaggtaagttggcttgcaagcttctatgcaagtgtttcctgtatccataactctgcaaaagttttggctaggataggaatcaaagggagagctaattcttccattgacttgctagtttggtggtactcccaacagaaactaaattgcaaggtaatgaacttaactttatatattccgttttgtggtactcccaacagaatctaaaattgcaaggtaattgcaagtgttctttgctaatcctcttgactggtgggataacaggacaaataaggttagactgggattgttcaaagttataaccacttgtcatttacatggtaacagtttacctcgcatctgaataataaaccttccttttgagcgcattctaattagcaaacataaaaaaacagagaacacatgagaactcaagaactaaataaaaaaagttcaaatatttactgagggagagggatatatggtcagtagagtgggtgaatattgagacggaaataataaacagccaaatgagttatgaaaggtattattgtttttctagtgatttaatgcatattttgtgtgtctttttatcatgatccatatgacgtttaatctgagtaacatgttacttgcacgattttttctgatgattgatacttatatgactgactattcaccctttaaaattattgcagtttaccaggatacatatttttgtaattgtttgtgacatgttagtcttttgtttaacctatttcatccatagggttctgcaaaacatccttttgtgaaatgatcctcgaccgtcaattctttgaaatgttccctagtaaaatgatttattcttgatggttcaaaagtttccctattccttggatgtatcatatgcatcggggatgtcatattgaagaatcagtataataatatggactatttggaggggtctttaaatgagcttggaagttggtgcataaggctgcaacaccgtctagtgagggtgttttggacaaagaaaacttgtaccttaaaacaggaggatacaagaagctggagtggttgtctgaaggcttttgaactgcttgaagcattagtgtagctttggtgcttttgtgactgatcaactctggagcagctagagtgatgtagttgtgggcttttgaacaatagctggagtgatatgaaatattagtgatgtagttgtgggcttttgaactgcttcaagctggagtgatgtcgttgtggtgcttttgtgactgatcatctctggagcttttgtgaatgatctagctagctatctgtaaatgatctagtcgtgaatgatattataattgtgatgcttttgtgaatatataattgtggtgcttttgtgtttatgtgatggatctatggctatggtatactgattaactgtgtatatctttatgatttgtgtataaaaatcagtgatttgtg

SEQ ID NO: 62665 - DNA, 1909 bp, Zea Mays
cctactcagcctctcctgcacgccgccgcccatggtaccaaactcgaccgccaaagcccctggccgagctcccccatggcgtctcccccaaccatggtgctctctgctcctccacggcgctgagctccaccagccgctgctcttgaacgctagcgccaacctcatctttgctcctctctcccgcatctctgcaggtcgcccaggtcgtggcctcgccggatcccgcgcgctcctgtgtcgtggcgttgtccccatgttttctccgcgccagcgcgccaccggctctacttgagctcctccctcgccgtagctcacaggtcgccaccccatggctgctgctcctctctccctcatctctgcaactcggcgcctcctctactcctccacctgcagttcgccccatgttctggacgccaaccctccatccccctaccctccagccatggacgccctagctcccttttgttgctcgctagggaccagctcggtgccctctcctcacttgaagccggcaacaacgccttggtagtggtcgagcagcacgtcgtcggctccgtgggttttttgggcagcccggttgcggtgtcgtcaaaccccggtgagacctcactgtccctgcatgcctggtgtttgatgtaatgtcaaaccgcttaattttatagataagtttaacattggattgttctgacttcttgcactgatctgccatgaatcctgaaatgtagtcccatgtgtgccatatttcctccatgcatgattattaagtctgtgttcttgaagtttccaatctcacacgcatgattaatgtgttcttgaaataccgatgaagttgtgtaaaaagtctttactacgattgagttacacccttagttaaatagggactttattttggagcaatgaatattgatcagcacattcccttagtatgttgctacctgcaatttttttcttacaacctgagaagcggcatgtttactacaaggtatcatcttcacttgtttgcattacacgcccattttcattatccctcttttctcttttctgtgataataatggaattaatggcactctttctcagcttgcagttcaacagttgaatttcatcgagtcccagccagtttgattatatgaaccagaggcaagccaggatgccctaggtacataaatgtgtttctggtggaggtaaagttctaattccaacgtttgctctgggaagagctcagggttctgcaaaacatccttttgtgaaatgatcctcgaccgtcaattctttgaaatgttccctagtaaaatgatttattcttgatggttcaaaagtttccctattccttggatgtatcatatgcatcggggatgtcatattgaagaatcagtataataatatggactatttggaggggtctttaaatgagcttggaagttggtgcataaggctgcaacaccgtctagtgagggtgttttggacaaagaaaacttgtaccttaaaacaggaggatacaagaagctggagtggttgtctgaaggcttttgaactgcttgaagcattagtgtagctttggtgcttttgtgactgatcaactctggagcagctagagtgatgtagttgtgggcttttgaacaatagctggagtgatatgaaatattagtgatgtagttgtgggcttttgaactgcttcaagctggagtgatgtcgttgtggtgcttttgtgactgatcatctctggagcttttgtgaatgatctagctagctatctgtaaatgatctagtcgtgaatgatattataattgtgatgcttttgtgaatatataattgtggtgcttttgtgtttatgtgatggatctatggctatggtatactgattaactgtgtatatctttatgatttgtgtataaaaatcagtgatttgtg

SEQ ID NO: 62666 - DNA, 1275 bp, Zea Mays
tctctccctactcagcctctcctgcacgccgccgcccatggtcgcccaggtcgtggcctcgccggatcccgcgcgctcctgtgtcgtggcgttgtccccatgttttctccgcgccagcgcgccaccggctctacttgagctcctccctcgccgtagctcacaggtcgccaccccatggctgctgctcctctctccctcatctctgcaactcggcgcctcctctactcctccacctgcagttcgccccatgttctggacgccaaccctccatccccctaccctccagccatggacgccctagctcccttttgttgctcgctagggaccagctcggtgccctctcctcacttgaagccggcaacaacgccttggtagtggtcgagcagcacgtcgtcggctccgtgggttttttgggcagcccggttgcggtgtcgtcaaaccccgcttgcagttcaacagttgaatttcatcgagtcccagccagtttgattatatgaaccagaggcaagccaggatgccctaggtacataaatgtgtttctggtggaggtaaagttctaattccaacgtttgctctgggaagagctcagggttctgcaaaacatccttttgtgaaatgatcctcgaccgtcaattctttgaaatgttccctagtaaaatgatttattcttgatggttcaaaagtttccctattccttggatgtatcatatgcatcggggatgtcatattgaagaatcagtataataatatggactatttggaggggtctttaaatgagcttggaagttggtgcataaggctgcaacaccgtctagtgagggtgttttggacaaagaaaacttgtaccttaaaacaggaggatacaagaagctggagtggttgtctgaaggcttttgaactgcttgaagcattagtgtagctttggtgcttttgtgactgatcaactctggagcagctagagtgatgtagttgtgggcttttgaacaatagctggagtgatatgaaatattagtgatgtagttgtgggcttttgaactgcttcaagctggagtgatgtcgttgtggtgcttttgtgactgatcatctctggagcttttgtgaatgatctagctagctatctgtaaatgatctagtcgtgaatgatattataattgtgatgcttttgtgaatatataattgtggtgcttttgtgtttatgtgatggatctatggctatggtatactgattaactgtgtatatctttatgatttgtgtataaaaatcagtgatttgtg

SEQ ID NO: 62667 - DNA, 2883 bp, Zea Mays
cccatctccatctctccctactcagcctctcctgcacgccgccgcccatggtcgcccaggtcgtggcctcgccggatcccgcgcgctcctgtgtcgtggcgttgtccccatgttttctccgcgccagcgcgccaccggctctacttgagctcctccctcgccgtagctcacaggtcgccaccccatggctgctgctcctctctccctcatctctgcaactcggcgcctcctctactcctccacctgcagttcgccccatgttctggacgccaaccctccatccccctaccctccagccatggacgccctagctcccttttgttgctcgctagggaccagctcggtgccctctcctcacttgaagccggcaacaacgccttggtagtggtcgagcagcacgtcgtcggctccgtgggttttttgggcagcccggttgcggtgtcgtcaaaccccggtgagacctcactgtccctgcatgcctggtgtttgatgtaatgtcaaaccgcttaattttatagataagtttaacattggattgttctgacttcttgcactgatctgccatgaatcctgaaatgtagtcccatgtgtgccatatttcctccatgcatgattattaagtctgtgttcttgaagtttccaatctcacacgcatgattaatgtgttcttgaaataccgatgaagttgtgtaaaaagtctttactacgattgagttacacccttagttaaatagggactttattttggagcaatgaatattgatcagcacattcccttagtatgttgctacctgcaatttttttcttacaacctgagaagcggcatgtttactacaagcttgcagttcaacagttgaatttcatcgagtcccagccagtttgattatatgaaccagaggcaagccaggatgccctaggtacataaatgtgtttctggtggaggtaaagttctaattccaacgtttgctctgggaagagctcaggtattgtagttctcttaattctactttatgagacaaagtgatggttaagtgtgataactatatatgacttaaatgagcaagtttccctgagaagtaccattctgagggcacactgttcgaaggtttcataatttgtgatgacttgttccactttttaaaaaaatcagtagagttgtctggacagctaacctcttgactgcttatgtttgatttgtatttgatatgtgcttttaattatttattaactagcagtagactcctaattccatgcttggttaattactctgaacttaaactagctaaatatagcttatgcaagttcttagactggcacatatcacttgcatccactgcctgtagccctgtacatgcaaaaattcgtgttagtagtatgtaatggccctagctacaactgcaaatagtacaagggatagcagtagagaaaacaaatgcggtgagaatgagaatcaaggtaagttggcttgcaagcttctatgcaagtgtttcctgtatccataactctgcaaaagttttggctaggataggaatcaaagggagagctaattcttccattgacttgctagtttggtggtactcccaacagaaactaaattgcaaggtaatgaacttaactttatatattccgttttgtggtactcccaacagaatctaaaattgcaaggtaattgcaagtgttctttgctaatcctcttgactggtgggataacaggacaaataaggttagactgggattgttcaaagttataaccacttgtcatttacatggtaacagtttacctcgcatctgaataataaaccttccttttgagcgcattctaattagcaaacataaaaaaacagagaacacatgagaactcaagaactaaataaaaaaagttcaaatatttactgagggagagggatatatggtcagtagagtgggtgaatattgagacggaaataataaacagccaaatgagttatgaaaggtattattgtttttctagtgatttaatgcatattttgtgtgtctttttatcatgatccatatgacgtttaatctgagtaacatgttacttgcacgattttttctgatgattgatacttatatgactgactattcaccctttaaaattattgcagtttaccaggatacatatttttgtaattgtttgtgacatgttagtcttttgtttaacctatttcatccatagggttctgcaaaacatccttttgtgaaatgatcctcgaccgtcaattctttgaaatgttccctagtaaaatgatttattcttgatggttcaaaagtttccctattccttggatgtatcatatgcatcggggatgtcatattgaagaatcagtataataatatggactatttggaggggtctttaaatgagcttggaagttggtgcataaggctgcaacaccgtctagtgagggtgttttggacaaagaaaacttgtaccttaaaacaggaggatacaagaagctggagtggttgtctgaaggcttttgaactgcttgaagcattagtgtagctttggtgcttttgtgactgatcaactctggagcagctagagtgatgtagttgtgggcttttgaacaatagctggagtgatatgaaatattagtgatgtagttgtgggcttttgaactgcttcaagctggagtgatgtcgttgtggtgcttttgtgactgatcatctctggagcttttgtgaatgatctagctagctatctgtaaatgatctagtcgtgaatgatattataattgtgatgcttttgtgaatatataattgtggtgcttttgtgtttatgtgatggatctatggctatggtatactgattaactgtgtatatctttatgatttgtgtataaaaatcagtgatttgtg

SEQ ID NO: 62668 - DNA, 2625 bp, Zea Mays
ccctaggccaaccggccatgcccaggcccccacccgccaggccgccaggcggcgaggcgcggcgcccatctccatctctccctactcagcctctcctgcacgccgccgcccatggtaccaaactcgaccgccaaagcccctggccgagctcccccatggcgtctcccccaaccatggtcgcccaggtcgtggcctcgccggatcccgcgcgctcctgtgtcgtggcgttgtccccatgttttctccgcgccagcgcgccaccggctctacttgagctcctccctcgccgtagctcacaggtcgccaccccatggctgctgctcctctctccctcatctctgcaactcggcgcctcctctactcctccacctgcagttcgccccatgttctggacgccaaccctccatccccctaccctccagccatggacgccctagctcccttttgttgctcgctagggaccagctcggtgccctctcctcacttgaagccggcaacaacgccttggtagtggtcgagcagcacgtcgtcggctccgtgggttttttgggcagcccggttgcggtgtcgtcaaaccccgcttgcagttcaacagttgaatttcatcgagtcccagccagtttgattatatgaaccagaggcaagccaggatgccctaggtacataaatgtgtttctggtggaggtaaagttctaattccaacgtttgctctgggaagagctcaggtattgtagttctcttaattctactttatgagacaaagtgatggttaagtgtgataactatatatgacttaaatgagcaagtttccctgagaagtaccattctgagggcacactgttcgaaggtttcataatttgtgatgacttgttccactttttaaaaaaatcagtagagttgtctggacagctaacctcttgactgcttatgtttgatttgtatttgatatgtgcttttaattatttattaactagcagtagactcctaattccatgcttggttaattactctgaacttaaactagctaaatatagcttatgcaagttcttagactggcacatatcacttgcatccactgcctgtagccctgtacatgcaaaaattcgtgttagtagtatgtaatggccctagctacaactgcaaatagtacaagggatagcagtagagaaaacaaatgcggtgagaatgagaatcaaggtaagttggcttgcaagcttctatgcaagtgtttcctgtatccataactctgcaaaagttttggctaggataggaatcaaagggagagctaattcttccattgacttgctagtttggtggtactcccaacagaaactaaattgcaaggtaatgaacttaactttatatattccgttttgtggtactcccaacagaatctaaaattgcaaggtaattgcaagtgttctttgctaatcctcttgactggtgggataacaggacaaataaggttagactgggattgttcaaagttataaccacttgtcatttacatggtaacagtttacctcgcatctgaataataaaccttccttttgagcgcattctaattagcaaacataaaaaaacagagaacacatgagaactcaagaactaaataaaaaaagttcaaatatttactgagggagagggatatatggtcagtagagtgggtgaatattgagacggaaataataaacagccaaatgagttatgaaaggtattattgtttttctagtgatttaatgcatattttgtgtgtctttttatcatgatccatatgacgtttaatctgagtaacatgttacttgcacgattttttctgatgattgatacttatatgactgactattcaccctttaaaattattgcagtttaccaggatacatatttttgtaattgtttgtgacatgttagtcttttgtttaacctatttcatccatagggttctgcaaaacatccttttgtgaaatgatcctcgaccgtcaattctttgaaatgttccctagtaaaatgatttattcttgatggttcaaaagtttccctattccttggatgtatcatatgcatcggggatgtcatattgaagaatcagtataataatatggactatttggaggggtctttaaatgagcttggaagttggtgcataaggctgcaacaccgtctagtgagggtgttttggacaaagaaaacttgtaccttaaaacaggaggatacaagaagctggagtggttgtctgaaggcttttgaactgcttgaagcattagtgtagctttggtgcttttgtgactgatcaactctggagcagctagagtgatgtagttgtgggcttttgaacaatagctggagtgatatgaaatattagtgatgtagttgtgggcttttgaactgcttcaagctggagtgatgtcgttgtggtgcttttgtgactgatcatctctggagcttttgtgaatgatctagctagctatctgtaaatgatctagtcgtgaatgatattataattgtgatgcttttgtgaatatataattgtggtgcttttgtgtttatgtgatggatctatggctatggtatactgattaactgtgtatatctttatgatttgtgtataaaaatcagtgatttgtg

SEQ ID NO: 62669 - DNA, 2635 bp, Zea Mays
ccacactacgcctctaaccctaggccaaccggccatgcccaggcccccacccgccaggccgccaggcggcgaggcgcggcgcccatctccatctctccctactcagcctctcctgcacgccgccgcccatggtaccaaactcgaccgccaaagcccctggccgagctcccccatggcgtctcccccaaccatggtcgcccaggtcgtggcctcgccggatcccgcgcgctcctgtgtcgtggcgttgtccccatgttttctccgcgccagcgcgccaccggctctacttgagctcctccctcgccgtagctcacaggtcgccaccccatggctgctgctcctctctccctcatctctgcaactcggcgcctcctctactcctccacctgcagttcgccccatgttctggacgccaaccctccatccccctaccctccagccatggacgccctagctcccttttgttgctcgctagggaccagctcggtgccctctcctcacttgaagccggcaacaacgccttggtagtggtcgagcagcacgtcgtcggctccgtgggttttttgggcagcccggttgcggtgtcgtcaaaccccgttcaacagttgaatttcatcgagtcccagccagtttgattatatgaaccagaggcaagccaggatgccctaggtacataaatgtgtttctggtggaggtaaagttctaattccaacgtttgctctgggaagagctcaggtattgtagttctcttaattctactttatgagacaaagtgatggttaagtgtgataactatatatgacttaaatgagcaagtttccctgagaagtaccattctgagggcacactgttcgaaggtttcataatttgtgatgacttgttccactttttaaaaaaatcagtagagttgtctggacagctaacctcttgactgcttatgtttgatttgtatttgatatgtgcttttaattatttattaactagcagtagactcctaattccatgcttggttaattactctgaacttaaactagctaaatatagcttatgcaagttcttagactggcacatatcacttgcatccactgcctgtagccctgtacatgcaaaaattcgtgttagtagtatgtaatggccctagctacaactgcaaatagtacaagggatagcagtagagaaaacaaatgcggtgagaatgagaatcaaggtaagttggcttgcaagcttctatgcaagtgtttcctgtatccataactctgcaaaagttttggctaggataggaatcaaagggagagctaattcttccattgacttgctagtttggtggtactcccaacagaaactaaattgcaaggtaatgaacttaactttatatattccgttttgtggtactcccaacagaatctaaaattgcaaggtaattgcaagtgttctttgctaatcctcttgactggtgggataacaggacaaataaggttagactgggattgttcaaagttataaccacttgtcatttacatggtaacagtttacctcgcatctgaataataaaccttccttttgagcgcattctaattagcaaacataaaaaaacagagaacacatgagaactcaagaactaaataaaaaaagttcaaatatttactgagggagagggatatatggtcagtagagtgggtgaatattgagacggaaataataaacagccaaatgagttatgaaaggtattattgtttttctagtgatttaatgcatattttgtgtgtctttttatcatgatccatatgacgtttaatctgagtaacatgttacttgcacgattttttctgatgattgatacttatatgactgactattcaccctttaaaattattgcagtttaccaggatacatatttttgtaattgtttgtgacatgttagtcttttgtttaacctatttcatccatagggttctgcaaaacatccttttgtgaaatgatcctcgaccgtcaattctttgaaatgttccctagtaaaatgatttattcttgatggttcaaaagtttccctattccttggatgtatcatatgcatcggggatgtcatattgaagaatcagtataataatatggactatttggaggggtctttaaatgagcttggaagttggtgcataaggctgcaacaccgtctagtgagggtgttttggacaaagaaaacttgtaccttaaaacaggaggatacaagaagctggagtggttgtctgaaggcttttgaactgcttgaagcattagtgtagctttggtgcttttgtgactgatcaactctggagcagctagagtgatgtagttgtgggcttttgaacaatagctggagtgatatgaaatattagtgatgtagttgtgggcttttgaactgcttcaagctggagtgatgtcgttgtggtgcttttgtgactgatcatctctggagcttttgtgaatgatctagctagctatctgtaaatgatctagtcgtgaatgatattataattgtgatgcttttgtgaatatataattgtggtgcttttgtgtttatgtgatggatctatggctatggtatactgattaactgtgtatatctttatgatttgtgtataaaaatcagtgatttgtg

SEQ ID NO: 62670 - DNA, 2208 bp, Zea Mays
accaccatttatttagtccctctccctccctccctcactcctccgctgaggcgaggcaaccccgtcaacccgaggatcccacgcgaaccctagccagctagcaagccaccgcggccgggtccaatggcggaggacgggggcgacagggaccaccagcagcagccgccggcggcggcggccgctgcggcgtcagacagcgccggggtggaggggcgcagcagggagagcgtcaagctcttcgtgggacaggtgcccaagcagatgtccgaggccgagctcgctgccatgttccgcagcgtcgccctcgtcgacgaggtcactgtcatccgcgacagggtcaccagggtctcgcgaggctgctgcttcgtgatctgcccatcaagggaggaggctgataaggctgtgactacataccacaacaagcgcacactacctggggcctcaagtccattgcaagtaaaatatgccgatggggagttggaaagattggagcacaagctcttcgttggaatgctccccaaaaatgtaacacatgctgaaatgacggatttattttcaaaatatggaaatataaaggatttacagattctgagaggctctcagcaaacgagcaaagctggttgtgcctttctaaaatatgaaacaaaagagcaagctgtggctgctatagaagctctaaatggaacacacaaaatagagggttcaagtgttcccttggttgtcaaatgggctgacactgaaaaggaaaggcaggctcgaaaagcacaaaaagctcaattccagtcttctaacatgttgaatgcaaatgctatgcagcagaattcagtgtttggaggtttacagatgggttatgtgccgcagtacaatggatttggctaccaggtatattatggcataaaaaatgaggttaggttaggtgttggcccatgatagagcaaacaacctgagacagctctgtgataacctttcatgcagtagtgtcatgctcatgcttggcagaaatgtgctagcagttttaaccaaaaaattcacaaggaatgctatacaaacttgattacttggattttataaagtatgcattgatcagtaaactatgtgcagcacgacaatgctgtagagtggtacactgacaaacttgattagttggatttaatttgttttgcattccgggtaataactgtacttgcattactctatgcagccacaaggaacctacgggcttatgcaataccctcctctatctcctgtgcaaaatcaagctgccttccagaatatggttcagcctgttaatcaaggaagctcgatccatggagctaattctgaagtttcgcctaatccagttcctagatcatttaattccgcgcagttgggaagcccctattcgcctttgcctggtttgcagtatcctggagtgtatcctggtggtcctattaatcatcgccccttttcaagttctcacagttcaaccaaagttcaaaactcaagtgctaattcgccgtcttcgagtcccagcagcaatcctggcccccagatagagggtcctcctggagccaatttgttcatataccacatcccgcaagaattcggtgaccatgatcttgccagtgcattccatagtttcggtagggtactgagcgccaaagttttcgtagacaaggcaactggtgttagtaaatgctttggtttcgtaagctacgactctccagcctctgcacaggcagccatcagtgtgatgaatggataccaattaggcggcaaaaagttgaaagtacagctcaagagagacaacagcaagcacagtaaacctttctgacaaagcgacctcgttgtgtgctctcaccacgttcaggaaaaagtcggtacatatgtgtcacaattgatcattacattgtttcctccggcctctcaccattgcgttgccgccggtggtggctcttgttgtatctttgttcaattcacattcttgaaaactgtcgcattgtgtatttttcgtcgcagcgtagctgtagcgtttgtaccatcatcagatcttgtacatcagacattgatttattcaattgttttttaaaaaaaaattcacatggattattttgttgtaaataatgttttaggaatttccagtatgtgacatgtttgagtatttctgttattatccttgacctaatcttgctgctagccataggcccataaccgagtaagaaatgagcg

SEQ ID NO: 62671 - DNA, 2007 bp, Zea Mays
acctttccaggaagctgaatcaacagaaacgcgtagaaataacgaaaagtacaaaaatattgcgctgaagtttccgtgtacgacggtcaggctcaggctcagcatgaaatagccgcgtccggcgtttcatcatctcagtccccggcgcggcagttgtcattttcagcatcgaagttgcggaatacagattccttttcaaagagtgatcctatgttagtggtctacactaacatcaaaggaaagctagaggagattggccgtactgaagtgattttaaattcactggagccctcatggattacaaaggttacaatgtcttaccaatttgagattgtgcaaccactcatattcaggatatatgatgttgacacaaagtaccacaacactccagtgaagacattgaatttgacacagcaggattttctgggggtagcatgctgcaacttatcagagagtgattgtggacatggtcttcatggaacaatgacagtacatgctgaagaaagtgactcctctagaatggcagttgagatgactctgcgttgcgtgaacttggaaaataaagatgtgttctccaaaagtgatcccttcttaagaatatctaaactggtagagactgctggtcccattccaatctgcaaaacggaagtagtacctgacaacttgaaccctgtttggaggccaatcactttaacatcgcagcagtatggaagcaaggataacccactgctagttgagtgttttgattttaattccagtggtgaccatgaactgataggggccttccagacaactattactcagcttgaaaatctatatacctcaaagtctgcagcaattttttacaaccacaagggacaaagaaagatgaaagaacaattgtttgtggacaagtttcaggaaacagtccagcatactttcttagattatatatccagtggatttgagctcaatttcatggtggctatagattttactgcttcaaatggagacccacgtgtaccccagtccttgcactacattgacccctctggcagacctaattcgtatcaacaggcaatgctgggggttggcgaagttctgcagttttatgacaatgataggcgatttcctacgtggggttttggagcaagggtacatggttatgtatcacattgctttaacttgaatacagctacaaatgactctgaggtggttggagttgaaggcatcatgtcagcatacacctcttctctttacagtgtttcccttgctgggccaactatgttcgggcccgtgatcaacaaagctgcagatattgcaagccagtcccttcaatattcaaacaataaatattttgtccttctcattatcacggacggagttctcactgacatccaagaaacaaaagattgcattgtaagggcatcagacctgccattgtcgattctcattgtaggcgttggaaacgctgatttcaaacaaatggagatcttagacgcggacaatggtaagcgactggaaagctctacgggtaggatcgcgacacgcgacatcgtccagtttgttcccatgagggaagtccaaggtggcgagatctccgtcgtgcaatcccttctggaggaactgcccggtcagttcctgcagtacatgcgcactcggggaatcaagccacagcgggctccggggcttgcttcagcgcccgtttacccacctcagcagtgaccagaagaaaacgtgcacgagctgatccatttgcctcaactgtggattccgctagcgtcccgtcccgtggtagcctagtactcttgttcatacggtctctggttagctttctctttgccgcagttggtaaatatccatgctgtagaatctagatccagcacaaatagatagtaaaacactgctttcctctaggttaagctagacgatgtaaattcgtgctgcagattgccaagtattcaggttgtcgtgaaacgtcattattatcacctgctttcatattaagtactatcttgctaatagttg

SEQ ID NO: 62672 - DNA, 2273 bp, Zea Mays
acctttccaggaagctgaatcaacagaaacgcgtagaaataacgaaaagtacaaaaatattgcgctgaagtttccgtgtacgacggtcaggctcaggctcagcatgaaatagccgcgtccggcgtttcatcatctcagtccccggcgcggcaggtgaaattcgagtactcctgactgttcagttcactataatatcccttggtgccgttgcccttgcctcaaatctatacgtaagtggaaacgttggaggagatcgatcgatcgggatgggtgggtgcttctccgtgcacggtgacgtgcgcggcggcatggagggcgtcggcggtggcgcgaggacccagggcggcgcggcgtcgtcgtctgcgcagcagggcgggccgaacgatgcggtcgactatttcttccagacgcgcgggctccgcggcctctacacgcccatcgagttgtcattttcagcatcgaagttgcggaatacagattccttttcaaagagtgatcctatgttagtggtctacactaacatcaaaggaaagctagaggagattggccgtactgaagtgattttaaattcactggagccctcatggattacaaaggttacaatgtcttaccaatttgagattgtgcaaccactcatattcaggatatatgatgttgacacaaagtaccacaacactccagtgaagacattgaatttgacacagcaggattttctggggagtgattgtggacatggtcttcatggaacaatgacagtacatgctgaagaaagtgactcctctagaatggcagttgagatgactctgcgttgcgtgaacttggaaaataaagatgtgttctccaaaagtgatcccttcttaagaatatctaaactggtagagactgctggtcccattccaatctgcaaaacggaagtagtacctgacaacttgaaccctgtttggaggccaatcactttaacatcgcagcagtatggaagcaaggataacccactgctagttgagtgttttgattttaattccagtggtgaccatgaactgataggggccttccagacaactattactcagcttgaaaatctatatacctcaaagtctgcagcaattttttacaaccacaagggacaaagaaagatgaaagaacaattgtttgtggacaagtttcaggaaacagtccagcatactttcttagattatatatccagtggatttgagctcaatttcatggtggctatagattttactgcttcaaatggagacccacgtgtaccccagtccttgcactacattgacccctctggcagacctaattcgtatcaacaggcaatgctgggggttggcgaagttctgcagttttatgacaatgataggcgatttcctacgtggggttttggagcaagggtacatggttatgtatcacattgctttaacttgaatacagctacaaatgactctgaggtggttggagttgaaggcatcatgtcagcatacacctcttctctttacagtgtttcccttgctgggccaactatgttcgggcccgtgatcaacaaagctgcagatattgcaagccagtcccttcaatattcaaacaataaatattttgtccttctcattatcacggacggagttctcactgacatccaagaaacaaaagattgcattgtaagggcatcagacctgccattgtcgattctcattgtaggcgttggaaacgctgatttcaaacaaatggagatcttagacgcggacaatggtaagcgactggaaagctctacgggtaggatcgcgacacgcgacatcgtccagtttgttcccatgagggaagtccaaggtggcgagatctccgtcgtgcaatcccttctggaggaactgcccggtcagttcctgcagtacatgcgcactcggggaatcaagccacagcgggctccggggcttgcttcagcgcccgtttacccacctcagcagtgaccagaagaaaacgtgcacgagctgatccatttgcctcaactgtggattccgctagcgtcccgtcccgtggtagcctagtactcttgttcatacggtctctggttagctttctctttgccgcagttggtaaatatccatgctgtagaatctagatccagcacaaatagatagtaaaacactgctttcctctaggttaagctagacgatgtaaattcgtgctgcagattgccaagtattcaggttgtcgtgaaacgtcattattatcacctgctttcatattaagtactatcttgctaatagttg

SEQ ID NO: 62673 - DNA, 2333 bp, Zea Mays
acctttccaggaagctgaatcaacagaaacgcgtagaaataacgaaaagtacaaaaatattgcgctgaagtttccgtgtacgacggtcaggctcaggctcagcatgaaatagccgcgtccggcgtttcatcatctcagtccccggcgcggcaggtgaaattcgagtactcctgactgttcagttcactataatatcccttggtgccgttgcccttgcctcaaatctatacgtaagtggaaacgttggaggagatcgatcgatcgggatgggtgggtgcttctccgtgcacggtgacgtgcgcggcggcatggagggcgtcggcggtggcgcgaggacccagggcggcgcggcgtcgtcgtctgcgcagcagggcgggccgaacgatgcggtcgactatttcttccagacgcgcgggctccgcggcctctacacgcccatcgagttgtcattttcagcatcgaagttgcggaatacagattccttttcaaagagtgatcctatgttagtggtctacactaacatcaaaggaaagctagaggagattggccgtactgaagtgattttaaattcactggagccctcatggattacaaaggttacaatgtcttaccaatttgagattgtgcaaccactcatgatatatgatgttgacacaaagtaccacaacactccagtgaagacattgaatttgacacagcaggattttctgggggtagcatgctgcaacttatcagagattgtaacaaaatttaaccgtagcctgacattgaatcttcagagtgattgtggacatggtcttcatggaacaatgacagtacatgctgaagaaagtgactcctctagaatggcagttgagatgactctgcgttgcgtgaacttggaaaataaagatgtgttctccaaaagtgatcccttcttaagaatatctaaactggtagagactgctggtcccattccaatctgcaaaacggaagtagtacctgacaacttgaaccctgtttggaggccaatcactttaacatcgcagcagtatggaagcaaggataacccactgctagttgagtgttttgattttaattccagtggtgaccatgaactgataggggccttccagacaactattactcagcttgaaaatctatatacctcaaagtctgcagcaattttttacaaccacaagggacaaagaaagatgaaagaacaattgtttgtggacaagtttcaggaaacagtccagcatactttcttagattatatatccagtggatttgagctcaatttcatggtggctatagattttactgcttcaaatggagacccacgtgtaccccagtccttgcactacattgacccctctggcagacctaattcgtatcaacaggcaatgctgggggttggcgaagttctgcagttttatgacaatgataggcgatttcctacgtggggttttggagcaagggtacatggttatgtatcacattgctttaacttgaatacagctacaaatgactctgaggtggttggagttgaaggcatcatgtcagcatacacctcttctctttacagtgtttcccttgctgggccaactatgttcgggcccgtgatcaacaaagctgcagatattgcaagccagtcccttcaatattcaaacaataaatattttgtccttctcattatcacggacggagttctcactgacatccaagaaacaaaagattgcattgtaagggcatcagacctgccattgtcgattctcattgtaggcgttggaaacgctgatttcaaacaaatggagatcttagacgcggacaatggtaagcgactggaaagctctacgggtaggatcgcgacacgcgacatcgtccagtttgttcccatgagggaagtccaaggtggcgagatctccgtcgtgcaatcccttctggaggaactgcccggtcagttcctgcagtacatgcgcactcggggaatcaagccacagcgggctccggggcttgcttcagcgcccgtttacccacctcagcagtgaccagaagaaaacgtgcacgagctgatccatttgcctcaactgtggattccgctagcgtcccgtcccgtggtagcctagtactcttgttcatacggtctctggttagctttctctttgccgcagttggtaaatatccatgctgtagaatctagatccagcacaaatagatagtaaaacactgctttcctctaggttaagctagacgatgtaaattcgtgctgcagattgccaagtattcaggttgtcgtgaaacgtcattattatcacctgctttcatattaagtactatcttgctaatagttg

SEQ ID NO: 62674 - DNA, 1961 bp, Zea Mays
agattgggctggtccggccactccgacacccttatataaagtcccgaaccctagaggccagcaccttcctccccaactcgccgtctgccttctgcgcctccatttcggcctctgtcccttgcaagttcaatctcacctccaaccatgggtaaagagaagtcccacatcaacattgtggttattggccatgtcgactctggcaagtcgaccaccacaggacaccttatctacaagcttggaggcattgacaagcgtgtgatcgagaggttcgagaaggaggctgctgaaatgaacaagcggtccttcaagtacgcgtgggtgctcgacaagctcaaggctgagcgtgagagaggtatcaccattgatatcgctctgtggaagtttgagaccaccaagtactactgcacggtcattgatgcccctggacaccgtgacttcatcaagaacatgatcactggtacctcccaggctgactgtgctgtccttatcattgactccaccactggtggttttgaggctggtatctccaaggatggccagacccgtgaacatgctctccttgcgttcacccttggagtgaagcagatgatttgctgctgcaacaagatggatgcaaccactcccaaatactccaaggcacgttatgaagagattgtgaaggaagtctcatcctacctcaagaaagttgggtacaaccctgataagattgcctttgttcccatttctggttttgagggcgacaacatgattgagaggtccaccaaccttgactggtacaaaggcccaaccctgcttgaggctcttgaccagatcaccgagcccaagaggccttcagacaagcccctgcgtctgcccctccaggatgtgtacaagattggtggtattggaactgtaccggttggtcgtgtggagactggtgtcatcaagcctggtatggtagtcacctttggtccaactggcctgactaccgaggtgaagtctgttgagatgcaccacgaggcacttcaggaggctcttgaccagatcaccgagcccaagaggccttcggacaagcccctgcgtctgcccctccaggatgtgtacaagattggtggtattggaactgtaccggttggtcgtgtggagactggtgtcatcaagcctggtatggtagtcacctttggtccaactggcctgactactgaggtgaagtctgttgagatgcaccacgaggcgcttcaggaggctcttccgggcgacaatgttggcttcaacgtgaagaacgttgctgtcaaggatctcaagcgtgggttcgtggcctccaactccaaggatgaccctgccaaggaggctgccagcttcacctcccaggtcatcatcatgaaccaccctgggcagattggcaacggctatgccccagtgctggactgccacacctcccacatcgccgtcaagtttgctgagctcattaccaagatcgacaggcgatctggcaaggagctcgagaaggagcccaagttcctgaagaacggtgatgctggtatggtgaagatgattcccaccaagcctatggtggtggagacattctccgcgtatcctcccctgggtaggtttgccgtccgcgacatgaggcagacggttgctgttggagtcatcaagagtgtggagaagaaggacccaaccggcgccaaggtgaccaaggcggccgccaagaagaaatgatgcgatcccgtgtctgcttttgcagtgcctggataacttgccactaaagttgtgtatgcggttgttgctgttattgcgtggactgtttgctgcggtgtctcctgtgtctgttgtctgttgtctttactatcagtaatgctcctgagacttgtatttctccttttggcgccgctaaatggaattttcgaacaatgattttcgtgttattattttacaaccttttcgaacaatatttacacgtctgatgtgttttgctgaga

SEQ ID NO: 62675 - DNA, 1895 bp, Zea Mays
agattgggctggtccggccactccgacacccttatataaagtcccgaaccctagaggccagcaccttcctccccaactcgccgtctgccttctgcgcctccatttcggcctctgtcccttgcaagttcaatctcacctccaaccatgggtaaagagaagtcccacatcaacattgtggttattggccatgtcgactctggcaagtcgaccaccacaggacaccttatctacaagcttggaggcattgacaagcgtgtgatcgagaggttcgagaaggaggctgctgaaatgaacaagcggtccttcaagtacgcgtgggtgctcgacaagctcaaggctgagcgtgagagaggtatcaccattgatatcgctctgtggaagtttgagaccaccaagtactactgcacggtcattgatgcccctggacaccgtgacttcatcaagaacatgatcactggtacctcccaggctgactgtgctgtccttatcattgactccaccactggtggttttgaggctggtatctccaaggatggccagacccgtgaacatgctctccttgcgttcacccttggagtgaagcagatgatttgctgctgcaacaagatggatgcaaccactcccaaatactccaaggcacgttatgaagagattgtgaaggaagtctcatcctacctcaagaaagttgggtacaaccctgataagattgcctttgttcccatttctggttttgagggcgacaacatgattgagaggtccaccaaccttgactggtacaaaggcccaaccctgcttgaggctcttgaccagatcaccgagcccaagaggccttcagacaagcccctgcgtctgcccctccaggatgtgtacaagattggtggtattggaactgtaccggttggtcgtgtggagactggtgtcatcaagcctggtatggtagtcacctttggtccaactggcctgactaccgaggtgaagtctgttgagatgcaccacgaggcacttcaggaggctcttccgggtgacaatgttggcttcaacgtgaagaatgttgctgtcaaggacctcaagcgtgggtttgtggcctccaactccaaggatgaccctgccaaggaggctgccagcttcacctcccaggtcatcatcatgaaccaccctgggcagattggcaacggctatgcccctgtgctggactgccacacctcccacatcgctgtcaagtttgctgagctcattaccaagatcgacaggcgctctggcaaggagcttgagaaggagccaaagttcctgaagaacggtgatgctggtatggtgaagatgatacccaccaagcccatggtggtggagacattctcagcgtatcctccccttggtaggtttgctgtccgtgacatgaggcagacggttgctgttggagttatcaagagtgtggagaagaaggacccaaccggcgccaaggtgaccaaggctgctgccaagaagaaatgatgcgatcctgcgcctgctttagcaatacctagttttcatcattacaagttttgtttgcagacggttgctgttggagtcatcaagagtgtggagaagaaggacccaaccggcgccaaggtgaccaaggcggccgccaagaagaaatgatgcgatcccgtgtctgcttttgcagtgcctggataacttgccactaaagttgtgtatgcggttgttgctgttattgcgtggactgtttgctgcggtgtctcctgtgtctgttgtctgttgtctttactatcagtaatgctcctgagacttgtatttctccttttggcgccgctaaatggaattttcgaacaatgattttcgtgttattattttacaaccttttcgaacaatatttacacgtctgatgtgttttgctgaga

SEQ ID NO: 62676 - DNA, 1811 bp, Zea Mays
agattgggctggtccggccactccgacacccttatataaagtcccgaaccctagaggccagcaccttcctccccaactcgccgtctgccttctgcgcctccatttcggcctctgtcccttgcaagttcaatctcacctccaaccatgggtaaagagaagtcccacatcaacattgtggttattggccatgtcgactctggcaagtcgaccaccacaggacaccttatctacaagcttggaggcattgacaagcgtgtgatcgagaggttcgagaaggaggctgctgaaatgaacaagcggtccttcaagtacgcgtgggtgctcgacaagctcaaggctgagcgtgagagaggtatcaccattgatatcgctctgtggaagtttgagaccaccaagtactactgcacggtcattgatgcccctggacaccgtgacttcatcaagaacatgatcactggtacctcccaggctgactgtgctgtccttatcattgactccaccactggtggttttgaggctggtatctcccaggctgactgtgctgtccttatcattgactccaccactggtggttttgaggctggtatctccaaggatggccagacccgtgaacatgctctccttgcgttcacccttggagtgaagcagatgatttgctgctgcaacaagatggatgcaaccactccgaaatactccaaggcacgttatgatgagattgtgaaggaagtctcatcctacctcaagaaagttgggtacaaccctgataagattgcctttgttcccatttctggttttgagggcgacaacatgattgagaggtccaccaaccttgactggtacaaaggcccaaccctgcttgaggctcttgaccagatcaccgagcccaagaggccttcggacaagcccctgcgtctgcccctccaggatgtgtacaagattggtggtattggaactgtaccggttggtcgtgtggagactggtgtcatcaagcctggtatggtagtcacctttggtccaactggcctgactactgaggtgaagtctgttgagatgcaccacgaggcgcttcaggaggctcttccgggcgacaatgttggcttcaacgtgaagaacgttgctgtcaaggatctcaagcgtgggttcgtggcctccaactccaaggatgaccctgccaaggaggctgccagcttcacctcccaggtcatcatcatgaaccaccctgggcagattggcaacggctatgccccagtgctggactgccacacctcccacatcgccgtcaagtttgctgagctcattaccaagatcgacaggcgatctggcaaggagctcgagaaggagcccaagttcctgaagaacggtgatgctggtatggtgaagatgattcccaccaagcctatggtggtggagacattctccgcgtatcctcccctgggtaggtttgccgtccgcgacatgaggcagacggttgctgttggagtcatcaagagtgtggagaagaaggacccaaccggcgccaaggtgaccaaggcggccgccaagaagaaatgatgcgatcccgtgtctgcttttgcagtgcctggataacttgccactaaagttgtgtatgcggttgttgctgttattgcgtggactgtttgctgcggtgtctcctgtgtctgttgtctgttgtctttactatcagtaatgctcctgagacttgtatttctccttttggcgccgctaaatggaattttcgaacaatgattttcgtgttattattttacaaccttttcgaacaatatttacacgtctgatgtgttttgctgaga

SEQ ID NO: 62677 - DNA, 2079 bp, Zea Mays
agattgggctggtccggccactccgacacccttatataaagtcccgaaccctagaggccagcaccttcctccccaactcgccgtctgccttctgcgcctccatttcggcctctgtcccttgcaagttcaatctcacctccaaccatgggtaaagagaagtcccacatcaacattgtggttattggccatgtcgactctggcaagtcgaccaccacaggacaccttatctacaagcttggaggcattgacaagcgtgtgatcgagaggttcgagaaggaggctgctgaaatgaacaagcggtccttcaagtacgcgtgggtgctcgacaagctcaaggctgagcgtgagagaggtatcaccattgatatcgctctgtggaagtttgagaccaccaagtactactgcacggtcattgatgcccctggacaccgtgacttcatcaagaacatgatcactggtacctcccaggctgactgtgctgtccttatcattgactccaccactggtggttttgaggctggtatctccaaggatggccagacccgtgaacatgctctccttgcgttcacccttggagtgaagcagatgatttgctgctgcaacaagatggatgcaaccactcccaaatactccaaggcacgttatgaagagattgtgaaggaagtctcatcctacctcaagaaagttgggtacaaccctgataagattgcctttgttcccatttctggttttgagggcgacaacatgatcactggtacctcccaggctgactgtgctgtccttatcattgactccaccactggtggttttgaggctggtatctccaaggatggccagacccgtgaacatgctctccttgcgttcacccttggagtgaagcagatgatttgctgctgcaacaagatggatgcaaccactccgaaatactccaaggcacgttatgatgagattgtgaaggaagtctcatcctacctcaagaaagttgggtacaaccctgataagattgcctttgttcccatttctggttttgagggcgacaacatgattgagaggtccaccaaccttgactggtacaaaggcccaaccctgcttgaggctcttgaccagatcaccgagcccaagaggccttcggacaagcccctgcgtctgcccctccaggatgtgtacaagattggtggtattggaactgtaccggttggtcgtgtggagactggtgtcatcaagcctggtatggtagtcacctttggtccaactggcctgactactgaggtgaagtctgttgagatgcaccacgaggcgcttcaggaggctcttccgggcgacaatgttggcttcaacgtgaagaacgttgctgtcaaggatctcaagcgtgggttcgtggcctccaactccaaggatgaccctgccaaggaggctgccagcttcacctcccaggtcatcatcatgaaccaccctgggcagattggcaacggctatgccccagtgctggactgccacacctcccacatcgccgtcaagtttgctgagctcattaccaagatcgacaggcgatctggcaaggagctcgagaaggagcccaagttcctgaagaacggtgatgctggtatggtgaagatgattcccaccaagcctatggtggtggagacattctccgcgtatcctcccctgggtaggtttgccgtccgcgacatgaggcagacggttgctgttggagtcatcaagagtgtggagaagaaggacccaaccggcgccaaggtgaccaaggcggccgccaagaagaaatgatgcgatcccgtgtctgcttttgcagtgcctggataacttgccactaaagttgtgtatgcggttgttgctgttattgcgtggactgtttgctgcggtgtctcctgtttgtttgggtagcgcagcgtcggcctcttcaggtgtctgttgtctgttgtctttactatcagtaatgctcctgagacttgtatttctccttttggcgccgctaaatggaattttcgaacaatgattttcgtgttattattttacaaccttttcgaacaatatttacacgtctgatgtgttttgctgaga

SEQ ID NO: 62678 - DNA, 1923 bp, Zea Mays
agattgggctggtccggccactccgacacccttatataaagtcccgaaccctagaggccagcaccttcctccccaactcgccgtctgccttctgcgcctccatttcggcctctgtcccttgcaagttcaatctcacctccaaccatgggtaaagagaagtcccacatcaacattgtggttattggccatgtcgactctggcaagtcgaccaccacaggacaccttatctacaagcttggaggcattgacaagcgtgtgatcgagaggttcgagaaggaggctgctgaaatgaacaagcggtccttcaagtacgcgtgggtgctcgacaagctcaaggctgagcgtgagagaggtatcaccattgatatcgctctgtggaagtttgagaccaccaagtactactgcacggtcattgatgcccctggacaccgtgacttcatcaagaacatgatcactggtacctcccaggctgactgtgctgtccttatcattgactccaccactggtggttttgaggctggtatctccaaggatggccagacccgtgaacatgctctccttgcgttcacccttggagtgaagcagatgatttgctgctgcaacaagatggatgcaaccactcccaaatactccaaggcacgttatgaagagattgtgaaggaagtctcatcctacctcaagaaagttgggtacaaccctgataagattgcctttgttcccatttctggttttgagggcgacaacatgattgagaggtccaccaaccttgactggtacaaaggcccaaccctgcttgaggctcttgaccagatcaccgagcccaagaggccttcagacaagcccctgcgtctgcccctccaggatgtgtacaagattggtggtattggaactgtaccggttggtcgtgtggagactggtgtcatcaagcctggtatggtagtcacctttggtccaactggcctgactaccgaggtgaagtctgttgagatgcaccacgaggcacttcaggaggctcttccgggtgacaatgttggcttcaacgtgaagaatgttgctgtcaaggacctcaagcgtgggtttgtggcctccaactccaaggatgaccctgccaaggaggctgccagcttcacctcccaggtcatcatcatgaaccaccctgggcagattggcaacggctatgcccctgtgctggactgccacacctcccacatcgctgtcaagtttgctgagctcattaccaagatcgacaggcgctctggcaaggagcttgagaaggagccaaagttcctgaagaacggtgatgctggtatggtgaagatgatacccaccaagcccatggtggtggagacattctcagcgtatcctccccttggtaggtttgctgtccgtgacatgaggcagacggttgctgttggagttatcaagagtgtggagaagaaggacccaaccggagcccaagttcctgaagaacggtgatgctggtatggtgaagatgattcccaccaagcctatggtggtggagacattctccgcgtatcctcccctgggtaggtttgccgtccgcgacatgaggcagacggttgctgttggagtcatcaagagtgtggagaagaaggacccaaccggcgccaaggtgaccaaggcggccgccaagaagaaatgatgcgatcccgtgtctgcttttgcagtgcctggataacttgccactaaagttgtgtatgcggttgttgctgttattgcgtggactgtttgctgcggtgtctcctgtgtctgttgtctgttgtctttactatcagtaatgctcctgagacttgtatttctccttttggcgccgctaaatggaattttcgaacaatgattttcgtgttattattttacaaccttttcgaacaatatttacacgtctgatgtgttttgctgaga

SEQ ID NO: 62679 - DNA, 2087 bp, Zea Mays
agattgggctggtccggccactccgacacccttatataaagtcccgaaccctagaggccagcaccttcctccccaactcgccgtctgccttctgcgcctccatttcggcctctgtcccttgcaagttcaatctcacctccaaccatgggtaaagagaagtcccacatcaacattgtggttattggccatgtcgactctggcaagtcgaccaccacaggacaccttatctacaagcttggaggcattgacaagcgtgtgatcgagaggttcgagaaggaggctgctgaaatgaacaagcggtccttcaagtacgcgtgggtgctcgacaagctcaaggctgagcgtgagagaggtatcaccattgatatcgctctgtggaagtttgagaccaccaagtactactgcacggtcattgatgcccctggacaccgtgacttcatcaagaacatgatcactggtacctcccaggctgactgtgctgtccttatcattgactccaccactggtggttttgaggctggtatctccaaggatggccagacccgtgaacatgctctccttgcgttcacccttggagtgaagcagatgatttgctgctgcaacaagatggatgcaaccactcccaaatactccaaggcacgttatgaagagattgtgaaggaagtctcatcctacctcaagaaagttgggtacaaccctgataagattgcctttgttcccatttctggttttgagggcgacaacatgattgagaggtccaccaaccttgactggtacaaaggcccaaccctgcttgaggctcttgaccagatcaccgagcccaagaggccttcagacaagcccctgcgtctgcccctccaggatgtgtacaagattggtggtattggaactgtaccggttggtcgtgtggagactggtgtcatcaagcctggtatggtagtcacctttggtccaactggcctgactaccgaggtgaagtctgttgagatgcaccacgaggcacttcaggaggctcttccgggtgacaatgttggcttcaacgtgaagaatgttgctgtcaaggacctcaagcgtgggtttgtggcctccaactccaaggatgaccctgccaaggaggctgccagcttcacctcccaggtcatcatcatgaaccaccctgggcagattggcaacggctatgcccctgtgctggactgccacacctcccacatcgctgtcaagtttgctgagctcattaccaagatcgacaggcgctctggcaaggagcttgagaaggagccaaagttcctgaagaacggtgatgctggtatggtgaagtctgttgagatgcaccacgaggcgcttcaggaggctcttccgggcgacaatgttggcttcaacgtgaagaacgttgctgtcaaggatctcaagcgtgggttcgtggcctccaactccaaggatgaccctgccaaggaggctgccagcttcacctcccaggtcatcatcatgaaccaccctgggcagattggcaacggctatgccccagtgctggactgccacacctcccacatcgccgtcaagtttgctgagctcattaccaagatcgacaggcgatctggcaaggagctcgagaaggagcccaagttcctgaagaacggtgatgctggtatggtgaagatgattcccaccaagcctatggtggtggagacattctccgcgtatcctcccctgggtaggtttgccgtccgcgacatgaggcagacggttgctgttggagtcatcaagagtgtggagaagaaggacccaaccggcgccaaggtgaccaaggcggccgccaagaagaaatgatgcgatcccgtgtctgcttttgcagtgcctggataacttgccactaaagttgtgtatgcggttgttgctgttattgcgtggactgtttgctgcggtgtctcctgtgtctgttgtctgttgtctttactatcagtaatgctcctgagacttgtatttctccttttggcgccgctaaatggaattttcgaacaatgattttcgtgttattattttacaaccttttcgaacaatatttacacgtctgatgtgttttgctgaga

SEQ ID NO: 62680 - DNA, 1878 bp, Zea Mays
agattgggctggtccggccactccgacacccttatataaagtcccgaaccctagaggccagcaccttcctccccaactcgccgtctgccttctgcgcctccatttcggcctctgtcccttgcaagttcaatctcacctccaaccatgggtaaagagaagtcccacatcaacattgtggttattggccatgtcgactctggcaagtcgaccaccacaggacaccttatctacaagcttggaggcattgacaagcgtgtgatcgagaggttcgagaaggaggctgctgaaatgaacaagcggtccttcaagtacgcgtgggtgctcgacaagctcaaggctgagcgtgagagaggtatcaccattgatatcgctctgtggaagtttgagaccaccaagtactactgcacggtcattgatgcccctggacaccgtgacttcatcaagaacatgatcactggtacctcccaggctgactgtgctgtccttatcattgactccaccactggtggttttgaggctggtatctccaaggatggccagacccgtgaacatgctctccttgcgttcacccttggagtgaagcagatgatttgctgctgcaacaagatggatgcaaccactcccaaatactccaaggcacgttatgaagagattgtgaaggaagtctcatcctacctcaagaaagttgggtacaaccctgataagattgcctttgttcccatttctggttttgagggcgacaacatgattgagaggtccaccaaccttgactggtacaaaggcccaaccctgcttgaggctcttgaccagatcaccgagcccaagaggccttcagacaagcccctgcgtctgcccctccaggatgtgtacaagattggtggtattggaactgtaccggttggtcgtgtggagactggtgtcatcaagcctggtatggtagtcacctttggtccaactggcctgactaccgaggtgaagtctgttgagatgcaccacgaggcacttcaggaggctcttccgggtgacaatgttggcttcaacgtgaagaatgttgctgtcaaggacctcaagcgtgggtttgtggcctccaactccaaggatgaccctgccaaggaggctgccagcttcacctcccaggtcatcatcatgaaccaccctgggcagattggcaacggctatgcccctgtgctggactgccacacctcccacatcgctgccagcttcacctcccaggtcatcatcatgaaccaccctgggcagattggcaacggctatgccccagtgctggactgccacacctcccacatcgccgtcaagtttgctgagctcattaccaagatcgacaggcgatctggcaaggagctcgagaaggagcccaagttcctgaagaacggtgatgctggtatggtgaagatgattcccaccaagcctatggtggtggagacattctccgcgtatcctcccctgggtaggtttgccgtccgcgacatgaggcagacggttgctgttggagtcatcaagagtgtggagaagaaggacccaaccggcgccaaggtgaccaaggcggccgccaagaagaaatgatgcgatcccgtgtctgcttttgcagtgcctggataacttgccactaaagttgtgtatgcggttgttgctgttattgcgtggactgtttgctgcggtgtctcctgtttgtttgggtagcgcagcgtcggcctcttcaggtgtctgttgtctgttgtctttactatcagtaatgctcctgagacttgtatttctccttttggcgccgctaaatggaattttcgaacaatgattttcgtgttattattttacaaccttttcgaacaatatttacacgtctgatgtgttttgctgaga

SEQ ID NO: 62681 - DNA, 1852 bp, Zea Mays
agattgggctggtccggccactccgacacccttatataaagtcccgaaccctagaggccagcaccttcctccccaactcgccgtctgccttctgcgcctccatttcggcctctgtcccttgcaagttcaatctcacctccaaccatgggtaaagagaagtcccacatcaacattgtggttattggccatgtcgactctggcaagtcgaccaccacaggacaccttatctacaagcttggaggcattgacaagcgtgtgatcgagaggttcgagaaggaggctgctgaaatgaacaagcggtccttcaagtacgcgtgggtgctcgacaagctcaaggctgagcgtgagagaggtatcaccattgatatcgctctgtggaagtttgagaccaccaagtactactgcacggtcattgatgcccctggacaccgtgacttcatcaagaacatgatcactggtacctcccaggctgactgtgctgtccttatcattgactccaccactggtggttttgaggctggtatctccaaggatggccagacccgtgaacatgctctccttgcgttcacccttggagtgaagcagatgatttgctgctgcaacaagatggatgcaaccactcccaaatactccaaggcacgttatgaagagattgtgaaggaagtctcatcctacctcaagaaagttgggtacaaccctgataagattgcctttgttcccatttctggttttgagggcgacaacatgattgagaggtccaccaaccttgactggtacaaaggcccaaccctgcttgaggctcttgaccagatcaccgagcccaagaggccttcagacaagcccctgcgtctgcccaaccctgcttgaggctcttgaccagatcaccgagcccaagaggccttcggacaagcccctgcgtctgcccctccaggatgtgtacaagattggtggtattggaactgtaccggttggtcgtgtggagactggtgtcatcaagcctggtatggtagtcacctttggtccaactggcctgactactgaggtgaagtctgttgagatgcaccacgaggcgcttcaggaggctcttccgggcgacaatgttggcttcaacgtgaagaacgttgctgtcaaggatctcaagcgtgggttcgtggcctccaactccaaggatgaccctgccaaggaggctgccagcttcacctcccaggtcatcatcatgaaccaccctgggcagattggcaacggctatgccccagtgctggactgccacacctcccacatcgccgtcaagtttgctgagctcattaccaagatcgacaggcgatctggcaaggagctcgagaaggagcccaagttcctgaagaacggtgatgctggtatggtgaagatgattcccaccaagcctatggtggtggagacattctccgcgtatcctcccctgggtaggtttgccgtccgcgacatgaggcagacggttgctgttggagtcatcaagagtgtggagaagaaggacccaaccggcgccaaggtgaccaaggcggccgccaagaagaaatgatgcgatcccgtgtctgcttttgcagtgcctggataacttgccactaaagttgtgtatgcggttgttgctgttattgcgtggactgtttgctgcggtgtctcctgtttgtttgggtagcgcagcgtcggcctcttcaggtgtctgttgtctgttgtctttactatcagtaatgctcctgagacttgtatttctccttttggcgccgctaaatggaattttcgaacaatgattttcgtgttattattttacaaccttttcgaacaatatttacacgtctgatgtgttttgctgaga

SEQ ID NO: 62682 - DNA, 1952 bp, Zea Mays
agattgggctggtccggccactccgacacccttatataaagtcccgaaccctagaggccagcaccttcctccccaactcgccgtctgccttctgcgcctccatttcggcctctgtcccttgcaagttcaatctcacctccaaccatgggtaaagagaagtcccacatcaacattgtggttattggccatgtcgactctggcaagtcgaccaccacaggacaccttatctacaagcttggaggcattgacaagcgtgtgatcgagaggttcgagaaggaggctgctgaaatgaacaagcggtccttcaagtacgcgtgggtgctcgacaagctcaaggctgagcgtgagagaggtatcaccattgatatcgctctgtggaagtttgagaccaccaagtactactgcacggtcattgatgcccctggacaccgtgacttcatcaagaacatgatcactggtacctcccaggctgactgtgctgtccttatcattgactccaccactggtggttttgaggctggtatctccaaggatggccagacccgtgaacatgctctccttgcgttcacccttggagtgaagcagatgatttgctgctgcaacaagatggatgcaaccactcccaaatactccaaggcacgttatgaagagattgtgaaggaagtctcatcctacctcaagaaagttgggtacaaccctgataagattgcctttgttcccatgctctccttgcgttcacccttggagtgaagcagatgatttgctgctgcaacaagatggatgcaaccactccgaaatactccaaggcacgttatgatgagattgtgaaggaagtctcatcctacctcaagaaagttgggtacaaccctgataagattgcctttgttcccatttctggttttgagggcgacaacatgattgagaggtccaccaaccttgactggtacaaaggcccaaccctgcttgaggctcttgaccagatcaccgagcccaagaggccttcggacaagcccctgcgtctgcccctccaggatgtgtacaagattggtggtattggaactgtaccggttggtcgtgtggagactggtgtcatcaagcctggtatggtagtcacctttggtccaactggcctgactactgaggtgaagtctgttgagatgcaccacgaggcgcttcaggaggctcttccgggcgacaatgttggcttcaacgtgaagaacgttgctgtcaaggatctcaagcgtgggttcgtggcctccaactccaaggatgaccctgccaaggaggctgccagcttcacctcccaggtcatcatcatgaaccaccctgggcagattggcaacggctatgccccagtgctggactgccacacctcccacatcgccgtcaagtttgctgagctcattaccaagatcgacaggcgatctggcaaggagctcgagaaggagcccaagttcctgaagaacggtgatgctggtatggtgaagatgattcccaccaagcctatggtggtggagacattctccgcgtatcctcccctgggtaggtttgccgtccgcgacatgaggcagacggttgctgttggagtcatcaagagtgtggagaagaaggacccaaccggcgccaaggtgaccaaggcggccgccaagaagaaatgatgcgatcccgtgtctgcttttgcagtgcctggataacttgccactaaagttgtgtatgcggttgttgctgttattgcgtggactgtttgctgcggtgtctcctgtttgtttgggtagcgcagcgtcggcctcttcaggtgtctgttgtctgttgtctttactatcagtaatgctcctgagacttgtatttctccttttggcgccgctaaatggaattttcgaacaatgattttcgtgttattattttacaaccttttcgaacaatatttacacgtctgatgtgttttgctgaga

SEQ ID NO: 62683 - DNA, 2102 bp, Zea Mays
agattgggctggtccggccactccgacacccttatataaagtcccgaaccctagaggccagcaccttcctccccaactcgccgtctgccttctgcgcctccatttcggcctctgtcccttgcaagttcaatctcacctccaaccatgggtaaagagaagtcccacatcaacattgtggttattggccatgtcgactctggcaagtcgaccaccacaggacaccttatctacaagcttggaggcattgacaagcgtgtgatcgagaggttcgagaaggaggctgctgaaatgaacaagcggtccttcaagtacgcgtgggtgctcgacaagctcaaggctgagcgtgagagaggtatcaccattgatatcgctctgtggaagtttgagaccaccaagtactactgcacggtcattgatgcccctggacaccgtgacttcatcaagaacatgatcactggtacctcccaggctgactgtgctgtccttatcattgactccaccactggtggttttgaggctggtatctccaaggatggccagacccgtgaacatgctctccttgcgttcacccttggagtgaagcagatgatttgctgctgcaacaagatggatgcaaccactcccaaatactccaaggcacgttatgaagagattgtgaaggaagtctcatcctacctcaagaaagttgggtacaaccctgataagattgcctttgttcccatttctggttttgagggcgacaacatgattgagaggtccaccaaccttgactggtacaaaggcccaaccctgcttgaggctcttgaccagatcaccgagcccaagaggccttcagacaagcccctgcgtctgcccctccaggatgtgtacaagattggtggtattggaactgtaccggttggtcgtgtggagactggtgtcatcaagcctggtatggtagtcacctttggtccaactggcctgactaccgaggtgaagtctgttgagatgcaccacgaggcacttcaggaggctcttccgggtgacaatgttggcttcaacgtgaagaatgttgctgtcaaggacctcaagcgtgggtttgtggcctccaactccaaggatgaccctgccaaggaggctgccagcttcacctcccaggtcatcatcatgaaccaccctgggcagattggcaacggctatgcccctgtgctggactgccacacctcccacatcgctgtcaagtttgctgagctcattaccaagatcgacaggcgctctggcaaggagcttgagaaggagccaaagttcctgaagaacggtgatgctggtatggtgaagatgatacccaccaagcccatggtggtggagacattctcagcgtatcctccccttggtaggtttgctgtccgtgacatgaggcagacggttgctgttggagttatcaagagtgtggagaagaaggacccaaccggcgccaaggtgaccaaggaggctgccagcttcacctcccaggtcatcatcatgaaccaccctgggcagattggcaacggctatgccccagtgctggactgccacacctcccacatcgccgtcaagtttgctgagctcattaccaagatcgacaggcgatctggcaaggagctcgagaaggagcccaagttcctgaagaacggtgatgctggtatggtgaagatgattcccaccaagcctatggtggtggagacattctccgcgtatcctcccctgggtaggtttgccgtccgcgacatgaggcagacggttgctgttggagtcatcaagagtgtggagaagaaggacccaaccggcgccaaggtgaccaaggcggccgccaagaagaaatgatgcgatcccgtgtctgcttttgcagtgcctggataacttgccactaaagttgtgtatgcggttgttgctgttattgcgtggactgtttgctgcggtgtctcctgtgtctgttgtctgttgtctttactatcagtaatgctcctgagacttgtatttctccttttggcgccgctaaatggaattttcgaacaatgattttcgtgttattattttacaaccttttcgaacaatatttacacgtctgatgtgttttgctgaga

SEQ ID NO: 62684 - DNA, 1849 bp, Zea Mays
attgagagcagataacaatgtcattcagtcatcccatattcccatatactatgtctcgctccgtttatgggccctgggccgccattcggaaatcggaagtcagattgggctggtccggccactccgacacccttatataaagtcccgaaccctagaggccagcaccttcctccccaactcgccgtctgccttctgcgcctccatttcggcctctgtcccttgcaagttcaatctcacctccaaccatgggtaaagagaagtcccacatcaacattgtggttattggccatgtcgactctggcaagtcgaccaccacaggacaccttatctacaagcttggaggcattgacaagcgtgtgatcgagaggttcgagaaggaggctgctgaaatgaacaagcggtccttcaagtacgcgtgggtgctcgacaagctcaaggctgagcgtgagagaggtatcaccattgatatcgctctgtggaagtttgagaccaccaagtactactgcacggtcattgatgcccctggacaccgtgacttcatcaagaacatgatcactggtacctcccaggctgactgtgctgtccttatcattgactccaccactggtggttttgaggctggtatctccaaggatggccagacccgtgaacatgctctccttgcgttcacccttggagtgaagcagatgatttgctgctgcaacaagatggatgcaaccactcccaaatactccaaggcacgttatgaagagattgtgaaggaagtctcatcctacctcaagaaagttgggtacaaccctgataagattgcctttgttcccatttctggttttgagggcgacaacatgattgagaggtccaccaaccttgactggtacaaaggcccaaccctgcttgaggctcttgaccagatcaccgagcccaagaggccttcggacaagcccctgcgtctgcccctccaggatgtgtacaagattggtggtattggaactgtaccggttggtcgtgtggagactggtgtcatcaagcctggtatggtagtcacctttggtccaactggcctgactactgaggtgaagtctgttgagatgcaccacgaggcgcttcaggaggctcttccgggcgacaatgttggcttcaacgtgaagaacgttgctgtcaaggatctcaagcgtgggttcgtggcctccaactccaaggatgaccctgccaaggaggctgccagcttcacctcccaggtcatcatcatgaaccaccctgggcagattggcaacggctatgccccagtgctggactgccacacctcccacatcgccgtcaagtttgctgagctcattaccaagatcgacaggcgatctggcaaggagctcgagaaggagcccaagttcctgaagaacggtgatgctggtatggtgaagatgattcccaccaagcctatggtggtggagacattctccgcgtatcctcccctgggtaggtttgccgtccgcgacatgaggcagacggttgctgttggagtcatcaagagtgtggagaagaaggacccaaccggcgccaaggtgaccaaggcggccgccaagaagaaatgatgcgatcccgtgtctgcttttgcagtgcctggataacttgccactaaagttgtgtatgcggttgttgctgttattgcgtggactgtttgctgcggtgtctcctgtgtctgttgtctgttgtctttactatcagtaatgctcctgagacttgtatttctccttttggcgccgctaaatggaattttcgaacaatgattttcgtgttattattttacaaccttttcgaacaatatttacacgtctgatgtgttttgctgaga

SEQ ID NO: 62685 - DNA, 2053 bp, Zea Mays
agattgggctggtccggccactccgacacccttatataaagtcccgaaccctagaggccagcaccttcctccccaactcgccgtctgccttctgcgcctccatttcggcctctgtcccttgcaagttcaatctcacctccaaccatgggtaaagagaagtcccacatcaacattgtggttattggccatgtcgactctggcaagtcgaccaccacaggacaccttatctacaagcttggaggcattgacaagcgtgtgatcgagaggttcgagaaggaggctgctgaaatgaacaagcggtccttcaagtacgcgtgggtgctcgacaagctcaaggctgagcgtgagagaggtatcaccattgatatcgctctgtggaagtttgagaccaccaagtactactgcacggtcattgatgcccctggacaccgtgacttcatcaagaacatgatcactggtacctcccaggctgactgtgctgtccttatcattgactccaccactggtggttttgaggctggtatctccaaggatggccagacccgtgaacatgctctccttgcgttcacccttggagtgaagcagatgatttgctgctgcaacaagatggatgcaaccactcccaaatactccaaggcacgttatgaagagattgtgaaggaagtctcatcctacctcaagaaagttgggtacaaccctgataagattgcctttgttcccatttctggttttgagggcgacaacatgattgagaggtccaccaaccttgactggtacaaaggcccaaccctgcttgaggctcttgaccagatcaccgagcccaagaggccttcagacaagcccctgcgtctgcccctccaactccaaggatgaccctgccaaggaggctgccagcttcacctcccaggtcatcatcatgaaccaccctgggcagattggcaacggctatgcccctgtgctggactgccacacctcccacatcgctgtcaagtttgctgagctcattaccaagatcgacaggcgctctggcaaggagcttgagaaggagccaaagttcctgaagaacggtgatgctggtatggtgaagatgatacccaccaagcccatggtggtggagacattctcagcgtatcctccccttggtaggtttgctgtccgtgacatgaggcagacggttgctgttggagttatcaagagtgtggagaagaaggacccaaccggcgccaaggtgaccaaggctgctgccaagaagaaatgatgcgatcctgcgcctgctttagcaatacctagttttcatcattacaagttttgtttgtggtcgttgctgttattgtgtgaactgttgagctctgttagcctgtgcacttttatctatttatttggtaccttgttgctatttcaccttctgcaatacaagaatgctgtaagagctatatgttaaccttttggcattgttaatttgattttaggaagtcgtatagttatcttcagtatcggcatgattggtttctgggttcgtgggcgcccggctcgcagcgcctggacggctagcgaagctctgtccttgcacggctcgcagcggccttgacgaatgacggctagctagctccgtcctcgcgtctctacgcatgcaggtctacgcggtgggcttggacgtttagcgaaactcctggtgtattcggttgagcaaccaattacgcagtatgtttctttttatccccttaaggctttgtttgggtactctagtattgacctcaatccacatgtattgatctggattggggtgtaaattagtttaagttacacctcaatacaagtggattgaggtcaatactagagtacccaaactaggcctaagagcatgttcggttataccaatccaagtcaaaaatgaataggaggggatttaaatccctccaattctcttctggattggtataaccaaacaagccaaagttttggaagttttgcagggtcgtttggattggtttctgaatcctttatctgctacaattttctctatccattatatctgtccactcttctttttttc

SEQ ID NO: 62686 - DNA, 2213 bp, Zea Mays
agattgggctggtccggccactccgacacccttatataaagtcccgaaccctagaggccagcaccttcctccccaactcgccgtctgccttctgcgcctccatttcggcctctgtcccttgcaagttcaatctcacctccaaccatgggtaaagagaagtcccacatcaacattgtggttattggccatgtcgactctggcaagtcgaccaccacaggacaccttatctacaagcttggaggcattgacaagcgtgtgatcgagaggttcgagaaggaggctgctgaaatgaacaagcggtccttcaagtacgcgtgggtgctcgacaagctcaaggctgagcgtgagagaggtatcaccattgatatcgctctgtggaagtttgagaccaccaagtactactgcacggtcattgatgcccctggacaccgtgacttcatcaagaacatgatcactggtacctcccaggctgactgtgctgtccttatcattgactccaccactggtggttttgaggctggtatctccaaggatggccagacccgtgaacatgctctccttgcgttcacccttggagtgaagcagatgatttgctgctgcaacaagatggatgcaaccactcccaaatactccaaggcacgttatgaagagattgtgaaggaagtctcatcctacctcaagaaagttgggtacaaccctgataagattgcctttgttcccatttctggttttgagggcgacaacatgattgagaggtccaccaaccttgactggtacaaaggcccaaccctgcttgaggctcttgaccagatcaccgagcccaagaggccttcagacaagcccctgcgtctgcccctccaggatgtgtacaagattggtggtattggaactgtaccggttggtcgtgtggagactggtgtcatcaagcctggtatggtagtcacctttggtccaactggcctgactaccgaggtgaagtctgttgagatgcaccacgaggcacttcaggaggctcttccgggtgacaatgttggcttcaacgtgaagaatgttgctgtcaaggacctcaagcgtgggtttgtggcctccaactccaaggatgaccctgccaaggaggctgccagcttcacctcccaggtcatcatcatgaaccaccctgggcagattggcaacggctatgcccctgtgctggactgccacacctcccacatcgctgtcaagtttgctgagctcattaccaagatcgacaggcgctctggcaaggagcttgagaaggagccaaagttcctgaagaacggtgatgctggtttgctgtccgtgacatgaggcagacggttgctgttggagttatcaagagtgtggagaagaaggacccaaccggcgccaaggtgaccaaggctgctgccaagaagaaatgatgcgatcctgcgcctgctttagcaatacctagttttcatcattacaagttttgtttgtggtcgttgctgttattgtgtgaactgttgagctctgttagcctgtgcacttttatctatttatttggtaccttgttgctatttcaccttctgcaatacaagaatgctgtaagagctatatgttaaccttttggcattgttaatttgattttaggaagtcgtatagttatcttcagtatcggcatgattggtttctgggttcgtgggcgcccggctcgcagcgcctggacggctagcgaagctctgtccttgcacggctcgcagcggccttgacgaatgacggctagctagctccgtcctcgcgtctctacgcatgcaggtctacgcggtgggcttggacgtttagcgaaactcctggtgtattcggttgagcaaccaattacgcagtatgtttctttttatccccttaaggctttgtttgggtactctagtattgacctcaatccacatgtattgatctggattggggtgtaaattagtttaagttacacctcaatacaagtggattgaggtcaatactagagtacccaaactaggcctaagagcatgttcggttataccaatccaagtcaaaaatgaataggaggggatttaaatccctccaattctcttctggattggtataaccaaacaagccaaagttttggaagttttgcagggtcgtttggattggtttctgaatcctttatctgctacaattttctctatccattatatctgtccactcttctttttttc

SEQ ID NO: 62687 - DNA, 1788 bp, Zea Mays
gagcaaataacattgtcattcagtcatcccatatactatgtctcgctccgtttatgggccctgggccgccattcggaagtcaagtattgggctggtccggccactccgacacccttatataaagtcccgaaccctagaggccagcaccttcctccccaactcgccgtctgccttgtgcgcctccatttcggcctctgtcccttgcaagttcaatctcacctccaaccatgggtaaagagaagtcccacatcaacattgtggttattggccatgtcgactctggcaagtcgaccaccacaggacaccttatctacaagcttggaggcattgacaagcgtgtgatcgagaggtttgagaaggaggctgctgaaatgaacaagcggtccttcaagtacgcgtgggtgctcgacaagctcaaggctgagcgtgagagaggtatcaccattgatattgctctgtggaagtttgagaccaccaagtactactgcacggtcattgatgcccctggacaccgtgacttcatcaagaacatgatcactggtacctcccaggctgactgtgctgtccttatcattgactccaccactggtggttttgaggctggtatctccaaggatggccagacccgtgaacatgctctccttgcgttcacccttggagtgaagcagatgatttgctgctgcaacaagatggatgcaaccactcccaaatactccaaggcacgttatgaagagattgtgaaggaagtctcatcctacctcaagaaagttgggtacaaccctgataagattgcctttgttcccatttctggttttgagggtgacaacatgattgagaggtccaccaaccttgactggtacaaaggcccaaccctgcttgaggctcttccgggtgacaatgttggcttcaacgtgaagaacgttgctgtcaaggatctcaagcgtgggtttgtggcctccaactccaaggatgaccctgccaaggaggctgccagcttcacctcccaggtcatcatcatgaaccaccctgggcagattggcaacggctatgccccagtgctggactgccacacctcccacattgctgtcaagtttgctgagctcattaccaagatcgacaggcggtctggcaaggagcttgagaaggagccaaagttcctgaagaacggtgatgctggtatggtgaagatgataccgaccaagcccatggtggtggagacgttctcagcgtatcctccccttggtaggtttgctgtccgtgacatgaggcagacggttgctgttggagttatcaagagtgtggagaagaaggacccgaccggcgccaaggtgaccaaggcggctgccaagaagaaatgatgcgatcctgcgcctgctttagcaatacctagttttcatcatcacaagttttgtttgtgatcgttgctgttatcgtgtgaactgttgagatctgttagcatgtgcacttttatctatttatttggtaccatcttgctatttcaccttttgcaatacaagaatgctctaagacctatatgttaaccttttggcattgttaaattgattttaggaagtcgtatagttagttttcttcagtatgtttctttccccccttagttttgtctgttttggaagttttgtagggtcgtttggattggtttctgaatcatttatctactacaattttctctatccattagcaagagaaactcttctttttttcttgtccagtagcgttttttaaatctcgtcctatacgttaatctcgtgctacatgtaaatacaatgt

SEQ ID NO: 62688 - DNA, 1972 bp, Zea Mays
gagcaaataacattgtcattcagtcatcccatatactatgtctcgctccgtttatgggccctgggccgccattcggaagtcaagtattgggctggtccggccactccgacacccttatataaagtcccgaaccctagaggccagcaccttcctccccaactcgccgtctgccttgtgcgcctccatttcggcctctgtcccttgcaagagaagtcccacatcaacattgtggttattggccatgtcgactctggcaagtcgaccaccacaggacaccttatctacaagcttggaggcattgacaagcgtgtgatcgagaggtttgagaaggaggctgctgaaatgaacaagcggtccttcaagtacgcgtgggtgctcgacaagctcaaggctgagcgtgagagaggtatcaccattgatattgctctgtggaagtttgagaccaccaagtactactgcacggtcattgatgcccctggacaccgtgacttcatcaagaacatgatcactggtacctcccaggctgactgtgctgtccttatcattgactccaccactggtggttttgaggctggtatctccaaggatggccagacccgtgaacatgctctccttgcgttcacccttggagtgaagcagatgatttgctgctgcaacaagatggatgcaaccactcccaaatactccaaggcacgttatgaagagattgtgaaggaagtctcatcctacctcaagaaagttgggtacaaccctgataagattgcctttgttcccatttctggttttgagggtgacaacatgattgagaggtccaccaaccttgactggtacaaaggcccaaccctgcttgaggctcttgaccagatcaccgagcccaagaggccttcagacaagcccctgcgtctgcccctccaggatgtgtacaagattggtggtattggaactgtaccggttggtcgtgtggagactggtgtcatcaagcctggtatggttgtcacctttggtccaactggcctgactaccgaggtgaagtctgttgagatgcaccacgaggcgcttcaggaggctcttccgggtgacaatgttggcttcaacgtgaagaacgttgctgtcaaggatctcaagcgtgggtttgtggcctccaactccaaggatgaccctgccaaggaggctgccagcttcacctcccaggtcatcatcatgaaccaccctgggcagattggcaacggctatgccccagtgctggactgccacacctcccacattgctgtcaagtttgctgagctcattaccaagatcgacaggcggtctggcaaggagcttgagaaggagccaaagttcctgaagaacggtgatgctggtatggtgaagatgataccgaccaagcccatggtggtggagacgttctcagcgtatcctccccttggtaggtttgctgtccgtgacatgaggcagacggttgctgttggagttatcaagagtgtggagaagaaggacccgaccggcgccaaggtgaccaaggcggctgccaagaagaaatgatgcgatcctgcgcctgctttagcaatacctagttttcatcatcacaagttttgtttgtgatcgttgctgttatcgtgtgaactgttgagatctgttagcatgtgcacttttatctatttatttggtaccatcttgctatttcaccttttgcaatacaagaatgctctaagacctatatgttaaccttttggcattgttaaattgattttaggaagtcgtatagttagttttcttcagtatgtttctttccccccttagttttgtctgttttggaagttttgtagggtcgtttggattggtttctgaatcatttatctactacaattttctctatccattagcaagagaaactcttctttttttcttgtccagtagcgttttttaaatctcgtcctatacgttaatctcgtgctacatgtaaatacaatgt

SEQ ID NO: 62689 - DNA, 1764 bp, Zea Mays
gagcaaataacattgtcattcagtcatcccatatactatgtctcgctccgtttatgggccctgggccgccattcggaagtcaagtattgggctggtccggccactccgacacccttatataaagtcccgaaccctagaggccagcaccttcctccccaactcgccgtctgccttgtgcgcctccatttcggcctctgtcccttgcaagttcaatctcacctccaaccatgggtaaagagaagtcccacatcaacattgtggttattggccatgtcgactctggcaagtcgaccaccacaggacaccttatctacaagcttggaggcattgacaagcgtgtgatcgagaggtttgagaaggaggctgctgaaatgaacaagcggtccttcaagtacgcgtgggtgctcgacaagctcaaggctgagcgtgagagaggtatcaccattgatattgctctgtggaagtttgagaccaccaagtactactgcacggtcattgatgcccctggacaccgtgacttcatcaagaacatgatcactggtacctcccaggctgactgtgctgtccttatcattgactccaccactggtggttttgaggctggtatctccaaggatggccagacccgtgaacatgctctccttgcgttcacccttggagtgaagcagatgatttgctgctgcaacaagatggatgcaaccactcccaaatactccaaggcacgttatgaagagattgtgaaggaagtctcatcctacctcaagaaagttgggtacaaccctgataagattgcctttgttcccatttctggttttgagggtgacaacatgattgagaggtccaccaaccttgactggtacaaaggcccaaccctgcttgaggctcttgaccagatcaccgagcccaagaggccttcagacaagcccctgcgtctgcccctccaggatgaccctgccaaggaggctgccagcttcacctcccaggtcatcatcatgaaccaccctgggcagattggcaacggctatgccccagtgctggactgccacacctcccacattgctgtcaagtttgctgagctcattaccaagatcgacaggcggtctggcaaggagcttgagaaggagccaaagttcctgaagaacggtgatgctggtatggtgaagatgataccgaccaagcccatggtggtggagacgttctcagcgtatcctccccttggtaggtttgctgtccgtgacatgaggcagacggttgctgttggagttatcaagagtgtggagaagaaggacccgaccggcgccaaggtgaccaaggcggctgccaagaagaaatgatgcgatcctgcgcctgctttagcaatacctagttttcatcatcacaagttttgtttgtgatcgttgctgttatcgtgtgaactgttgagatctgttagcatgtgcacttttatctatttatttggtaccatcttgctatttcaccttttgcaatacaagaatgctctaagacctatatgttaaccttttggcattgttaaattgattttaggaagtcgtatagttagttttcttcagtatgtttctttccccccttagttttgtctgttttggaagttttgtagggtcgtttggattggtttctgaatcatttatctactacaattttctctatccattagcaagagaaactcttctttttttcttgtccagtagcgttttttaaatctcgtcctatacgttaatctcgtgctacatgtaaatacaatgt

SEQ ID NO: 62690 - DNA, 2126 bp, Zea Mays
gagcaaataacattgtcattcagtcatcccatatactatgtctcgctccgtttatgggccctgggccgccattcggaagtcaagtattgggctggtccggccactccgacacccttatataaagtcccgaaccctagaggccagcaccttcctccccaactcgccgtctgccttgtgcgcctccatttcggcctctgtcccttgcaaggtagctaatcctctgtcgctcgatctttgtccttgaggtgctcgatgagataggcagtggttcaaagctgtgctctgttgcctccccgtgcctgaagtgattcggtcttctgtttgcgattaattttcaatctcacctccaaccatgggtaaagagaagtcccacatcaacattgtggttattggccatgtcgactctggcaagtcgaccaccacaggacaccttatctacaagcttggaggcattgacaagcgtgtgatcgagaggtttgagaaggaggctgctgaaatgaacaagcggtccttcaagtacgcgtgggtgctcgacaagctcaaggctgagcgtgagagaggtatcaccattgatattgctctgtggaagtttgagaccaccaagtactactgcacggtcattgatgcccctggacaccgtgacttcatcaagaacatgatcactggtacctcccaggctgactgtgctgtccttatcattgactccaccactggtggttttgaggctggtatctccaaggatggccagacccgtgaacatgctctccttgcgttcacccttggagtgaagcagatgatttgctgctgcaacaagatggatgcaaccactcccaaatactccaaggcacgttatgaagagattgtgaaggaagtctcatcctacctcaagaaagttgggtacaaccctgataagattgcctttgttcccatttctggttttgagggtgacaacatgattgagaggtccaccaaccttgactggtacaaaggcccaaccctgcttgaggctcttgaccagatcaccgagcccaagaggccttcagacaagcccctgcgtctgcccctccaggatgtgtacaagattggtggtattggaactgtaccggttggtcgtgtggagactggtgtcatcaagcctggtatggttgtcacctttggtccaactggcctgactaccgaggtgaagtctgttgagatgcaccacgaggcgcttcaggaggctcttccgggtgacaatgttggcttcaacgtgaagaacgttgctgtcaaggatctcaagcgtgggtttgtggcctccaactccaaggatgaccctgccaaggaggctgccagcttcacctcccaggtcatcatcatgaaccaccctgggcagattggcaacggctatgccccagtgctggactgccacacctcccacattgctgtcaagtttgctgagctcattaccaagatcgacaggcggtctggcaaggagcttgagaaggagccaaagttcctgaagaacggtgatgctggtatggtgaagatgataccgaccaagcccatggtggtggagacgttctcagcgtatcctccccttggtaggtttgctgtccgtgacatgaggcagacggttgctgttggagttatcaagagtgtggagaagaaggacccgaccggcgccaaggtgaccaaggcggctgccaagaagaaatgatgcgatcctgcgcctgctttagcaatacctagttttcatcatcacaagttttgtttgtgatcgttgctgttatcgtgtgaactgttgagatctgttagcatgtgcacttttatctatttatttggtaccatcttgctatttcaccttttgcaatacaagaatgctctaagacctatatgttaaccttttggcattgttaaattgattttaggaagtcgtatagttagttttcttcagtatgtttctttccccccttagttttgtctgttttggaagttttgtagggtcgtttggattggtttctgaatcatttatctactacaattttctctatccattagcaagagaaactcttctttttttcttgtccagtagcgttttttaaatctcgtcctatacgttaatctcgtgctacatgtaaatacaatgt

SEQ ID NO: 62691 - DNA, 668 bp, Zea Mays
caaccatatactcctgatgattcggaacatatacttcaacacaagttctggaagatctctcatcacacacaaccagtcaggaatgtagtcttcaggaggaccaccaatccaatgtaccccatcaacgagccatctaccaacaacaagatgcggctatttcaccggacacggcgacatccacctgggagttgtattcatcaaaccccaccactcacccatgggttcaattttcagagcacaatcatgtaagattgaaaagtagggcagctgctagctctagatttaaagtaaatagctgaaccagacagaagcatacgttgggccctggcttgtctgtaatcaggaaactaagttttagttattgggctaagatccggaggaattgtaactgaaagatctcaggcaaacgtgagggctaacaaacttgggacagagaacagaagcagttagtgtggcgtcgcgctcgcccgcgggcctagcctccagcatccacaccacccgcgggacggcgtccgcgaccatgggcctgctgccgcaggccggccttgccgcgttgtcgcagaactccgcgagcgccgggcgacatcggcgcgggtggcggaccagtcgctgcccagcgcggcggccgcgtgcgtgaagaatggctgcgtgaagtctctagggttttt

SEQ ID NO: 62692 - DNA, 804 bp, Zea Mays
taatgtcccgaaccctagaggacagcgctttcctgtccgactcccagccgtcgtctgctgcggactccgcctccattttgctctgtttcttgcaagctcggccacaaacaggatcatcactgccaaggaccatgcctctgtccagatcaacattggccacttggatgcgaatggcctgtatgatggtcacttcacaacgtttgctctctctgggtttgtccgtgctcagggcgacgcagacagctccttggacaggctgtggcagaagaaggctgatatcaagcagtagattttacatctagtttaccaagaattggacactgccttagctatgttttgaattcatgtcactatatgcaatgttgtgatttcagctggtaccttaaatctgaagatttagtatctttgttgggttccttctgagtttgatgtgtggtgttcaattcaaccgtccagtctccagtggcaccgaaatatgctgttggtgtagtttcattcaaaaaacgtgccattcaattcaactgtccagtgccattcaatgaattactatgttttgaattactatgctgcttataggacacacatagcacaactaaagtaaacaagtgggctacaaatgatttatgtcatgatctgcatcttctcttcatacaaaaagtaaaaaaactatatatgatttgaggtgatttaagtattgttattttcctttattttctttgcttagctacaaatattgtaccttttgaagaaaaaaatgctacaacaaattgcatggttctgtttgtttaaaaaataaaataaaca

SEQ ID NO: 62693 - DNA, 885 bp, Zea Mays
taatgtcccgaaccctagaggacagcgctttcctgtccgactcccagccgtcgtctgctgcggactccgcctccattttgctctgtttcttgcaagttgctcttgcggtagttcccccaactgccaccatgcagaacgaggagggtaagactgtggacctctatgtccccaggaagtctcggccacaaacaggatcatcactgccaaggaccatgcctctgtccagatcaacattggccacttggatgcgaatggcctgtatgatggtcacttcacaacgtttgctctctctgggtttgtccgtgctcagggcgacgcagacagctccttggacaggctgtggcagaagaaggctgatatcaagcagtagattttacatctagtttaccaagaattggacactgccttagctatgttttgaattcatgtcactatatgcaatgttgtgatttcagctggtaccttaaatctgaagatttagtatctttgttgggttccttctgagtttgatgtgtggtgttcaattcaaccgtccagtctccagtggcaccgaaatatgctgttggtgtagtttcattcaaaaaacgtgccattcaattcaactgtccagtgccattcaatgaattactatgttttgaattactatgctgcttataggacacacatagcacaactaaagtaaacaagtgggctacaaatgatttatgtcatgatctgcatcttctcttcatacaaaaagtaaaaaaactatatatgatttgaggtgatttaagtattgttattttcctttattttctttgcttagctacaaatattgtaccttttgaagaaaaaaatgctacaacaaattgcatggttctgtttgtttaaaaaataaaataaaca

SEQ ID NO: 62694 - DNA, 452 bp, Zea Mays
cctcactgtgtgctgggctcagctggtcacctccatccacctcccaacaaactagcatgcacgcccatggaatccggccatgacagcccgcaacggagggccatgccgtatcgcatataagaccccctctcctcatccacctctccgcccatcaaatttttcgtgagctaccatcgccgagccatcgtacagaatagagagagggaaagagaggttggccgccccgctgactgctcggggcggcgccgtcggtggtccggagtcggaccagggagcttcaccaggttgcactgtggtgtttcggagcctcgtcgcgtgagggcgaatagtggggatccgacgatttctcaccggagatcagggaaacattgccggccgcccgccaccgtggccaagggagtctgcgctgcgattgccgaacgtgatatgttcccaagcttgagtgaaaccaa

SEQ ID NO: 62695 - DNA, 1784 bp, Zea Mays
agcgactgcacacgtcccgccggcgtacgtgtacgtgctgttccctcactggccgcccaatccactcatgcatgcccacgtacacccctgccgtggcgcgcccagatcctaatcctttcgccgttctgcacttctgctgcctataaatggcggcatcgaccgtcacctgcttcaccaccggcgagccacatcgagaacacgatcgagcacacaagcacgaagactcgtttaggagaaaccacaaaccaccaagccgtgcaagcatcatggagtacggtcagcaggggcagcgcggccacggcgccacgggccatgtcgaccagtacggcaacccagtcggcggcgtcgagcacggcaccggcggcatgaggcacggcacgggaaccaccggcggcatgggccagctgggtgagcacggcggcgctggcatgggtggcgggcagttccagcctgcgagggaggagcacaagaccggcggcatcctgcatcgctccggcagctccagctccagctcggacgacggcatgggcggaaggaggaagaagggaatcaaggagaagatcaaagagaagctgcccggaggccacaaggacgaccagcacgccacggcgacgaccggcggcgcctatgggcagcagggacacaccggcagcgcctacgggcagcagggacacaccggcggcgcctacgccaccggcaccgagggcaccggcgagaagaaagccgtactcttcagcgttccatagataataagataaacccatgaataagtgtccctaccctttgatcatgtgacagggacagggacagggacagtttcctgtacttgtggggtgaatttgtacgtgtgatacggtaacttggtccgtgtactgtttatgctgctacgttttccttcctaaaagtacgtatatatatacagcacttgcgagtggctttacttgtgtgcactgcctaaaagtgtcgatattacctccagcggtaaataaatgacccttgtaagaaacttacacagcatgtcttactaattaacagccgttattatgttcggcgcagtactcacactggaacttacgaacaagaattgctctatcaatcaccatctactttagatatatcttctgaaacttttttcaaatccaaaagttcagtatcttcctacaaattagtgaattaggaatccaaaagttcagtatcttcctacaaattagtgaattaggatacaaattagtgaattaggaggggttcttttgtgcagaaaagacattgggtatagtggagatgaatgggaagatagaaaaagacgaataagaaaagtttttttgattagacgcatgcaattggcgaaacattttattcaaacaaatgtagaaccagaatggatggttttgtgcttattaccggttcttcctcccgaattgagacccattgtttatagatctggggataaagtagtgacttcagatattaatgaactttataagagagttatccgtcggaacaacaaccttgcctatctattaaaaataagtgaattagcaccagcagatttagtaatgtgccaggaaaaattggtacaagaagccgtggatacacttctttcacatataaaaataccctatcctatccatttagaaatcctggttcaactccttgaataccggattcaagatgttccctctttacatttattgcgattctttctccactattattcgaattggaatagttttattacttcaatgaaatccatttttcttttgaaaaaagaaaataaaagacta

SEQ ID NO: 62696 - DNA, 1651 bp, Zea Mays
gcaccagcgactgcacacgtcccgccggcgtacgtgtacgtgctgttccctcactggccgcccaatccactcatgcatgcccacgtacacccctgccgtggcgcgcccagatcctaatcctttcgccgttctgcacttctgctgcctataaatggcggcatcgaccgtcacctgcttcaccaccggcgagccacatcgagaacacgatcgagcacacaagcacgaagactcgtttaggagaaaccacaaaccaccaagccgtgcaagcatcatggagtacggtcagcaggggcagcgcggccacggcgccacgggccatgtcgaccagtacggcaacccacacggcggcgctggcatgggtggcgggcagttccagcctgcgagggaggagcacaagaccggcggcatcctgcatcgctccggcagctccagctccagctcgtcggaggacgacggcatgggcggaaggaggaagaagggaatcaaggagaagatcaaagagaagctgcccggaggccacaaggacgaccagcacggacacaccggcagcgcctacgccaccggcaccgagggcaccggcgagaagaaagccgtactcttcagcgttccatagataataagataaacccatgaataagtgtccctaccctttgatcatgtgacagggacagggacagggacagtttcctgtacttgtggggtgaatttgtacgtgtgatacggtaacttggtccgtgtactgtttatgctgctacgttttccttcctaaaagtacgtatatatatacagcacttgcgagtggctttacttgtgtgcactgcctaaaagtgtcgatattacctccagcggtaaataaatgacccttgtaagaaacttacacagcatgtcttactaattaacagccgttattatgttcggcgcagtactcacactggaacttacgaacaagaattgctctatcaatcaccatctactttagatatatcttctgaaacttttttcaaatccaaaagttcagtatcttcctacaaattagtgaattaggaatccaaaagttcagtatcttcctacaaattagtgaattaggatacaaattagtgaattaggaggggttcttttgtgcagaaaagacattgggtatagtggagatgaatgggaagatagaaaaagacgaataagaaaagtttttttgattagacgcatgcaattggcgaaacattttattcaaacaaatgtagaaccagaatggatggttttgtgcttattaccggttcttcctcccgaattgagacccattgtttatagatctggggataaagtagtgacttcagatattaatgaactttataagagagttatccgtcggaacaacaaccttgcctatctattaaaaataagtgaattagcaccagcagatttagtaatgtgccaggaaaaattggtacaagaagccgtggatacacttctttcacatataaaaataccctatcctatccatttagaaatcctggttcaactccttgaataccggattcaagatgttccctctttacatttattgcgattctttctccactattattcgaattggaatagttttattacttcaatgaaatccatttttcttttgaaaaaagaaaataaaagacta

SEQ ID NO: 62697 - DNA, 400 bp, Zea Mays
tttgcagattcaccaccaaatccttgggagcgttctagagctgaaggagcatctggtcctgcacctttcaagcccccatctggtagaagcactagtgatgttgttgaagcttccggtaccgctaaacccgatgaaaatgttactgtgacagagagctgaagaatcaacttgaactcggtcaagaaactgctatccttgccacagacaagcaaaagtgtgattgaatgcagtccagtaacacaataatctcagttttaaaaaaacagccaactggtcattttgtcaaatactgtcgatgtattgattgttaatgttgtcaagttcagaatgtagtaaaattagcatattcactttccatgaagagagagataagtgtacttaacaatgaaatcttttacta

SEQ ID NO: 62698 - DNA, 1598 bp, Zea Mays
actttgttcatccatgggcataaattcacatttaagcacttgtgttggcactcaatcaccaaaatacttagaaatggcccaaaggcacatttccctttcagttgggcccgccgcgcgaccgcgccggggctctcgctggctcccgccgttgcgagacgggcggcctccgcgtcgggaggaggccacgggcgcgtcgtcgttcgctcaaccgacggcggctgtctgtggttccgcgacgagggcgcccatggtgaaagtcgcggcaagcggctctactgccactccactctgcggcggtgccagcgttgatgaccacctctcggcctactgctacttcttctctcggcctactgctacttcttctccagcatgggtctagtccatgtcgcgatacggggtttggatatttttgggctaggttccttcccaactctgcagtgtagcctctccgcagcgtggtctagctacgctcctttcccttggttctgatggcgtggctggctgttgccctttgaaggttgttcagcatgggtctggtgaatgaaggcatcgacatggaggagggaaacccggagatcggcatagcaattcttttgcatgacagttagttttattttattaatctgtgctagatcttcaaatacacacaatccaatcttgaatatttggttaaataagtatgctgcttgtaccataaactgtgtgcgacgcaaatttcagtaagtgcattttgctgatgtattgtggtagtagaccgaccttccttctgcagagtggaaccaaaggtatttgatgagttttttggcatgccacatagcagatttgaccgggaagcttgcattgcttgtgtggataacatcaatatggcatacggtgatgactttcctgaacttagtactttcaagtgtgtgacaaggaaggaaagtagcaagctggaaagcaagaaccaagataaattgtttgatgcatatatcctgcatggtccgcaatacaatctacaacacaccggattatatgcgaagtgatttgctgaaataatgacgcataactacgcttatatcgagaaggggagaaaggatcaaccgtcattgtctccgtcggcaacatcggccctgttgacagcccgagctctgtgtgccctcctccccacgcgtttgatggcatctgttttctcttctccctcgcgttgcaggtacgaacactcttagacatgtgtcttcttggtgttagggttttcttctatcctctcgcttcgtgcactccccccacaggcccacaccattcctactcattgacgagcaagacccatgtgttcccatcacccccgttcgaccgtcacccaaatgcagaaattgttttactgctgcagagcttagtgacgtggtccaacagcttactacatgatgacgatcggcaccgacaaagcttaagtgtgaagtgagacatgacatgcagcatctgattagaaatttcatatttagatatactcacgaatcactaagacagattatatgcttgttgaccttttttcagaaacagaaatgttccctgtaaggtaagtttagttgtttaatttcttaagttcaagcatcctttct

SEQ ID NO: 62699 - DNA, 1886 bp, Zea Mays
actttgttcatccatgggcataaattcacatttaagcacttgtgttggcactcaatcaccaaaatacttagaaatggcccaaaggcacatttccctttcagttgggcccgccgcgcgaccgcgccggggctctcgctggctcccgccgttgcgagacgggcggcctccgcgtcgggaggaggccacgggcgcgtcgtcgttcgctcaaccgacggcggctgtctgtggttccgcgacgagggcgcccatggtgaaagtcgcggcaagcggctctactgccactccactctgcggcggtgccagcgttgatgaccacctctcggcctactgctacttcttctctcggcctactgctacttcttctccagcatgggtctagtccatgtcgcgatacggggtttggatatttttgggctaggttccttcccaactctgcagtgtagcctctccgcagcgtggtctagctacgctcctttcccttggttctgatggcgtggctggctgttgccctttgaaggttgttcagcatgggtctggtgaatgaaggcatcgacatggaggagggaaacccggagatcggcatagcaattcttttgcatgacagttagttttattttattaatctgtgctagatcttcaaatacacacaatccaatcttgaatatttggttaaataagtatgctgcttgtaccataaactgtgtgcgacgcaaatttcagtaagtgcattttgctgatgtattgtggtagtagaccgaccttccttctgcagagtggaaccaaaggtatttgatgagttttttggcatgccacatagcagatttgaccgggaagcttgcattgcttgtgtggataacatcaatatggcatacggtgatgactttcctgaacttagtactttcaagtgtgtgacaaggaaggaaagtagcaagctggaaagcaagaaccaagataaattgtttgatgcatatatcctgcatggtccgcaatacaatctacaacacaccggattatatgcgaaggtcagatttttatcatctcagatttgttggtttcaatattttttggagtccttatggtttgccaacttcactaacgatggaattgattgaaatcctttctgggaaatgaatagccaataaagttctcatgggaagagggtaagcaatggccaatgttcagggattggatacatagttgcatttacatgtcaatgtcatcttcacatagtagatagaattgcacacaatttttaataatattggcactgtagatatggcctgtatttaacagtgttgctgacttcttagtgatttgctgaaataatgacgcataactacgcttatatcgagaaggggagaaaggatcaaccgtcattgtctccgtcggcaacatcggccctgttgacagcccgagctctgtgtgccctcctccccacgcgtttgatggcatctgttttctcttctccctcgcgttgcaggtacgaacactcttagacatgtgtcttcttggtgttagggttttcttctatcctctcgcttcgtgcactccccccacaggcccacaccattcctactcattgacgagcaagacccatgtgttcccatcacccccgttcgaccgtcacccaaatgcagaaattgttttactgctgcagagcttagtgacgtggtccaacagcttactacatgatgacgatcggcaccgacaaagcttaagtgtgaagtgagacatgacatgcagcatctgattagaaatttcatatttagatatactcacgaatcactaagacagattatatgcttgttgaccttttttcagaaacagaaatgttccctgtaaggtaagtttagttgtttaatttcttaagttcaagcatcctttct

SEQ ID NO: 62700 - DNA, 917 bp, Zea Mays
ctctaaccttcccgtctcctgctgccacctcccgcatccgtgaagaacgactgaaccagccgccacccgcccgtccgactccggctccggccacctgcctccgtccctccgccgagctgcccgtctgccttcgtccctccggcctaggcgagcagatctccacccccacccgccccgagccgagcagcagccagcagagccgcatcgccgccggggaacgctgagttgccggcccgtcgccctgagaagatctccatcccagcagcatagccgcagcgccgcctccccaaggcaaggcccgagcgccctacgccctgccacaggccccaggttgatgtctttcatgagactattgcctcaaaggctaccccaacttatcaggcaggtggagcaagatgttgagactgtaatccacgttctccagccaggtccaataggaattgtggagcacaaattcacagacacggagatcttagaggccagggctacagtgaaaagagcagtggataattggcgaagaaattggacccttgagaaaaatgttggcagataaatggaaataatataccccttgtgtcttctatcaacagtacttgaaataaataggatgctatggctggatgcagctgttgccattagttagatttgagcacgatctgcttatcgggagttatgttaactgttctaaatgatcagtctgcctctctttgtttcatggtttgaaacgttcatatttagagaatttctttttgttcattgccttgtcggcagccggctgtcatattgaatgtgatctttcttttgatgcttcaatactttaactgtagtatctgaagagatacttgaagatcactgacttcatgatggatacaacaccttgaccgttgtgttaacacctttgaggctgccatcctgag

SEQ ID NO: 62701 - DNA, 1023 bp, Zea Mays
ctactatccgcatatatttaacccgttttcatccctacccaataataacccaataataaatcaacaacgaacaaaaaaactctactccgtaacctttccgtctctaaccttcccgtctcctgctgccacctcccgcatccgtgaagaacgactgaaccagccgccacccgcccgtccgactccggctccggccacctgcctccgtccctccgccgagctgcccgtctgccttcgtccctccggcctaggcgagcagatctccacccccacccgccccgagccgagcagcagccagcagagccgcatcgccgccggggaacgctgagttgccggcccgtcgccctgagaagatctccatcccagcagcatagccgcagcgccgcctccccaaggcaaggcccgagcgccctacgccctgccacaggccccagattaggttgatgtctttcatgagactattgcctcaaaggctaccccaacttatcaggcaggtggagcaagatgttgagactgtaatccacgttctccagccaggtccaataggaattgtggagcacaaattcacagacacggagatcttagaggccagggctacagtgaaaagagcagtggataattggcgaagaaattggacccttgagaaaaatgttggcagataaatggaaataatataccccttgtgtcttctatcaacagtacttgaaataaataggatgctatggctggatgcagctgttgccattagttagatttgagcacgatctgcttatcgggagttatgttaactgttctaaatgatcagtctgcctctctttgtttcatggtttgaaacgttcatatttagagaatttctttttgttcattgccttgtcggcagccggctgtcatattgaatgtgatctttcttttgatgcttcaatactttaactgtagtatctgaagagatacttgaagatcactgacttcatgatggatacaacaccttgaccgttgtgttaacacctttgaggctgccatcctgag

SEQ ID NO: 62702 - DNA, 2789 bp, Zea Mays
cgcagcagcaccgcaatttggcgtcctagttgccatgtgggggagccgagccgaggtcgggtgggagtgggaggctgtcccctacaccagccccagtcgtcgccgcgcaccatcacagcctcctccatctatcccctccctctcgagtctcgcctgctgctgctcccttcttcttcttcctcctcctcctcttcttggtcttggagctggaccttcctcttcccctcgttgatcgttcgcggttgccgattcgccatcccctccaaatcaagacaagattgagtgggtcttgggcccctgtccctagctgcattgcgaattgaggcgccaatttgggagacgactgcattgatgaatgccggaggccacagcactcactgatttagggattcgatgtcacgggcacccggatgtcattgccgatcgcccttgtagtcggcattgccggtggcgccaccttgctcgcggtggcggccgtgctgctcgcgctctggtgcgctgcgcggatgagggcgcggcgtaaccgcaactccgacactggctcctccgacccctcgacgctagtggagtggggaaaaggggggcgcagctcgttggcaccggacctggagcatcaggttgcgaggcaattctcgctggaggacctggtgcaggccaccaagaacttcagcgacacgaacatcatcggcgcggggagcttcggattggtgtacatgggcctgcttctcgatggcactgttgtcgcgatcaagaggcgcgtgggggcagcgacgcaggtgtttgctgatgaggtaataatgtgaggtcaaaatatggttccaggggtgtcgctctgcattttgggattaattacacaaaaggctgaatggttcatctacactgtcacacttgcttaatttctgagttgcatttgctcttagtttctgagttgcatttgccacaatttttttggcatctgagacatgtggtaacagttttcatgtttttggcattttgtctgacttgactcgaagttctgggtgcattgtattatttggactcagcacttggctgtggttaatttgcatctatttaaggccgacagggaacacttttaccgagtgataagttgtgattcatgaagatctttctctgtcaaccattgttgttttctagtctaaaaatgccataaattagccaaggacaagtaatataaagcagttgttttagccaaggagtgtcacgccatcccatcccttgcaaaatgcaggttaggttgctttcagagattcgtcaccgaaacattgtaactctcattggttactgtcaagaagggggtctacaaatgctggtgtatgagtacctgcccaatggcagtgtctgtggccatctgtatgataacaggaaaggctctgcaacacggcttgagttcaaacaaaggctctcaatagctattggggcagctaaaggtttgaatcatctgcacagtcttgatcctcctttgatacacaaggacttcaagacaaacaatgtgctggttgatgaaaatttcattgcaaaggtggctgatgctggacttgttaggttaattagaggatctgacgatgccggcccatcgcgtgggttcagtaacagtgtttaccaagatccagaggtacagtcgatgactcagttctctgaaagcagtgatgtttacagctttggagtttttcttttggagctaattactggcagggaagcagcttccttgatacctacagagtccagagaatatttggcacactgggtaatttctactgacatgtagctgtaagttatctagaaaggaaagttatggagttctgcttaatctccagcaaaatatcattctggtgtttagtgtacctaactgtgaagtcaggccacacatttccaaaacttgaaaacagctagagcataaactgttttcatagttattaggagtgagaagtgtttgtcatgttgtaggatcacataaattcttattaggatatattattgaatactgaaagtccttgttgatgtttgataatggatacaactaattgtaccttagttgagacactttttaagaggaaaataacaatttgaaaaaagtgctgcaattctcgtgcataaggatatttcttttacgcgaaagggccactaccgtaaaggatatttcttttactcactgcttactgaaaaaacattttcttgtcacattgaatgatcgaaagatggaagcgcatttcagttcaaatgaactgattgacccaagattagccggcaacttcactgcagaaggtatgaaggagcttgttggtctggccttccaatgcttgaacccatcatcaagacgccgaccgaggatgaggcttgttgcgactgaactagaccggattctagagacggagatgtccatgacaacgttcatgggcgacggaaccaccattgtcacgctcgggagtcaattgttctcgtcgtgaagcgacgttgggattgatttcatgtctgctatttgatgacatgatgattgtgtgtgagagcctaacaacagctattgtttctgccatgctgttcaggctctgcattgttatgaaatgccatgtatggtcatttttaagcttgtcatggttgataggtaggagtgagaagaaatagagctgtatgtatgtctcttttttcttctttttgttgcatgggagaagaattgtatgtaaatcttttagattgttaactatccttcaatgtatttgcagattgttcttcctttcggtgttttaatttctgaaagggctaacttgtgctaa

SEQ ID NO: 62703 - DNA, 1865 bp, Zea Mays
cgcagcagcaccgcaatttggcgtcctagttgccatgtgggggagccgagccgaggtcgggtgggagtgggaggctgtcccctacaccagccccagtcgtcgccgcgcaccatcacagcctcctccatctatcccctccctctcgagtctcgcctgctgctgctcccttcttcttcttcctcctcctcctcttcttggtcttggagctggaccttcctcttcccctcgttgatcgttcgcggttgccgattcgccatcccctccaaatcaagacaagattgagtgggtcttgggcccctgtccctagctgcattgcgaattgaggcgccaatttgggagacgactgcattgatgaatgccggaggccacagcactcactgatttagggattcgatgtcacgggcacccggatgtcattgccgatcgcccttgtagtcggcattgccggtggcgccaccttgctcgcggtggcggccgtgctgctcgcgctctggtgcgctgcgcggatgagggcgcggcgtaaccgcaactccgacactggctcctccgacccctcgacgctaggggggcgcagctcgttggcaccggacctggagcatcaggttgcgaggcaattctcgctggaggacctggtgcaggccaccaagaacttcagcgacacgaacatcatcggcgcggggagcttcggattggtgtacatgggcctgcttctcgatggcactgttgtcgcgatcaagaggcgcgtgggggcagcgacgcaggtgtttgctgatgaggttaggttgctttcagagattcgtcaccgaaacattgtaactctcattggttactgtcaagaagggggtctacaaatgctggtgtatgagtacctgcccaatggcagtgtctgtggccatctgtatgataacaggaaaggctctgcaacacggcttgagttcaaacaaaggctctcaatagctattggggcagctaaaggtttgaatcatctgcacagtcttgatcctcctttgatacacaaggacttcaagacaaacaatgtgctggttgatgaaaatttcattgcaaaggtggctgatgctggacttgttaggttaattagaggatctgacgatgccggcccatcgcgtgggttcagtaacagtgtttaccaagatccagaggtacagtcgatgactcagttctctgaaagcagtgatgtttacagctttggagtttttcttttggagctaattactggcagggaagcagcttccttgatacctacagagtccagagaatatttggcacactggatggaagcgcatttcagttcaaatgaactgattgacccaagattagccggcaacttcactgcagaaggtatgaaggagcttgttggtctggccttccaatgcttgaacccatcatcaagacgccgaccgaggatgaggcttgttgcgactgaactagaccggattctagagacggagatgtccatgacaacgttcatgggcgacggaaccaccattgtcacgctcgggagtcaattgttctcgtcgtgaagcgacgttgggattgatttcatgtctgctatttgatgacatgatgattgtgtgtgagagcctaacaacagctattgtttctgccatgctgttcaggctctgcattgttatgaaatgccatgtatggtcatttttaagcttgtcatggttgataggtaggagtgagaagaaatagagctgtatgtatgtctcttttttcttctttttgttgcatgggagaagaattgtatgtaaatcttttagattgttaactatccttcaatgtatttgcagattgttcttcctttcggtgttttaatttctgaaagggctaacttgtgctaa

SEQ ID NO: 62704 - DNA, 2216 bp, Zea Mays
cgcagcagcaccgcaatttggcgtcctagttgccatgtgggggagccgagccgaggtcgggtgggagtgggaggctgtcccctacaccagccccagtcgtcgccgcgcaccatcacagcctcctccatctatcccctccctctcgagtctcgcctgctgctgctcccttcttcttcttcctcctcctcctcttcttggtcttggagctggaccttcctcttcccctcgttgatcgttcgcggttgccgattcgccatcccctccaaatcaagacaagattgagtgggtcttgggcccctgtccctagctgcattgcgaattgaggcgccaatttgggagacgactgcattgatgaatgccggaggccacagcactcactgatttagggattcgatgtcacgggcacccggatgtcattgccgatcgcccttgtagtcggcattgccggtggcgccaccttgctcgcggtggcggccgtgctgctcgcgctctggtgcgctgcgcggatgagggcgcggcgtaaccgcaactccgacactggctcctccgacccctcgacgctagtggagtggggaaaaggggggcgcagctcgttggcaccggacctggagcatcaggttgcgaggcaattctcgctggaggacctggtgcaggccaccaagaacttcagcgacacgaacatcatcggcgcggggagcttcggattggtgtacatgggcctgcttctcgatggcactgttgtcgcgatcaagaggcgcgtgggggcagcgacgcaggtgtttgctgatgaggttaggttgctttcagagattcgtcaccgaaacattgtaactctcattggttactgtcaagaagggggtctacaaatgctggtgtatgagtacctgcccaatggcagtgtctgtggccatctgtatgataacaggaaaggctctgcaacacggcttgagttcaaacaaaggctctcaatagctattggggcagctaaaggttaattagaggatctgacgatgccggcccatcgcgtgggttcagtaacagtgtttaccaagatccagaggtacagtcgatgactcagttctctgaaagcagtgatgtttacagctttggagtttttcttttggagctaattactggcagggaagcagcttccttgatacctacagagtccagagaatatttggcacactgggtaatttctactgacatgtagctgtaagttatctagaaaggaaagttatggagttctgcttaatctccagcaaaatatcattctggtgtttagtgtacctaactgtgaagtcaggccacacatttccaaaacttgaaaacagctagagcataaactgttttcatagttattaggagtgagaagtgtttgtcatgttgtaggatcacataaattcttattaggatatattattgaatactgaaagtccttgttgatgtttgataatggatacaactaattgtaccttagttgagacactttttaagaggaaaataacaatttgaaaaaagtgctgcaattctcgtgcataaggatatttcttttacgcgaaagggccactaccgtaaaggatatttcttttactcactgcttactgaaaaaacattttcttgtcacattgaatgatcgaaagatggaagcgcatttcagttcaaatgaactgattgacccaagattagccggcaacttcactgcagaaggtatgaaggagcttgttggtctggccttccaatgcttgaacccatcatcaagacgccgaccgaggatgaggcttgttgcgactgaactagaccggattctagagacggagatgtccatgacaacgttcatgggcgacggaaccaccattgtcacgctcgggagtcaattgttctcgtcgtgaagcgacgttgggattgatttcatgtctgctatttgatgacatgatgattgtgtgtgagagcctaacaacagctattgtttctgccatgctgttcaggctctgcattgttatgaaatgccatgtatggtcatttttaagcttgtcatggttgataggtaggagtgagaagaaatagagctgtatgtatgtctcttttttcttctttttgttgcatgggagaagaattgtatgtaaatcttttagattgttaactatccttcaatgtatttgcagattgttcttcctttcggtgttttaatttctgaaagggctaacttgtgctaa

SEQ ID NO: 62705 - DNA, 2207 bp, Zea Mays
cgcagcagcaccgcaatttggcgtcctagttgccatgtgggggagccgagccgaggtcgggtgggagtgggaggctgtcccctacaccagccccagtcgtcgccgcgcaccatcacagcctcctccatctatcccctccctctcgagtctcgcctgctgctgctcccttcttcttcttcctcctcctcctcttcttggtcttggagctggaccttcctcttcccctcgttgatcgttcgcggttgccgattcgccatcccctccaaatcaagacaagattgagtgggtcttgggcccctgtccctagctgcattgcgaattgaggcgccaatttgggagacgactgcattgatgaatgccggaggccacagcactcactgatttagggattcgatgtcacgggcacccggatgtcattgccgatcgcccttgtagtcggcattgccggtggcgccaccttgctcgcggtggcggccgtgctgctcgcgctctggtgcgctgcgcggatgagggcgcggcgtaaccgcaactccgacactggctcctccgacccctcgacgctagtggagtggggaaaaggggggcgcagctcgttggcaccggacctggagcatcaggttgcgaggcaattctcgctggaggacctggtgcaggccaccaagaacttcagcgacacgaacatcatcggcgcggggagcttcggattggtgtacatgggcctgcttctcgatggcactgttgtcgcgatcaagaggcgcgtgggggcagcgacgcaggtgtttgctgatgaggttaggttgctttcagagattcgtcaccgaaacattgtaactctcattggttactgtcaagaagggggtctacaaatgctggtgtatgagtacctgcccaatggcagtgtctgtggccatctgtatgataacaggaaaggctctgcaacacggcttgagttcaaacaaaggctctcaatagctattggggcagctaaagaggatctgacgatgccggcccatcgcgtgggttcagtaacagtgtttaccaagatccagaggtacagtcgatgactcagttctctgaaagcagtgatgtttacagctttggagtttttcttttggagctaattactggcagggaagcagcttccttgatacctacagagtccagagaatatttggcacactgggtaatttctactgacatgtagctgtaagttatctagaaaggaaagttatggagttctgcttaatctccagcaaaatatcattctggtgtttagtgtacctaactgtgaagtcaggccacacatttccaaaacttgaaaacagctagagcataaactgttttcatagttattaggagtgagaagtgtttgtcatgttgtaggatcacataaattcttattaggatatattattgaatactgaaagtccttgttgatgtttgataatggatacaactaattgtaccttagttgagacactttttaagaggaaaataacaatttgaaaaaagtgctgcaattctcgtgcataaggatatttcttttacgcgaaagggccactaccgtaaaggatatttcttttactcactgcttactgaaaaaacattttcttgtcacattgaatgatcgaaagatggaagcgcatttcagttcaaatgaactgattgacccaagattagccggcaacttcactgcagaaggtatgaaggagcttgttggtctggccttccaatgcttgaacccatcatcaagacgccgaccgaggatgaggcttgttgcgactgaactagaccggattctagagacggagatgtccatgacaacgttcatgggcgacggaaccaccattgtcacgctcgggagtcaattgttctcgtcgtgaagcgacgttgggattgatttcatgtctgctatttgatgacatgatgattgtgtgtgagagcctaacaacagctattgtttctgccatgctgttcaggctctgcattgttatgaaatgccatgtatggtcatttttaagcttgtcatggttgataggtaggagtgagaagaaatagagctgtatgtatgtctcttttttcttctttttgttgcatgggagaagaattgtatgtaaatcttttagattgttaactatccttcaatgtatttgcagattgttcttcctttcggtgttttaatttctgaaagggctaacttgtgctaa

SEQ ID NO: 62706 - DNA, 1921 bp, Zea Mays
cgcagcagcaccgcaatttggcgtcctagttgccatgtgggggagccgagccgaggtcgggtgggagtgggaggctgtcccctacaccagccccagtcgtcgccgcgcaccatcacagcctcctccatctatcccctccctctcgagtctcgcctgctgctgctcccttcttcttcttcctcctcctcctcttcttggtcttggagctggaccttcctcttcccctcgttgatcgttcgcggttgccgattcgccatcccctccaaatcaagacaagattgagtgggtcttgggcccctgtccctagctgcattgcgaattgaggcgccaatttgggagacgactgcattgatgaatgccggaggccacagcactcactgatttagggattcgatgtcacgggcacccggatgtcattgccgatcgcccttgtagtcggcattgccggtggcgccaccttgctcgcggtggcggccgtgctgctcgcgctctggtgcgctgcgcggatgagggcgcggcgtaaccgcaactccgacactggctcctccgacccctcgacgctagtggagtggggaaaaggggggcgcagctcgttggcaccggacctggagcatcaggttgcgaggcaattctcgctggaggacctggtgcaggccaccaagaacttcagcgacacgaacatcatcggcgcggggagcttcggattggtgtacatgggcctgcttctcgatggcactgttgtcgcgatcaagaggcgcgtgggggcagcgacgcaggtgtttgctgatgaggttaggttgctttcagagattcgtcaccgaaacattgtaactctcattggttactgtcaagaagggggtctacaaatgctggtgtatgagtacctgcccaatggcagtgtctgtggccatctgtatgcttcatacggtccaccagataacaggaaaggctctgcaacacggcttgagttcaaacaaaggctctcaatagctattggggcagctaaaggtttgaatcatctgcacagtcttgatcctcctttgatacacaaggacttcaagacaaacaatgtgctggttgatgaaaatttcattgcaaaggtggctgatgctggacttgttaggttaattagaggatctgacgatgccggcccatcgcgtgggttcagtaacagtgtttaccaagatccagaggtacagtcgatgactcagttctctgaaagcagtgatgtttacagctttggagtttttcttttggagctaattactggcagggaagcagcttccttgatacctacagagtccagagaatatttggcacactgggtaatttctactgacatgtagctatggaagcgcatttcagttcaaatgaactgattgacccaagattagccggcaacttcactgcagaaggtatgaaggagcttgttggtctggccttccaatgcttgaacccatcatcaagacgccgaccgaggatgaggcttgttgcgactgaactagaccggattctagagacggagatgtccatgacaacgttcatgggcgacggaaccaccattgtcacgctcgggagtcaattgttctcgtcgtgaagcgacgttgggattgatttcatgtctgctatttgatgacatgatgattgtgtgtgagagcctaacaacagctattgtttctgccatgctgttcaggctctgcattgttatgaaatgccatgtatggtcatttttaagcttgtcatggttgataggtaggagtgagaagaaatagagctgtatgtatgtctcttttttcttctttttgttgcatgggagaagaattgtatgtaaatcttttagattgttaactatccttcaatgtatttgcagattgttcttcctttcggtgttttaatttctgaaagggctaacttgtgctaa

SEQ ID NO: 62707 - DNA, 2439 bp, Zea Mays
cgtagcggaggccgcaggggccatggcgcaacgcaagaatgggaatggcacttgtcactggcactgggcatggcgtggcgcaagcggccgcattgacaaaacgcagcagcaccgcaatttggcgtcctagttgccatgtgggggagccgagccgaggtcgggtgggagtgggaggctgtcccctacaccagccccagtcgtcgccgcgcaccatcacagcctcctccatctatcccctccctctcgagtctcgcctgctgctgctcccttcttcttcttcctcctcctcctcttcttggtcttggagctggaccttcctcttcccctcgttgatcgttcgcggttgccgattcgccatcccctccaaatcaagacaagattgagtgggtcttgggcccctgtccctagctgcattgcgaattgaggcgccaatttgggagacgactgcattgatgaatgccggaggccacagcactcactgatttagggattcgatgtcacgggcacccggatgtcattgccgatcgcccttgtagtcggcattgccggtggcgccaccttgctcgcggtggcggccgtgctgctcgcgctctggtgcgctgcgcggatgagggcgcggcgtaaccgcaactccgacactggctcctccgacccctcgacgctagtggagtggggaaaaggggggcgcagctcgttggcaccggacctggagcatcaggttgcgaggcaattctcgctggaggacctggtgcaggccaccaagaacttcagcgacacgaacatcatcggcgcggggagcttcggattggtgtacatgggcctgcttctcgatggcactgttgtcgcgatcaagaggcgcgtgggggcagcgacgcaggtgtttgctgatgaggtaataatgtgaggtcaaaatatggttccaggggtgtcgctctgcattttgggattaattacacaaaaggctgaatggttcatctacactgtcacacttgcttaatttctgagttgcatttgctcttagtttctgagttgcatttgccacaatttttttggcatctgagacatgtggtaacagttttcatgtttttggcattttgtctgacttgactcgaagttctgggtgcattgtattatttggactcagcacttggctgtggttaatttgcatctatttaaggccgacagggaacacttttaccgagtgataagttgtgattcatgaagatctttctctgtcaaccattgttgttttctagtctaaaaatgccataaattagccaaggacaagtaatataaagcagttgttttagccaaggagtgtcacgccatcccatcccttgcaaaatgcaggttaggttgctttcagagattcgtcaccgaaacattgtaactctcattggttactgtcaagaagggggtctacaaatgctggtgtatgagtacctgcccaatggcagtgtctgtggccatctgtatgataacaggaaaggctctgcaacacggcttgagttcaaacaaaggctctcaatagctattggggcagctaaaggtttgaatcatctgcacagtcttgatcctcctttgatacacaaggacttcaagacaaacaatgtgctggttgatgaaaatttcattgcaaaggtggctgatgctggacttgttaggttaattagaggatctgacgatgccggcccatcgcgtgggttcagtaacagtgtttaccaagatccagaggtacagtcgatgactcagttctctgaaagcagtgatgtttacagctttggagtttttcttttggagctaattactggcagggaagcagcttccttgatacctacagagtccagagaatatttggcacactggatggaagcgcatttcagttcaaatgaactgattgacccaagattagccggcaacttcactgcagaaggtatgaaggagcttgttggtctggccttccaatgcttgaacccatcatcaagacgccgaccgaggatgaggcttgttgcgactgaactagaccggattctagagacggagatgtccatgacaacgttcatgggcgacggaaccaccattgtcacgctcgggagtcaattgttctcgtcgtgaagcgacgttgggattgatttcatgtctgctatttgatgacatgatgattgtgtgtgagagcctaacaacagctattgtttctgccatgctgttcaggctctgcattgttatgaaatgccatgtatggtcatttttaagcttgtcatggttgataggtaggagtgagaagaaatagagctgtatgtatgtctcttttttcttctttttgttgcatgggagaagaattgtatgtaaatcttttagattgttaactatccttcaatgtatttgcagattgttcttcctttcggtgttttaatttctgaaagggctaacttgtgctaa

SEQ ID NO: 62708 - DNA, 1875 bp, Zea Mays
gaactcttttattagctgcttgatgcgatagagactggatcaagttttaagcttcacctccagccatgggtaaggagaagtcccacatcaacattgtggttattggccatgtcgactctggcaagtcaaccaccaccggccacctgatctacaagcttggaggcattgacaagcgtgtgattgagaggttcgagaaggaagccgctgaaatgaacaaacggtccttcaagtacgcttgggtgcttgacaagctcaaggctgagcgtgagagaggtatcaccattgatatcgctctgtggaagtttgagaccaccaagtactactgcactgtcattgatgcccctggacatcgcgacttcatcaagaacatgatcacgggtacctcccaggctgactgtgctgtcctgatcattgactccaccactggtggttttgaggccggtatctctaaggatggccagacccgtgagcatgctctccttgctttcacccttggggtcaagcagatgatttgctgctgcaacaagatggatgcgaccactcccaagtattccaaggcccgttacgatgagattgtgaaggaagtttcatcctacctcaagaaggttggatacaaccctgacaagattgcctttgtccctatctctggttttgagggtgacaacatgattgagaggtccaccaaccttgactggtacaagggtccaaccctgcttgaggctcttgaccagatcaccgagcccaagaggccttcagacaagcccctgcgtctgcccctccaggatgtgtacaagattggtggtattggaactgttccggttggtcgtgtggagactggtgtcatcaagcctggaatggttgtcaccttcggtccaactggcctgaccactgaggtgaagtctgttgagatgcaccacgaggctctccaggaggcccttcctggtgacaacgttggcttcaatgtgaagaacgttgctgtgaaggatctcaaacgtgggtacgtggcctccaactctaaggatgaccctgccaaggaggctgctagcttcacctcccaagtcatcatcatgaaccaccctgggcagattggcaatggctatgccccagtgctggactgccacacctcccacattgctgtcaagtttgctgagctcataaccaagatcgataggcggtctggcaaggagcttgagaaggagcccaagttcctgaagaatggtgatgccggtatggtgaagatgattcccactaagcccatggtggttgagaccttctctcagtatcctcctctgggtcgttttgctgtccgtgacatgaggcagacggttgctgttggagtcatcaagagcgtggagaagaaggacccaactggtgccaaggtgaccaaggctgcaataaagaagaaatgatgcgtcctcccatgtgccctcgtttattttgtacttgtgcccgtatacttcgatctgttaaaatctattggttgtgtgccctgtgtctgttgtttgggtatctatactgttattttgagacatgttgacttgcatggtcatctggattgggttcgcatttctgagtcatttgtcttgacatgaaaatcttgctttttttcttgatcttaaaatctaggttgtctttgttgcggggttgattctaatattaaaggggacatttgggattttgcccatgacatcgttccctcgctaaaaatttaatttgtgggttcgtctatgcctatgaatcgagggtctgggcaaaattctgaagctcagtgtctttgaaggaatatgtgctcttgaattgcaagttctgtatatgacatgataaatctgattgttttcttgtagcgaaaacagcaattctgccagtggattagca

SEQ ID NO: 62709 - DNA, 1413 bp, Zea Mays
agtcgccgtcgtctgctccgggctgctgttctgcgcctccacaaggctttggcctctgttgtaagatggatgcgaccactcccaagtattccaaggcccgttacgatgagattgtgaaggaagtttcatcctacctcaagaaggttggatacaaccctgacaagattgcctttgtccctatctctggttttgagggtgacaacatgattgagaggtccaccaaccttgactggtacaagggtccaaccctgcttgaggctcttgaccagatcaccgagcccaagaggccttcagacaagcccctgcgtctgcccctccaggatgtgtacaagattggtggtattggaactgttccggttggtcgtgtggagactggtgtcatcaagcctggaatggttgtcaccttcggtccaactggcctgaccactgaggtgaagtctgttgagatgcaccacgaggctctccaggaggcccttcctggtgacaacgttggcttcaatgtgaagaacgttgctgtgaaggatctcaaacgtgggtacgtggcctccaactctaaggatgaccctgccaaggaggctgctagcttcacctcccaagtcatcatcatgaaccaccctgggcagattggcaatggctatgccccagtgctggactgccacacctcccacattgctgtcaagtttgctgagctcataaccaagatcgataggcggtctggcaaggagcttgagaaggagcccaagttcctgaagaatggtgatgccggtatggtgaagatgattcccactaagcccatggtggttgagaccttctctcagtatcctcctctgggtcgttttgctgtccgtgacatgaggcagacggttgctgttggagtcatcaagagcgtggagaagaaggacccaactggtgccaaggtgaccaaggctgcaataaagaagaaatgatgcgtcctcccatgtgccctcgtttattttgtacttgtgcccgtatacttcgatctgttaaaatctattggttgtgtgccctgtgtctgttgtttgggtatctatactgttattttgagacatgttgacttgcatggtcatctggattgggttcgcatttctgagtcatttgtcttgacatgaaaatcttgctttttttcttgatcttaaaatctaggttgtctttgttgcggggttgattctaatattaaaggggacatttgggattttgcccatgacatcgttccctcgctaaaaatttaatttgtgggttcgtctatgcctatgaatcgagggtctgggcaaaattctgaagctcagtgtctttgaaggaatatgtgctcttgaattgcaagttctgtatatgacatgataaatctgattgttttcttgtagcgaaaacagcaattctgccagtggattagca

SEQ ID NO: 62710 - DNA, 1990 bp, Zea Mays
agtcgccgtcgtctgctccgggctgctgttctgcgcctccacaaggctttggcctctgttgtaagatctgctttatttccaccctactaatgtgtaccaggccttttctaagctggtcacagtggttgcaacttcagatcgatatctaagctgatcactttttaagcttcacctccagccatgggtaaggagaagtcccacatcaacattgtggttattggccatgtcgactctggcaagtcaaccaccaccggccacctgatctacaagcttggaggcattgacaagcgtgtgattgagaggttcgagaaggaagccgctgaaatgaacaaacggtccttcaagtacgcttgggtgcttgacaagctcaaggctgagcgtgagagaggtatcaccattgatatcgctctgtggaagtttgagaccaccaagtactactgcactgtcattgatgcccctggacatcgcgacttcatcaagaacatgatcacgggtacctcccaggctgactgtgctgtcctgatcattgactccaccactggtggttttgaggccggtatctctaaggatggccagacccgtgagcatgctctccttgctttcacccttggggtcaagcagatgatttgctgctgcaacaagatggatgcgaccactcccaagtattccaaggcccgttacgatgagattgtgaaggaagtttcatcctacctcaagaaggttggatacaaccctgacaagattgcctttgtccctatctctggttttgagggtgacaacatgattgagaggtccaccaaccttgactggtacaagggtccaaccctgcttgaggctcttgaccagatcaccgagcccaagaggccttcagacaagcccctgcgtctgcccctccaggatgtgtacaagattggtggtattggaactgttccggttggtcgtgtggagactggtgtcatcaagcctggaatggttgtcaccttcggtccaactggcctgaccactgaggtgaagtctgttgagatgcaccacgaggctctccaggaggcccttcctggtgacaacgttggcttcaatgtgaagaacgttgctgtgaaggatctcaaacgtgggtacgtggcctccaactctaaggatgaccctgccaaggaggctgctagcttcacctcccaagtcatcatcatgaaccaccctgggcagattggcaatggctatgccccagtgctggactgccacacctcccacattgctgtcaagtttgctgagctcataaccaagatcgataggcggtctggcaaggagcttgagaaggagcccaagttcctgaagaatggtgatgccggtatggtgaagatgattcccactaagcccatggtggttgagaccttctctcagtatcctcctctgggtcgttttgctgtccgtgacatgaggcagacggttgctgttggagtcatcaagagcgtggagaagaaggacccaactggtgccaaggtgaccaaggctgcaataaagaagaaatgatgcgtcctcccatgtgccctcgtttattttgtacttgtgcccgtatacttcgatctgttaaaatctattggttgtgtgccctgtgtctgttgtttgggtatctatactgttattttgagacatgttgacttgcatggtcatctggattgggttcgcatttctgagtcatttgtcttgacatgaaaatcttgctttttttcttgatcttaaaatctaggttgtctttgttgcggggttgattctaatattaaaggggacatttgggattttgcccatgacatcgttccctcgctaaaaatttaatttgtgggttcgtctatgcctatgaatcgagggtctgggcaaaattctgaagctcagtgtctttgaaggaatatgtgctcttgaattgcaagttctgtatatgacatgataaatctgattgttttcttgtagcgaaaacagcaattctgccagtggattagca

SEQ ID NO: 62711 - DNA, 1881 bp, Zea Mays
cccgagtcgccgtcgtctgctccgggctgctgttctgcgcctccacaaggctttggcctctgttgtaagccatgggtaaggagaagtcccacatcaacattgtggttattggccatgtcgactctggcaagtcaaccaccaccggccacctgatctacaagcttggaggcattgacaagcgtgtgattgagaggttcgagaaggaagccgctgaaatgaacaaacggtccttcaagtacgcttgggtgcttgacaagctcaaggctgagcgtgagagaggtatcaccattgatatcgctctgtggaagtttgagaccaccaagtactactgcactgtcattgatgcccctggacatcgcgacttcatcaagaacatgatcacgggtacctcccaggctgactgtgctgtcctgatcattgactccaccactggtggttttgaggccggtatctctaaggatggccagacccgtgagcatgctctccttgctttcacccttggggtcaagcagatgatttgctgctgcaacaagatggatgcgaccactcccaagtattccaaggcccgttacgatgagattgtgaaggaagtttcatcctacctcaagaaggttggatacaaccctgacaagattgcctttgtccctatctctggttttgagggtgacaacatgattgagaggtccaccaaccttgactggtacaagggtccaaccctgcttgaggctcttgaccagatcaccgagcccaagaggccttcagacaagcccctgcgtctgcccctccaggatgtgtacaagattggtggtattggaactgttccggttggtcgtgtggagactggtgtcatcaagcctggaatggttgtcaccttcggtccaactggcctgaccactgaggtgaagtctgttgagatgcaccacgaggctctccaggaggcccttcctggtgacaacgttggcttcaatgtgaagaacgttgctgtgaaggatctcaaacgtgggtacgtggcctccaactctaaggatgaccctgccaaggaggctgctagcttcacctcccaagtcatcatcatgaaccaccctgggcagattggcaatggctatgccccagtgctggactgccacacctcccacattgctgtcaagtttgctgagctcataaccaagatcgataggcggtctggcaaggagcttgagaaggagcccaagttcctgaagaatggtgatgccggtatggtgaagatgattcccactaagcccatggtggttgagaccttctctcagtatcctcctctgggtcgttttgctgtccgtgacatgaggcagacggttgctgttggagtcatcaagagcgtggagaagaaggacccaactggtgccaaggtgaccaaggctgcaataaagaagaaatgatgcgtcctcccatgtgccctcgtttattttgtacttgtgcccgtatacttcgatctgttaaaatctattggttgtgtgccctgtgtctgttgtttgggtatctatactgttattttgagacatgttgacttgcatggtcatctggattgggttcgcatttctgagtcatttgtcttgacatgaaaatcttgctttttttcttgatcttaaaatctaggttgtctttgttgcggggttgattctaatattaaaggggacatttgggattttgcccatgacatcgttccctcgctaaaaatttaatttgtgggttcgtctatgcctatgaatcgagggtctgggcaaaattctgaagctcagtgtctttgaaggaatatgtgctcttgaattgcaagttctgtatatgacatgataaatctgattgttttcttgtagcgaaaacagcaattctgccagtggattagca

SEQ ID NO: 62712 - DNA, 2009 bp, Zea Mays
gtttatgggccctgggccaccattcgagagtccattgatgggctggccggcctacgccgacgcacttatataaaagccccgaaccctagaggccagcagcacattcttccccgagtcgccgtcgtctgctccgggctgctgttctgcgcctccacaaggctttggcctctgttgtaagttttaagcttcacctccagccatgggtaaggagaagtcccacatcaacattgtggttattggccatgtcgactctggcaagtcaaccaccaccggccacctgatctacaagcttggaggcattgacaagcgtgtgattgagaggttcgagaaggaagccgctgaaatgaacaaacggtccttcaagtacgcttgggtgcttgacaagctcaaggctgagcgtgagagaggtatcaccattgatatcgctctgtggaagtttgagaccaccaagtactactgcactgtcattgatgcccctggacatcgcgacttcatcaagaacatgatcacgggtacctcccaggctgactgtgctgtcctgatcattgactccaccactggtggttttgaggccggtatctctaaggatggccagacccgtgagcatgctctccttgctttcacccttggggtcaagcagatgatttgctgctgcaacaagatggatgcgaccactcccaagtattccaaggcccgttacgatgagattgtgaaggaagtttcatcctacctcaagaaggttggatacaaccctgacaagattgcctttgtccctatctctggttttgagggtgacaacatgattgagaggtccaccaaccttgactggtacaagggtccaaccctgcttgaggctcttgaccagatcaccgagcccaagaggccttcagacaagcccctgcgtctgcccctccaggatgtgtacaagattggtggtattggaactgttccggttggtcgtgtggagactggtgtcatcaagcctggaatggttgtcaccttcggtccaactggcctgaccactgaggtgaagtctgttgagatgcaccacgaggctctccaggaggcccttcctggtgacaacgttggcttcaatgtgaagaacgttgctgtgaaggatctcaaacgtgggtacgtggcctccaactctaaggatgaccctgccaaggaggctgctagcttcacctcccaagtcatcatcatgaaccaccctgggcagattggcaatggctatgccccagtgctggactgccacacctcccacattgctgtcaagtttgctgagctcataaccaagatcgataggcggtctggcaaggagcttgagaaggagcccaagttcctgaagaatggtgatgccggtatggtgaagatgattcccactaagcccatggtggttgagaccttctctcagtatcctcctctgggtcgttttgctgtccgtgacatgaggcagacggttgctgttggagtcatcaagagcgtggagaagaaggacccaactggtgccaaggtgaccaaggctgcaataaagaagaaatgatgcgtcctcccatgtgccctcgtttattttgtacttgtgcccgtatacttcgatctgttaaaatctattggttgtgtgccctgtgtctgttgtttgggtatctatactgttattttgagacatgttgacttgcatggtcatctggattgggttcgcatttctgagtcatttgtcttgacatgaaaatcttgctttttttcttgatcttaaaatctaggttgtctttgttgcggggttgattctaatattaaaggggacatttgggattttgcccatgacatcgttccctcgctaaaaatttaatttgtgggttcgtctatgcctatgaatcgagggtctgggcaaaattctgaagctcagtgtctttgaaggaatatgtgctcttgaattgcaagttctgtatatgacatgataaatctgattgttttcttgtagcgaaaacagcaattctgccagtggattagca

SEQ ID NO: 62713 - DNA, 1888 bp, Zea Mays
gtcattccgctcgtctctctcgctcacatcaactctccaggcaaaatatcctgggcgcgatggatgcaacgccagcgagcaagaaggccacgccggccgccgccgtcgccgacgcggtcccgctcgctgcgcagcaggcggcggagcagctgtcgtcgcccgaatccgtcgccggcgtgagggcgagcggcagcgaggacgacgacgagcaggtggagaggttctacgcgctgctggacaacatccgcgccatgaggggcatggtcagcaccggcggcgcggcaccggggaggaagcgggcgcgcgacgacgagcccccgtggcggccggcgttccggatggaggacttcgagcttgaggaattcgactccggctccgcggggtgcgacgggggaaagaagaagagggagagcagcatcgcgaagcggccggccgacgaggaggagcaggccgaggtagtggaggccaaaggtccccggtgtgggccgcggccgccccagtcgcacaagccgcggcgcgagggagtgcgagccgtcgacacgtgacaggaattagaatacacagccctgccctggtccaatttgcacgtctttcacatttacgatgatatttctatattctatattctatctatactactctattaagtttgtagtgtcagtgtccacacatgcaatgcccccgcctcgcgttgctcgtccccctgccctgccgcgagtcgtctccgcccacgtcgtctcccgaaatctcgccccccgagacgcgcccgcgccacggctgccgctccttccgccccgcctgcccacctcgaccacccctcccccgcgggtgctgccagaactggtgggtggatgatctctccgtggtcaaggtcgaccactcccaggtgctcctcgcctccgtcaccttctccgcccccatgccgttgctccgcctccgcgtggcctctcctaggtcagtcctcctcttgaagcccgcatatttcaggtgtccgcagtctccgcatatttcaggtcaggcctccccgccgcgatcgatgggtccgcggtctccgtccacttccgccggatgtccgtgttcgcctccacccgccccgtcgcggccgccctcggcgccgccgcgttcgaggaggtgctcacgctggtccccggtctacttctcccgcggcgccaaggccgtcgtcaagtacgagccccgcgccttagctgtctccgtcgccgcctccactctcgacctcggtaagcacgaggtcaacctcacccgccttctcccgctctcgttcgaggatctcgaggacgacggcgactccggcttcgagaagtggagcaccagcttccggctgtccggccccgtccgcggcgcgcggcttaacgtaaccttctcttgctcgctcctcgcgggcggcggcaccagcgagcagcacaggggcggggaagtggcggggctgcgacgcggctcgatggcacgggcagtgtcagtgcaagtgccgacgcctttgcccgcgcggagcaggggcgtgagggttctccacgaggtgctgcccagcttgaggtctgccaggccggtgccttcttctgttgctgacgggggtcctgatgcgaggaaggaggaggtggcagcaccggactgcacggaagaggggtctccggaggcaaagcactgcacatcggtagagccaagctgtgtactgacggaacgccttgagcgagagcgaggttgcgctccactccactccactccactagccagttcagttcttgcttcctgctcctgtcgtggtgccctgagtccctgactgcgaggagctagctatgcatccctgcggtggctgacgaactgcgtagcctgatcaaacagtactagtatattaaagacggaagaaacgcgg

SEQ ID NO: 62714 - DNA, 1618 bp, Zea Mays
gtcattccgctcgtctctctcgctcacatcaactctccaggcaaaatatcctgggcgcgatggatgcaacgccagcgagcaagaaggccacgccggccgccgccgtcgccgacgcggtcccgctcgctgcgcagcaggcggcggagcagctgtcgtcgcccgaatccgtcgccggcgtgagggcgagcggcagcgaggacgacgacgagcaggtggagaggttctacgcgctgctggacaacatccgcgccatgaggggcatggtcagcaccggcggcgcggcaccggggaggaagcgggcgcgcgacgacgagcccccgtggcggccggcgttccggatggaggacttcgagcttgaggaattcgactccggctccgcggggtgcgacgggggaaagaagaagagggagagcagcatcgcgaagcggccggccgacgaggaggagcaggccgaggtagtggaggccaaaggtccccggtgtgggccgcggccgccccagtcgcacaagccgcggcgcgagggagtgcgagccgtcgacacgtgacaggaattagaatacacagccctgccctggtccaatttgcacgtctttcacatttacgatgatatttctatattctatattctatctatactactctattaagtttgtagtgtcagtgtccacacatgcaatgcccccgcctcgcgttgctcgtccccctgccctgccgcgagtcgtctccgcccacgtcgtctcccgaaatctcgccccccgagacgcgcccgcgccacggctgccgctccttccgccccgcctgcccacctcgaccacccctcccccgcgggtgctgccagaactggtgggtggatgatctctccgtggtcaaggtcgaccactcccaggtgtccgcagtctccgcatatttcaggtcaggcctccccgccgcgatcgatgggtccgcggtctccgtccacttccgccggatgtccgtgttcgcctccacccgccccgtcgcggccgccctcggcgccgccgcgttcgaggaggtgctcacgctggtccccggtctacttctcccgcggcgccaaggccgtcgtcaagtacgagccccgcgccttagctgtctccgtcgccgcctccactctcgacctcggtaagcacgaggtcaacctcacccgccttctcccgctctcgttcgaggatctcgaggacgacggcgactccggcttcgagaagtggagcaccagcttccggctgtccggccccgtccgcggcgcgcggcttaacgtaaccttctcttgctcgctcctcgcgggcggcggcaccagcgagcagcacaggggcggggaagtggcggggctgcgacgcggctcgatggcacgggcagtgtcagtgcaagtgccgacgcctttgcccgcgcggagcaggggcgtgagggttctccacgaggtgctgcccagcttgaggtctgccaggccggtgccttcttctgttgctgacgggggtcctgatgcgaggaaggaggaggtggcagcaccggactgcacggaagaggggtctccggaggcaaagcactgcacatcggtagagcctgtgttcgtcagctttggtggatagttaatatattttttttg

SEQ ID NO: 62715 - DNA, 255 bp, Zea Mays
cacaattcgtcagttctttttttttctcaatctttcccaggtcttggcagtctgcataccactgctatgaagcattacattaccactcgttatttgtttctggcgcgtcgtacatgtaatcttgcctttgcatacacagatcacatacgcagagacgaacattcacgcatatataccatgcacgtagattgctacacgacgggatccatcacacattcacatgtcgcagcgggcgtagagcgagcgccacccccg

SEQ ID NO: 62716 - DNA, 1987 bp, Zea Mays
ggcactgctacgagtgagagccgaaaatacccctatataaacagaatctatgagtactaagcagtccctctcatccatccagagaagctagagtccaggtctcactcgcgaccgagagccacagagaaatggggggccctggtcgtccctggcaccggcacgtcttcctcgtcgtgtcgctgcagcttctccttgtggcgccatggcaggacgagacggccgctcgagctctcaatttcaccaggcaggatttccccagggccttcgtctttggtgccggcacgtcagcttatcagtacgaaggggcaaccgatgaagacggaaggagcccaagcatatgggacaactttactcatgcaggtaggatgccggacaaaagcactggcgacctaggggcggacggctaccacaaatacaagggagacgtgcagctgatgagtgacactggcctggaggcctaccgcttctccatttcttggtccaggcttattccaagaggaagaggagccatcaaccccaagggcctcgagtattacaacaacctcatcaatgagctagtaaaacgaggaattgagatacacgtgaccctgtcccacctggattaccctcagatcctggaggacgagtaccacggctggctgagccccaggatggtggacgacttcgaggcgtacgcggacgtgtgcttccgcgagttcggcgaccgggtgaggcactggaccaccatggacgagccgaacgtcaactccatcgccgcctacgacaacggcgccttcccccccggccgctgctccccgccgttcgggttcggcactaactgcaccgccggcggcaactccagcgtcgagccctacgtcgtcacccacaactgcatcctggcgcacgccgccgtcgccgccctctacacccgcagctaccgtgccgaacagcagggcgtcgtcggcatcaacatctacaccttctggaactaccccttctcccccgcccccgccgacgtccaggccacgcagcgctcgctcgacttcatgatcggctggatggtcaacccgttggtgtatggagactaccctcaagtgatgaagaggatagtcgggtcccgccttcccaggttcaccaagcggcagtcggagatggtccgcgggacggcggatttcattggcataaaccactacacctccgtgtacgtcagtgatcgccccaacgacgcagcagccgacaccacggggccccgggactacaatgctgatctgtcggctaccttcagattttctcgcgatgatccagctactggccagggactgcaatgcatgctcgagtatctcagccaaacctacaacaacatccccgtctacgtgcaggaaaacggctacggggcgctcttcaacgactccatccatgaccacgagagagccgagtacttgagtgcctacatgggcagcgcactcgctgcactcaggaacggagccaacgtgaaggggtacttcgtctggtcgttcctggacgtgtttgagctgctggcgggctactactcgcgatacggcctctaccatgtcgattttcaggacccggagctgccgaggacgccaaaactctctgcgctgtggtacagcaagttcttgaagaatgaaatcgacataatagagaacgttgtcagcgatactgacgatgcgcgctcgcatgctgctgaacaatgagttagtttgctagcaagcagcaggcagcagcacacgacatatcacatatgcatgtcgtagtagcggaggaaaagaatgtttcttatccattctttttttttcacaagtccacagaagctcagaattttcagcagttggtcaggcccggaattcagtgttcgtgaatcgtagccataggcaccctctttggctgtagccctgtagtatgcgctacgtacggcaacagttgtcatgagtcactctgtcgctactgacacaataagtaatacagaaaggaactattactcttgcag

SEQ ID NO: 62717 - DNA, 2033 bp, Zea Mays
gtggttctctattttcttttcccgcgagttgttaatcccttcgccgtactcagctaccgccgccgccgccgccgccgcgtgagttgagagaacgagagccaagaagccagggagggacttgagcttcacttgggaagggctagtactgctcccgcccccgccacggccgtctggctgtctgttgcgcgactgcgccagcctggcggctctgccccgggctgctggcgccgccattgctttcccttggagccgctggcagctaaactggtgccctcggccgcctttgtgcgttcctcgccactgcgcccggggtagctgaggtctgaagacggaggtgtcgcccgcctcacggctcctgcaccacggtttttctttctcgcatcgccagagcaacaactgccccccgccgttgtttgtcctgtgctcaaaatggaggctaatggagcagtggatctggaggttgacattatcggcccaggtgctgctggtagcaagttaacctcggttgacgaccctgacgccacagagtgttcaagttcttttggggacactctgtcaggttcggaggatggtgcaagaccttcagagattagcgacattgaggtggactcgccgttctgccgctacccttctaattgtgatgctgctgctctactggatgcagctgcttcagacaattcggatagactattgaagaagaaaaaggtgactgatcattggagaaagtatgtaagcccactaatgtggagatgccaatggttagaactgcggatgaaggatttgcaatcgcaagtgtctaaatatgacaaggagcttgcagtactcaagcatgagaaggagttgcagacaaaaatgattgaattggattgttcctcctcacgatctgtaccattctcctctctttgctgcagaaagactatgaagcgaaggaggagaaaaagaaatgaagataaaattgacacttcatcatatatctctaatcatactgtattatcttattttgaaaaaatggaagcagatggtcattctattgaagacaatgccaacctagtcgatgacaacacaaaagcaaataatgatgctgattggctacttggtattgaaggaggtgataccactgttgagcagattcttttaagcattcaagctgctcaagacagggtattcagtctgagatcaaatctcaagcaagcaatggctaggaagaataagggaataacccttaaaattaacacatccgtcattggtacacacagctcaaattgctcaccaggaaagggcaaagttgctggactgcatgagagatctccccaggacacatcagaatgtgatatggatgattctggcatgcctgatagtgctctctcaagctatggagaagctagcaacatggatatttttgagagcaccatgagcctattgtctgaaggcccacatcagatgggagaatttcgtgaagcagcagaggaagggtaccgaaacttcgaggtgatcagccacccaagcaagcggctaagggtatcagtgaagcgagaagctgggccacactcggaggatgagagcgtcgcccctgttgtcggtgtcaagagagaagagacacacgaggaagctaccaccagcttcagcctgcacggggcattcctgaagccctgcttcacggggaagaggcaggagaggaagccgaaaaagcaaatgaagcgaaggcgaggtggcccgaccgcggcagctgccgctctcatctcgtggaggagcaagaggatccggaagaagaagcaactctaggatggacgcacatgccatggttcacactttctggcctgatcagatgatgggatgacgacggcaaccgcatacttaaatctttttcttagccttattcttttttatttgtctttctttaccttatcactttttttatctgcctctccttaccgttatcctttttctttcctggattctgtttaacttttggctgtttgtttcggtttcaaatgggactgttttgccaatgcgtttcattcattccaggttcc

SEQ ID NO: 62718 - DNA, 2066 bp, Zea Mays
gtggttctctattttcttttcccgcgagttgttaatcccttcgccgtactcagctaccgccgccgccgccgccgccgcgtgagttgagagaacgagagccaagaagccagggagggacttgagcttcacttgggaagggctagtactgctcccgcccccgccacggccgtctggctgtctgttgcgcgactgcgccagcctggcggctctgccccgggctgctggcgccgccattgctttcccttggagccgctggcagctaaactggtgccctcggccgcctttgtgcgttcctcgccactgcgcccggggtagctgaggtctgaagacggaggtgtcgcccgcctcacggctcctgcaccacggtttttctttctcgcatcgccagagcaacaactgccccccgccgttggtcagtcctgcgagctctagatagttacaaacatttgtcctgtgctcaaaatggaggctaatggagcagtggatctggaggttgacattatcggcccaggtgctgctggtagcaagttaacctcggttgacgaccctgacgccacagagtgttcaagttcttttggggacactctgtcaggttcggaggatggtgcaagaccttcagagattagcgacattgaggtggactcgccgttctgccgctacccttctaattgtgatgctgctgctctactggatgcagctgcttcagacaattcggatagactattgaagaagaaaaaggtgactgatcattggagaaagtatgtaagcccactaatgtggagatgccaatggttagaactgcggatgaaggatttgcaatcgcaagtgtctaaatatgacaaggagcttgcagtactcaagcatgagaaggagttgcagacaaaaatgattgaattggattgttcctcctcacgatctgtaccattctcctctctttgctgcagaaagactatgaagcgaaggaggagaaaaagaaatgaagataaaattgacacttcatcatatatctctaatcatactgtattatcttattttgaaaaaatggaagcagatggtcattctattgaagacaatgccaacctagtcgatgacaacacaaaagcaaataatgatgctgattggctacttggtattgaaggaggtgataccactgttgagcagattcttttaagcattcaagctgctcaagacagggtattcagtctgagatcaaatctcaagcaagcaatggctaggaagaataagggaataacccttaaaattaacacatccgtcattggtacacacagctcaaattgctcaccaggaaagggcaaagttgctggactgcatgagagatctccccaggacacatcagaatgtgatatggatgattctggcatgcctgatagtgctctctcaagctatggagaagctagcaacatggatatttttgagagcaccatgagcctattgtctgaaggcccacatcagatgggagaatttcgtgaagcagcagaggaagggtaccgaaacttcgaggtgatcagccacccaagcaagcggctaagggtatcagtgaagcgagaagctgggccacactcggaggatgagagcgtcgcccctgttgtcggtgtcaagagagaagagacacacgaggaagctaccaccagcttcagcctgcacggggcattcctgaagccctgcttcacggggaagaggcaggagaggaagccgaaaaagcaaatgaagcgaaggcgaggtggcccgaccgcggcagctgccgctctcatctcgtggaggagcaagaggatccggaagaagaagcaactctaggatggacgcacatgccatggttcacactttctggcctgatcagatgatgggatgacgacggcaaccgcatacttaaatctttttcttagccttattcttttttatttgtctttctttaccttatcactttttttatctgcctctccttaccgttatcctttttctttcctggattctgtttaacttttggctgtttgtttcggtttcaaatgggactgttttgccaatgcgtttcattcattccaggttcc

SEQ ID NO: 62719 - DNA, 1478 bp, Zea Mays
tgcaattctgttcctgtagaaggaacgatgacccggcggaacggctgtacgatctacgtgggcaacctccccggcgacatccgcgagagggaagtggatgatctcttctacaagtatggacgtatagtggaaattgacttgaaaattccaccaaggcctcctggttttgcttttgttgagtttgaggacgcacgtgatgctgaagatgcaatatatggccgtgatggatacaactttgatggccataggttgcgggtggaattagcccatggtggacgaggcacatcttcttttgatcgatctagcagctatagcagtgctggacaacgcggtgcctcaaaacgttctgattaccgtgttatggttactggattaccttcttcagcatcatggcaagatctcaaggaccatatgcggcgagctggtgatgtctgtttcactgatgtgtatcgtgaggctggagcaactattggaatagctgattatactaactatgaagatatgaaacacgcgataaggaagctagatgattctgagttccgtaatgctttttcaaggacatatgtccgggtgagggagtatgatgctaggcgcagccgttctcgctccagaggcagaaaccgctctaagtcaagaagcagaagccacagccactcgtactcaagaagcagaagctgcagttatagcaagagtaggagcccaagatctagatctgcttcagagtcaaaatcacctgttaaggcaagattggggcaatgtgaggatctgggaattgcattggtaggataatggaatattgagaacgtgatgatggtttggaacgttggatagtcacagctggattgtgatgcattgtatgacaagtggactgccaccagcaataggagcaagatagggctggcaccacacatacggacaggattttttgatcaccatccagatcccctcctgtttctccccggcgtgacaagtctgcaagcaggagtcctgccaggagcaagagtctgccccgatcttgttctccggcaaaatcagagtgaatcggattctgcacttgaaacgttcagaaaggcagagctcgagctaaaagattgctgtacggattatgagcactgtgctagtagcattgctgtcccttccatatttttacaaatactctgttctttgaggagatcactgtatgctactactctgtacctgacatgatgcaaacgttgttggtttttgaacttagcagaacgatgactttgatcagctccatccattccttccattttttttttctgaatatttcaaaagattgtagtatgcagctattgttattctctgatgcactcctgtgtcctgtcattgtggaaaaaaaatggaattctaccattcatgtgatgtgtctaaaaaatgcaactctagcttgcgattagatgcagttgtttgcttttgttcaatcaacagatatgaagaataaaaagagtagggat

SEQ ID NO: 62720 - DNA, 1339 bp, Zea Mays
ctccggtcgaaatatagtgtgcaattctgttcctgtagaaggaacgatgacccggcggaacggctgtacgatctacgtgggcaacctccccggcgacatccgcgagagggaagtggatgatctcttctacaagggaaggcaatgtggattgcgaatgtatggacgtatagtggaaattgacttgaaaattccaccaaggcctcctggttttgcttttgttgagtttgaggacgcacgtgatgctgaagatgcaatatatggccgtgatggatacaactttgatggccataggttgcgggtggaattagcccatggtggacgaggcacatcttcttttgatcgatctagcagctatagcagtgctggacaacgcggtgcctcaaaacgttctgattaccgtgttatggttactggattaccttcttcagcatcatggcaagatctcaaggaccatatgcggcgagctggtgatgtctgtttcactgatgtgtatcgtgaggctggagcaactattggaatagctgattatactaactatgaagatatgaaacacgcgataaggaagctagatgattctgagttccgtaatgctttttcaaggacatatgtccgggtgagggagtatgatgctaggcgcagccgttctcgctccagaggcagaaaccgctctaagtcaagaagcagaagccacagccactcgtactcaagaagcagaagctgcagttatagcaagagtaggagcccaagatctagatctgcttcagagtcaaaatcacctgttaaggcaagatcaccatccagatcccctcctgtttctccccggcgtgacaagtctgcaagcaggagtcctgccaggagcaagagtctgccccgatcttgttctccggcaaaatcagagtgaatcggattctgcacttgaaacgttcagaaaggcagagctcgagctaaaagattgctgtacggattatgagcactgtgctagtagcattgctgtcccttccatatttttacaaatactctgttctttgaggagatcactgtatgctactactctgtacctgacatgatgcaaacgttgttggtttttgaacttagcagaacgatgactttgatcagctccatccattccttccattttttttttctgaatatttcaaaagattgtagtatgcagctattgttattctctgatgcactcctgtgtcctgtcattgtggaaaaaaaatggaattctaccattcatgtgatgtgtctaaaaaatgcaactctagcttgcgattagatgcagttgtttgcttttgttcaatcaacagatatgaagaataaaaagagtagggat

SEQ ID NO: 62721 - DNA, 1541 bp, Zea Mays
cccctctccgccccggaagccgtagtcctccggtcgaaatatagtgtgcaattctgttcctgtagaaggaacgatgacccggcggaacggctgtacgatctacgtgggcaacctccccggcgacatccgcgagagggaagtggatgatctcttctacaagggaaggcaatgtggattgcgaatgtatggacgtatagtggaaattgacttgaaaattccaccaaggcctcctggttttgcttttgttgagtttgaggacgcacgtgatgctgaagatgcaatatatggccgtgatggatacaactttgatggccataggtggaattagcccatggtggacgaggcacatcttcttttgatcgatctagcagctatagcagtgctggacaacgcggtgcctcaaaacgttctgattaccgtgttatggttactggattaccttcttcagcatcatggcaagatctcaaggaccatatgcggcgagctggtgatgtctgtttcactgatgtgtatcgtgaggctggagcaactattggaatagctgattatactaactatgaagatatgaaacacgcgataaggaagctagatgattctgagttccgtaatgctttttcaaggacatatgtccgggtgagggagtatgatgctaggcgcagccgttctcgctccagaggcagaaaccgctctaagtcaagaagcagaagccacagccactcgtactcaagaagcagaagctgcagttatagcaagagtaggagcccaagatctagatctgcttcagagtcaaaatcacctgttaaggcaagattggggcaatgtgaggatctgggaattgcattggtaggataatggaatattgagaacgtgatgatggtttggaacgttggatagtcacagctggattgtgatgcattgtatgacaagtggactgccaccagcaataggagcaagatagggctggcaccacacatacggacaggattttttgatcaccatccagatcccctcctgtttctccccggcgtgacaagtctgcaagcaggagtcctgccaggagcaagagtctgccccgatcttgttctccggcaaaatcagagtgaatcggattctgcacttgaaacgttcagaaaggcagagctcgagctaaaagattgctgtacggattatgagcactgtgctagtagcattgctgtcccttccatatttttacaaatactctgttctttgaggagatcactgtatgctactactctgtacctgacatgatgcaaacgttgttggtttttgaacttagcagaacgatgactttgatcagctccatccattccttccattttttttttctgaatatttcaaaagattgtagtatgcagctattgttattctctgatgcactcctgtgtcctgtcattgtggaaaaaaaatggaattctaccattcatgtgatgtgtctaaaaaatgcaactctagcttgcgattagatgcagttgtttgcttttgttcaatcaacagatatgaagaataaaaagagtagggat

SEQ ID NO: 62722 - DNA, 1351 bp, Zea Mays
ctccgcgaacccctctccgccccggaagccgtagtcctccggtcgaaatatagtgtgcaattctgttcctgtagaaggaacgatgacccggcggaacggctgtacgatctacgtgggcaacctccccggcgacatccgcgagagggaagtggatgatctcttctacaagtatggacgtatagtggaaattgacttgaaaattccaccaaggcctcctggttttgcttttgttgagtttgaggacgcacgtgatgctgaagatgcaatatatggccgtgatggatacaactttgatggccataggttgcgggtggaattagcccatggtggacgaggcacatcttcttttgatcgatctagcagctatagcagtgctggacaacgcggtgcctcaaaacgttctgattaccgtgttatggttactggattaccttcttcagcatcatggcaagatctcaaggaccatatgcggcgagctggtgatgtctgtttcactgatgtgtatcgtgaggctggagcaactattggaatagctgattatactaactatgaagatatgaaacacgcgataaggaagctagatgattctgagttccgtaatgctttttcaaggacatatgtccgggtgagggagtatgatgctaggcgcagccgttctcgctccagaggcagaaaccgctctaagtcaagaagcagaagccacagccactcgtactcaagaagcagaagctgcagttatagcaagagtaggagcccaagatctagatctgcttcagagtcaaaatcacctgttaaggcaagatcaccatccagatcccctcctgtttctccccggcgtgacaagtctgcaagcaggagtcctgccaggagcaagagtctgccccgatcttgttctccggcaaaatcagagtgaatcggattctgcacttgaaacgttcagaaaggcagagctcgagctaaaagattgctgtacggattatgagcactgtgctagtagcattgctgtcccttccatatttttacaaatactctgttctttgaggagatcactgtatgctactactctgtacctgacatgatgcaaacgttgttggtttttgaacttagcagaacgatgactttgatcagctccatccattccttccattttttttttctgaatatttcaaaagattgtagtatgcagctattgttattctctgatgcactcctgtgtcctgtcattgtggaaaaaaaatggaattctaccattcatgtgatgtgtctaaaaaatgcaactctagcttgcgattagatgcagttgtttgcttttgttcaatcaacagatatgaagaataaaaagagtagggat

SEQ ID NO: 62723 - DNA, 1556 bp, Zea Mays
aaagcgaacaatccacaattcccagtaccctcacgccggcatccgtcgaagctgctcgacctcgactcaagccttccttgctccttgccgccgtcgagtcgtcgcaggaacgatgacccggcggaacggctgtacgatctacgtgggcaacctccccggcgacatccgcgagagggaagtggatgatctcttctacaagtatggacgtatagtggaaattgacttgaaaattccaccaaggcctcctggttttgcttttgttgagtttgaggacgcacgtgatgctgaagatgcaatatatggccgtgatggatacaactttgatggccataggtggaattagcccatggtggacgaggcacatcttcttttgatcgatctagcagctatagcagtgctggacaacgcggtgcctcaaaacgttctgattaccgtgttatggttactggattaccttcttcagcatcatggcaagatctcaaggaccatatgcggcgagctggtgatgtctgtttcactgatgtgtatcgtgaggctggagcaactattggaatagctgattatactaactatgaagatatgaaacacgcgataaggaagctagatgattctgagttccgtaatgctttttcaaggacatatgtccgggtgagggagtatgatgctaggcgcagccgttctcgctccagaggcagaaaccgctctaagtcaagaagcagaagccacagccactcgtactcaagaagcagaagctgcagttatagcaagagtaggagcccaagatctagatctgcttcagagtcaaaatcacctgttaaggcaagattggggcaatgtgaggatctgggaattgcattggtaggataatggaatattgagaacgtgatgatggtttggaacgttggatagtcacagctggattgtgatgcattgtatgacaagtggactgccaccagcaataggagcaagatagggctggcaccacacatacggacaggattttttgatcaccatccagatcccctcctgtttctccccggcgtgacaagtctgcaagcaggagtcctgccaggagcaagagtctgccccgatcttgttctccggcaaaatcagagtgaatcggattctgcacttgaaacgttcagaaaggcagagctcgagctaaaagattgctgtacggattatgagcactgtgctagtagcattgctgtcccttccatatttttacaaatactctgttctttgaggagatcactgtatgctactactctgtacctgacatgatgcaaacgttgttggtttttgaacttagcagaacgatgactttgatcagctccatccattccttccattttttttttctgaatatttcaaaagattgtagtatgcagctattgttattctctgatgcactcctgtgtcctgtcattgtggaaaaaaaatggaattctaccattcatgtgatgtgtctaaaaaatgcaactctagcttgcgattagatgcagttgtttgcttttgttcaatcaacagatatgaagaataaaaagagtagggat

SEQ ID NO: 62724 - DNA, 1033 bp, Zea Mays
ccaggctgcacgaatcgcaaagcgaacaatccacaattcccagtaccctcacgccggcatccgtcgaagctgctcgacctcgactcaagccttccttgctccttgccgccgtcgagtcgtcgcaggaacgatgacccggcggaacggctgtacgatctacgtgggcaacctccccggcgacatccgcgagagggaagtggatgatctcttctacaagggaaggcaatgtggattgcgaatgtatggacgtatagtggaaattgacttgaaaattccaccaaggcctcctggttttgcttttgttgagtttgaggacgcacgtgatgctgaagatgcaatatatggccgtgatggatacaactttgatggccataggttgcgggtggaattagcccatggtggacgaggcacatcttcttttgatcgatctagcagctatagcagtgctggacaacgcggtgcctcaaaacgttctgattaccgtgttatggttactggattaccttcttcagcatcatggcaagatctcaaggaccatatgcggcgagctggtgatgtctgtttcactgatgtgtatcgtgaggctggagcaactattggaatagctgattatactaactatgaagatatgaaacacgcgataaggaagctagatgattctgagttccgtaatgctttttcaaggacatatgtccgggtgagggagtatgatgctaggcgcagccgttctcgctccagaggcagaaaccgctctaagtcaagaagcagaagccacagccactcgtactcaagaagcagaagctgcagttatagcaagagtaggagcccaagatctagatctgcttcagagtcaaaatcacctgttaaggcaagttgcacaactgaaacaagaaagctgtggccctgttggaccatttcaatccatgttggctatatctttgtttgctgaattgtagtttcctcttatatgaaattgcaatttctaaatagatttgagcttttttatatatattctgaatggcagaggcacggg

SEQ ID NO: 62725 - DNA, 1485 bp, Zea Mays
ctttagatgaagctagtgtagtccaatctagtgtactgcatcgacaaggagttatcggatcagtactcacaggtggtgagtctggtcttcccgacttcaaggatgcaatctctggtgctttcaagttcttgaccaagagttcaaagcaaggcaaagatgggccgtcgaccagcaggccacatacttctgagttgttgacccaggtcaattatctcagagaggagctacaaatgttgtctaaatcaaatcatgttgctattgtcactgttgatggtagacctgggcctggtgcatatggtattacagctgttattattggagctattggctatttattcataagatggaaggggtggaaactttctgatatgatgtttgtgacgaagcgtggattatctgatgcttgcaatgttgtggggaaacaagtggatcaggtttcagaaagtgttaatgttgcaaggagacatcttgcaggaaggattgatcgtgtagattgtagtttagatgaatgtcatgaaattacagaagccacaagggaacaggtcacaatcatccatggagatctaagtgccttccagaaggaaatggaaacagttcatcttgtagttcgtagtctggaggcaaagcttggacgcctagcttatactcaagatcggacaacacgaggaatatatgatttgtgtgaattcactaaaagattggatcagagcccgaaagctgagactcatcaggttacatcatcaactcctcgccctgctattgaatcctcagagagaattgctagggctggttctttgcccccagctttggaaccagagtctcctagaatagaggcgcctaaggttgtgcgctcatctacaatcatgtcagcatcgggacttagtttgctagctggaactacaacaccacctaaaagagaccagccgggtgctttcagcagaacaagttcaatgaaggaaggatcctctgagttaccgagtggtgtccgaagctcagcagaaccaagccccaggagatctggcggttcaaccctttttggagggcttggttttctaaggagctacaccagctgagacgtatgtgctcagatacgtgaatttttattcagactccatcagcttgagctgcatatgtaggtagtagaaaacatggcagttgccaaaaggatggctcccttttccaattgggaattgcgaatttttgtaggaacttaataccttgcagggcaatgcctggagggttgtatattgcactggattatactagtagaatacatgtttggcaaggagcagttgcaactaaatttgtgcttttcttggactcaaacctgctggctgatgatgcttgcttggatagcatgtatgcaacatttgttgtggcagctgcaggctgcaggcatatctggaaactctggatccactcacggttggatttccacccagtacttggtctgatatgtgatatggacaagacgttatgatccgc

SEQ ID NO: 62726 - DNA, 1407 bp, Zea Mays
gcgacgcatgctgtccctttgcgggagttatcggatcagtactcacaggtggtgagtctggtcttcccgacttcaaggatgcaatctctggtgctttcaagttcttgaccaagagttcaaagcaaggcaaagatgggccgtcgaccagcaggccacatacttctgagttgttgacccaggtcaattatctcagagaggagctacaaatgttgtctaaatcaaatcatgttgctattgtcactgttgatggtagacctgggcctggtgcatatggtattacagctgttattattggagctattggctatttattcataagatggaaggggtggaaactttctgatatgatgtttgtgacgaagcgtggattatctgatgcttgcaatgttgtggggaaacaagtggatcaggtttcagaaagtgttaatgttgcaaggagacatcttgcaggaaggattgatcgtgtagattgtagtttagatgaatgtcatgaaattacagaagccacaagggaacaggtcacaatcatccatggagatctaagtgccttccagaaggaaatggaaacagttcatcttgtagttcgtagtctggaggcaaagcttggacgcctagcttatactcaagatcggacaacacgaggaatatatgatttgtgtgaattcactaaaagattggatcagagcccgaaagctgagactcatcaggctggttctttgcccccagctttggaaccagagtctcctagaatagaggcgcctaaggttgtgcgctcatctacaatcatgtcagcatcgggacttagtttgctagctggaactacaacaccacctaaaagagaccagccgggtgctttcagcagaacaagttcaatgaaggaaggatcctctgagttaccgagtggtgtccgaagctcagcagaaccaagccccaggagatctggcggttcaaccctttttggagggcttggttttctaaggagctacaccagctgagacgtatgtgctcagatacgtgaatttttattcagactccatcagcttgagctgcatatgtaggtagtagaaaacatggcagttgccaaaaggatggctcccttttccaattgggaattgcgaatttttgtaggaacttaataccttgcagggcaatgcctggagggttgtatattgcactggattatactagtagaatacatgtttggcaaggagcagttgcaactaaatttgtgcttttcttggactcaaacctgctggctgatgatgcttgcttggatagcatgtatgcaacatttgttgtggcagctgcaggctgcaggcatatctggaaactctggatccactcacggttggatttccacccagtacttggtctgatatgtgatatggacaagacgttatgatccgc

SEQ ID NO: 62727 - DNA, 1490 bp, Zea Mays
tttctcgcttgctctagcccagcgaccacgcgacgcatgctgtccctttgcgggagttatcggatcagtactcacaggtggtgagtctggtcttcccgacttcaaggatgcaatctctggtgctttcaagttcttgaccaagagttcaaagcaaggcaaagatgggccgtcgaccagcaggccacatacttctgagttgttgacccaggtcaattatctcagagaggagctacaaatgttgtctaaatcaaatcatgttgctattgtcactgttgatggtagacctgggcctggtgcatatggtattacagctgttattattggagctattggctatttattcataagatggaaggggtggaaactttctgatatgatgtttgtgacgaagcgtggattatctgatgcttgcaatgttgtggggaaacaagtggatcaggtttcagaaagtgttaatgttgcaaggagacatcttgcaggaaggattgatcgtgtagattgtagtttagatgaatgtcatgaaattacagaagccacaagggaacaggtcacaatcatccatggagatctaagtgccttccagaaggaaatggaaacagttcatcttgtagttcgtagtctggaggcaaagcttggacgcctagcttatactcaagatcggacaacacgaggaatatatgatttgtgtgaattcactaaaagattggatcagagcccgaaagctgagactcatcaggttacatcatcaactcctcgccctgctattgaatcctcagagagaattgctagggctggttctttgcccccagctttggaaccagagtctcctagaatagaggcgcctaaggttgtgcgctcatctacaatcatgtcagcatcgggacttagtttgctagctggaactacaacaccacctaaaagagaccagccgggtgctttcagcagaacaagttcaatgaaggaaggatcctctgagttaccgagtggtgtccgaagctcagcagaaccaagccccaggagatctggcggttcaaccctttttggagggcttggttttctaaggagctacaccagctgagacgtatgtgctcagatacgtgaatttttattcagactccatcagcttgagctgcatatgtaggtagtagaaaacatggcagttgccaaaaggatggctcccttttccaattgggaattgcgaatttttgtaggaacttaataccttgcagggcaatgcctggagggttgtatattgcactggattatactagtagaatacatgtttggcaaggagcagttgcaactaaatttgtgcttttcttggactcaaacctgctggctgatgatgcttgcttggatagcatgtatgcaacatttgttgtggcagctgcaggctgcaggcatatctggaaactctggatccactcacggttggatttccacccagtacttggtctgatatgtgatatggacaagacgttatgatccgc

SEQ ID NO: 62728 - DNA, 1710 bp, Zea Mays
gttttatattttagatgaggatgcatggaccgagcgagtcggcgcgagcctgaccagccacctagctgaacccgaactggcgcacgaaccctagctactacctactagacgtccctgcccccttcccctccggaggtgctggattcacccctcctctccctcgcgggtcccggcgcggacgcaaggcaaaggcaaaaggcggcagaggtggcgctgcagtccaccaattagcggctatggtgcttggcaagatcgccatcgtcatcggctccggagttatcggatcagtactcacaggtggtgagtctggtcttcccgacttcaaggatgcaatctctggtgctttcaagttcttgaccaagagttcaaagcaaggcaaagatgggccgtcgaccagcaggccacatacttctgagttgttgacccaggtcaattatctcagagaggagctacaaatgttgtctaaatcaaatcatgttgctattgtcactgttgatggtagacctgggcctggtgcatatggtattacagctgttattattggagctattggctatttattcataagatggaaggggtggaaactttctgatatgatgtttgtgacgaagcgtggattatctgatgcttgcaatgttgtggggaaacaagtggatcaggtttcagaaagtgttaatgttgcaaggagacatcttgcaggaaggattgatcgtgtagattgtagtttagatgaatgtcatgaaattacagaagccacaagggaacaggtcacaatcatccatggagatctaagtgccttccagaaggaaatggaaacagttcatcttgtagttcgtagtctggaggcaaagcttggacgcctagcttatactcaagatcggacaacacgaggaatatatgatttgtgtgaattcactaaaagattggatcagagcccgaaagctgagactcatcaggttacatcatcaactcctcgccctgctattgaatcctcagagagaattgctagggctggttctttgcccccagctttggaaccagagtctcctagaatagaggcgcctaaggttgtgcgctcatctacaatcatgtcagcatcgggacttagtttgctagctggaactacaacaccacctaaaagagaccagccgggtgctttcagcagaacaagttcaatgaaggaaggatcctctgagttaccgagtggtgtccgaagctcagcagaaccaagccccaggagatctggcggttcaaccctttttggagggcttggttttctaaggagctacaccagctgagacgtatgtgctcagatacgtgaatttttattcagactccatcagcttgagctgcatatgtaggtagtagaaaacatggcagttgccaaaaggatggctcccttttccaattgggaattgcgaatttttgtaggaacttaataccttgcagggcaatgcctggagggttgtatattgcactggattatactagtagaatacatgtttggcaaggagcagttgcaactaaatttgtgcttttcttggactcaaacctgctggctgatgatgcttgcttggatagcatgtatgcaacatttgttgtggcagctgcaggctgcaggcatatctggaaactctggatccactcacggttggatttccacccagtacttggtctgatatgtgatatggacaagacgttatgatccgc

SEQ ID NO: 62729 - DNA, 1158 bp, Zea Mays
gcgagcctgaccagccacctagctgaacccgaactggcgcacgaaccctagctactacctactagacgtccctgcccccttcccctccggaggtgctggattcacccctcctctccctcgcgggtcccggcgcggacgcaaggcaaaggcaaaaggcggcagaggtggcgctgcagtccaccaattagcggctatggtgcttggcaagatcgccatcgtcatcggctccggagttatcggatcagtactcacaggtggtgagtctggtcttcccgacttcaaggatgcaatctctggtgctttcaagttcttgaccaagagttcaaagcaaggcaaagatgggccgtcgaccagcaggccacatacttctgagttgttgacccaggtcaattatctcagagaggagctacaaatgttgtctaaatcaaatcatgttgctattgtcactgttgatggtagacctgggcctggtgcatatggtattacagctgttattattggagctattggctatttattcataagatggaaggggtggaaactttctgatatgatgtttgtgacgaagcgtggattatctgatgcttgcaatgttgtggggaaacaagtggatcaggtttcagaaagtgttaatgttgcaaggagacatcttgcaggaaggattgatcgtgtagattgtagtttagatgaatgtcatgaaattacagaagccacaagggaacaggtcacaatcatccatggagatctaagtgccttccagaaggaaatggaaacagttcatcttgtagttcgtagtctggaggcaaagcttggacgcctagcttatactcaagatcggacaacacgaggaatatatgatttgtgtgaattcactaaaagattggatcagagcccgaaagctgagactcatcaggttacatcatcaactcctcgccctgctattgaatcctcagagagaattgctagggctggttctttgcccccagctttggaaccagagtctcctagaatagaggcgcctaaggttgtgcgctcatctacaatcatgtcagcatcgggacttagtttgctagctggaactacaacaccacctaaaagagggagactcggtgccagaggcttccacatgagtggggtttgagaaaggataaaccaagg

SEQ ID NO: 62730 - DNA, 603 bp, Zea Mays
aggcctaaggaacgaagcccgatccgcttatgggatatcgtggccctgcaatcagtgaccgtccagcagatgcgcggacagctgtcggatcagaaaccctagcccgggaggctctcacctattattagaatccacctcgcaccccgcgagcggtgacttccctagggtttagtcgcgccgccgccgccgccgaaacagcacatcgctctctcgatctcagccatggcggaggtggagcagccccaggacgcggtgaagctcttcaaccgctggaccttcgacgatgtccaggtgaacgatatctcgctgaacgactacctggctgtgactgcggcgaagcacgcgacattcctgccgcactccgcggggcgctactccaagaagcggttccgcaaggcgcagtgcgccatcgtcgagcgcctcaccaactcgctcatgatgcacgggcgcaacaacggcaagaaggtcatggccgtccgcatcatgaagcacaccctggagatcatccacctgctcactgacgccaatcccatccaggtggtcgtggacgccattatcaacagctcaaagttatgtgctatgagatgtcaactataactcaaa

SEQ ID NO: 62731 - DNA, 595 bp, Zea Mays
gtcatcgacctggtacattgaggattctggagcatatatcattgcattttcaggagatgtgcaccacgtcagattcttgttgtggtttgatctaaccaaaggtggtaccaaaacaaagaaatttgaggttaggcagctcaggaaatagtatcacagacaatgtcgtgctaggcacgttcacggaaaaaaaaggtgccacagacaatgtcaaatggagtacctttcatggagtttagctgctaagaaatctgcatctatgggcatgatctttgctgaccttcctttgtcatatggagctgcctgcttcagacgaataaaatgtcatttaaatctaaagggttaaagcccagatcaaagttcaggcaactacttcggcatgtatctccaatcattcagatgttcaactttggtgacgataattcacaaggatgaatggtgtaaaactgtactgctgataaatgtggtactagaaaaggtgaagtaaagttcgtctactgaaaatgaatcaagatgcgagtaaaaggaaacaggcgaatcagactgcgactcctcgagcatctcatggaggcacctgctgtcagagctccccttggta

SEQ ID NO: 62732 - DNA, 3746 bp, Zea Mays
gtacactctagctttcctttacatttacaagattaagccttccacctgctccttcttgcttctacacttcacaacggtatccatgcctgtagtgtaggtacatttgcaagaaatttttttgtttcacattaccctcagggaagcatagttgtcagtcagttctcaagattagtttggttgttactgaccttaattaacccagtttctgtaccacagaaaaccatgtcgtttgcagtgaacaagctcgttatcttgcttcctgcggatagccttcctactttctgctgcttctccctcaaccatatctgccataaatttagaagcagaatcaggactcgtgaatcctttgtttttcatttgtgatgcaagggtattttggtggccttggttgtgttgttgctagaccctaggttttgttgtctcgttgtattactcacactgggtttcttatttttaatataatcggcagctctcttgcttgattggtttaaaaaaaacaaaaaatggacagcttctgtactttgactaaaaagaaactacatatggttttcttaaaacgtagtttttggttcctggttcttgatagtgcgacctaaacgttagttccattaggtaccaggcatgcgttcgcaatggactcgccaacgagtttctgtgagttcagactggattttgcaatcaaatacagatcttctgttcaagtagatgaagtcttcaaccactgccatggcctctacacttgttccctttggtattggcattgtcatattaggtttgcatcgtttcttccaatcctggaaacagttcaaaaaattcacatttcttttcatctcatagctttaagaggtcaagtttgatcatttcattattacctttaaggctgacccttcgacctgagcaccggcacagtacatccaatctctgtatacaacaatggagctaatggattgtttcctaaccatccagcctcctctaggtatccttatcatcgcactgttggattcaactgacacgtctagttcctgtgacaatcttaattattagagacatatatgtgctgtacacgttcccgacttgtaatacaagccattctctttagatatagtgatctaagatgctattatgcttttttaaccacaaaactaacctgtatacttgcgtctttgcatccaaggtaagcttttccctggtatacagctagagatttgacatgcttgctcctgtaaaatgtttgggtgcttcttgatgcacaagagaactgtgacagaatcaaagtaaaaacaccattattgttatgtgttccatttcttgagacaatcaccaagtgcatatcatatgaataccttgagaacgctgttctgtgtaagtacaagaattttgtcaccacaaatatcaagtttttgtacagcctctcttgtctgaatcatctccacgcactctagcttgcgctgtgccatttcccatacctgcaaatgatcttgtcaattaacatcccgcaattaattttcttttacggttttagcactgaagttgaattggttacccgaatagatttgtctgctgatccactcaggaggttctccccagtttctgatagtgaaaaacatgtcactgccttcttgtgctcttttacctccctgatgattactgccctctggccttttatgtcccatgcctgcagacaacacctgagtgttaggatttttttagttatgtaaatattactgcatgaactgaagcaatgagcttgctgtatcagtacagagtttctaccattttcctagtcccttaagtctttctaaaaagggtcccttctaaaagttacttctgttagtcaagagattgtgagctaattttgtaaatactgggaattttgaaactgtggttatgattttaattcagacatatggaatatatcattaccctgatggtgccattagaataaccagcaaaaagctgccctctgaagaatgctatagcagttgctgcaccattgcctggttgaccaatttcgagaatttgtgtatgtacacatgatacacgctgcactgacaacatcagataattatttcttatgtttaagaaacatttctcacaaagggctagctagaaaatgtggttataataatctcagcatagattctgaaattaacaatagcaagcctaaagaacttttgatttgatcagatataatcataggctcttagctcccaatctaagatatacctgatggtctgttcttgctgttacttagcatggcatgccttgtttgctggaacaggggtagtatgaaacgaacaagggaagtgaaggagctcataggggtgtgataatggatcacgatccaaatgtttcttcataattcatttgagcccttaaataattttagtttaaaaataaatagaaatagagctcgatccaaatccgacccgatccttaaattttatagtataaaatttagagcctattaccacccctaggagctcaattccaacaatactcactggtttgctggaaagaaaataatctgtaacttgaagtaactcctcagccatccatgtgaacgatgaaagcctcctaagagattctcgggaaccctctggcaagctcatcaacatttgctttcctgttgttaaaaaatggtaactttttataattttttttggaccatggcaactttgtataaattatactgcttggagctttccttcagctttagcttggatgttagtaaataacaaaaccattcaattgtataagtctttaagatgtgcaaaatacatattggattttagtaaataacaaaatcatttaattgtaactggatagaagataatgatgatgtactatttaccttttccagaggtgtaattatagagacacatgcatgctagaaccctttcgtcaagctcatttcctggatgaaggtgacttgctatgtcatgcaacaagatctcacaagcagaatatcttatggcattttcaccaagggcagccagctcgcttccgagccatgcagtgcataagaggcaattctgcaagaatcaagccagtcgatgttcctgattgtatttctttgtgatgttgatgtgagaccagctttctttgtgagccatgctgcagtgtacgattctcctgaccaggaataagtccctccgaggtttgaaagaaaacatgctgataatgcctgtactctactgttttcttgagatgatagagagtccaacaggacttccatcgcttcatcttggaacacactcctgccatctgatctctcctgccaaaaggaataatatggaacctgctgcttcagatattgtgaggttacttgtaatggtaataatagtaacaacgaggatgttgtgtttttgaagaattggtgaaaccatgaaaaacaatttttttttgcttttctgttttcaattttgcttgtgctttgtatggtaaatacttattcagactaggggtatctgtgtagcaaactgtctatgtaccatcatatccaattgcaggagaaggctagctcctaaaacccgatgttcaggtccagtttgatggaggctgaccatcagtgtgtgcataattgcaatgccaccttgccgtcttatttcttcaagcagagagtttgctgaggacctggaagtttgcacaattcaataagttatccagcacacttggcccggtgctcttttcgtctcagaaggtgaaggaatgggtccactggagtagcctgtgacaagaacttc

SEQ ID NO: 62733 - DNA, 2777 bp, Zea Mays
ctttcctcatcctttgattgtcaatcctacatgctttgtattctacgactgctgtttgtctgacctgatccggtgcagtgtcatagctagtttgcagaggaactatgcagaggctctaagcaggaacgatatcaaggcaatcgtcctcactggttccaaaggaaggttttgtggtggattcgatatagccgcgtttgaaaataagccaaaaaatgagaagcctggatccatgtctattgattttttgactgacatagtggaagatgctcacaaaccgtcagtggctgctatagatggcattgctctaggtggtggattggaggttgcgatggtttgccatgctcgcatttcaacaccgtcagctcagttaggactacctgaacttcaacttggaatcattcctggaatgggagggacacaacgtcttccccgtcttgttggtctgccaaaagcccttgagatgatgttgacatcaaagactataaaaggcaagatggcacatgaactcggtttagttgatgctgttacctcagctaataaattggtcaacactgcctgttcctgggctctggaaatttttgaaaagaagaaaccatggttcaaaagtctccacagaactgatagacttccagatcttgaggaagtgaaggatattctgaaatttgcaagagttcaagctgaaatgaaggctgctaatgttcagcatccaatagtttgcattgatgttattaaagaaggaataatctctggccctcgtgcaggcctcatgaaggaagtgctctctgggaaaatgcttgagcagtctcaaacaagcaaaagcttaaggcactttttttttgctcagcgtgccacttcaaagattccaaatattaccaacataggtttgacagcacggaaaattaaaaaggcagctatcgttgggggtggtctaatgggatccggaattgcaacaatactgatattgaacaactttaatgttgtcttgaaagaagtaaatgaacagttcttatctgctggcattaacagaattaaagtgaatttgcaaagtcttgtcagaaagggtcaacttactgaagaagattatgaaaagaagctttctctgctatgtggtgctcttgactatgaacagttcagagatacagatgtagtaattgaggcggtaattgaggatatggtgctgaagcagcaaatattttctgaccttgagaagtattgccatcataattgcatatttgcaacaaacacttcaacaatagacctgaacataattggtcagaagacagcttctcaggaccgcattgttggtgcacacttctttagtccagctcatgtcatgtcactgttggaaatagtttgtactcatcatacttcctctcaagttattgtggacctgattgatttggcaaagaaaatacagaaaacaccaatagttgttggcaactgcacaggtttcgctgtcaaccggatgttctttccttacgctcaggcagcttcttttcttgttgattatggtctggatgtgtatcacatagatcatgtgatcacacaatttggaatgccaatggggcccttccgattagccgatcttgttggttttggtgttgctattgctacaagaaagcaatattaccaaagttatcctgagcgaagttacaaatcaatgcttcttcagattcttgttgaggataataggacaggtgaatcttcttgtaagggcttctatgtatatgatgataaacgcaaagcctctcgagatcctgattttgggaagtacattgaaaaatcaaggaacatggcaggtgttatgcaagatcctaagctgatgaaactaacagataatgacatcgtggagatgatcttctttcctgtggtgaatgaagcctgccgagtgcttgatgagggaattgctctcaaagcatctgaccttgatgtagcttccattatggggatgggtttcccttcttacaggggtggagtaatgttttgggctgactcgcttggtgcgaaatatgtgtatgacaaactggatgcatggtcgaaggattatggggagttcttcagaccctgtgaatatttagctgtgagagctcgtcagggtgcatccctggctgccaaggttgatggtgtcaaatcgcgactctagggttttgttgttcatttgtccggacatgcttatacggactttggcctcaatgacattgagatgttgtgaaaacccttgagcaccaactgttacaatcatgcagttgcaaaacctgcacaagtgaattatacggaggcctagcgaagtggaaattgcatgtgccttcgtgggattgctgaggatctgcagcaggaatttctctgaaatattatgtgcagttttctgaagtgatgctgacaactttgcatagaatagttacagggagtttctcctagacgttttgcgggaatatactttgttgcagtggattcttatttttttaaaaataaaactcgtgaaatccatggtcgtatgtacgatactacctccgttctttttgaatatttgtcattcgctagttaattttttaactaaaacacgataaataaaaaataatggagggaatacaacatttcagttcgatcatctgctcaaaaagtacacgttcatatcgatggaattgccaaaatgatgtaccgagctgcttatgatttccacgcattttaatcgtactgctttgtttaaaactgtagcatggtctcatgtctcatggcctgtcttttaagacagtgtttggttgagagttaagagcctg

SEQ ID NO: 62734 - DNA, 3045 bp, Zea Mays
aacccaggccaacacggcgccccggaatccctccactcctcccgccgcactaccgttgccgttgcgattcgcgagtcctccctagccgccgggcgccgcgccccgccggcccttcctcccgctgcatactacattagccaggggctcggcgacccggtgcggcggtgccagcagccgcagccggcaggcagcatcaggccagcatctcggcctcggcgtgacccggtggccgcgtgggcaggcagcagactgagccctgcaaaccgcatgcacgcacgccgcaggcaggctagcaagcagtcagctctgtattgattgtgcttttggagtggcactaaacgtggaaattgacgggctccgctactggtagccgttgccgtagatggcgaggggcatcaccaccatggaggtgcgcgccgacggcgtggccgtcatcaccatcatcaacccgcccgtcaacgccctctcgctcgacgtcatagctagtttgcagaggaactatgcagaggctctaagcaggaacgatatcaaggcaatcgtcctcactggttccaaaggaaggttttgtggtggattcgatatagccgcgtttgaaaataagccaaaaaatgagaagcctggatccatgtctattgattttttgactgacatagtggaagatgctcacaaaccgtcagtggctgctatagatggcattgctctaggtggtggattggaggttgcgatggtttgccatgctcgcatttcaacaccgtcagctcagttaggactacctgaacttcaacttggaatcattcctggaatgggagggacacaacgtcttccccgtcttgttggtctgccaaaagcccttgagatgatgttgacatcaaagactataaaaggcaagatggcacatgaactcggtttagttgatgctgttacctcagctaataaattggtcaacactgcctgttcctgggctctggaaatttttgaaaagaagaaaccatggttcaaaagtctccacagaactgatagacttccagatcttgaggaagtgaaggatattctgaaatttgcaagagttcaagctgaaatgaaggctgctaatgttcagcatccaatagtttgcattgatgttattaaagaaggaataatctctggccctcgtgcaggcctcatgaaggaagtgctctctgggaaaatgcttgagcagtctcaaacaagcaaaagcttaaggcactttttttttgctcagcgtgccacttcaaagattccaaatattaccaacataggtttgacagcacggaaaattaaaaaggcagctatcgttgggggtggtctaatgggatccggaattgcaacaatactgatattgaacaactttaatgttgtcttgaaagaagtaaatgaacagttcttatctgctggcattaacagaattaaagtgaatttgcaaagtcttgtcagaaagggtcaacttactgaagaagattatgaaaagaagctttctctgctatgtggtgctcttgactatgaacagttcagagatacagatgtagtaattgaggcggtaattgaggatatggtgctgaagcagcaaatattttctgaccttgagaagtattgccatcataattgcatatttgcaacaaacacttcaacaatagacctgaacataattggtcagaagacagcttctcaggaccgcattgttggtgcacacttctttaggtttcgctgtcaaccggatgttctttccttacgctcaggcagcttcttttcttgttgattatggtctggatgtgtatcacatagatcatgtgatcacacaatttggaatgccaatggggcccttccgattagccgatcttgttggttttggtgttgctattgctacaagaaagcaatattaccaaagttatcctgagcgaagttacaaatcaatgcttcttcagattcttgttgaggataataggacaggtgaatcttcttgtaagggcttctatgtatatgatgataaacgcaaagcctctcgagatcctgattttgggaagtacattgaaaaatcaaggaacatggcaggtgttatgcaagatcctaagctgatgaaactaacagataatgacatcgtggagatgatcttctttcctgtggtgaatgaagcctgccgagtgcttgatgagggaattgctctcaaagcatctgaccttgatgtagcttccattatggggatgggtttcccttcttacaggggtggagtaatgttttgggctgactcgcttggtgcgaaatatgtgtatgacaaactggatgcatggtcgaaggattatggggagttcttcagaccctgtgaatatttagctgtgagagctcgtcagggtgcatccctggctgccaaggttgatggtgtcaaatcgcgactctagggttttgttgttcatttgtccggacatgcttatacggactttggcctcaatgacattgagatgttgtgaaaacccttgagcaccaactgttacaatcatgcagttgcaaaacctgcacaagtgaattatacggaggcctagcgaagtggaaattgcatgtgccttcgtgggattgctgaggatctgcagcaggaatttctctgaaatattatgtgcagttttctgaagtgatgctgacaactttgcatagaatagttacagggagtttctcctagacgttttgcgggaatatactttgttgcagtggattcttatttttttaaaaataaaactcgtgaaatccatggtcgtatgtacgatactacctccgttctttttgaatatttgtcattcgctagttaattttttaactaaaacacgataaataaaaaataatggagggaatacaacatttcagttcgatcatctgctcaaaaagtacacgttcatatcgatggaattgccaaaatgatgtaccgagctgcttatgatttccacgcattttaatcgtactgctttgtttaaaactgtagcatggtctcatgtctcatggcctgtcttttaagacagtgtttggttgagagttaagagcctg

SEQ ID NO: 62735 - DNA, 2749 bp, Zea Mays
aacccaggccaacacggcgccccggaatccctccactcctcccgccgcactaccgttgccgttgcgattcgcgagtcctccctagccgccgggcgccgcgccccgccggcccttcctcccgctgcatactacattagccaggggctcggcgacccggtgcggcggtgccagcagccgcagccggcaggcagcatcaggccagcatctcggcctcggcgtgacccggtggccgcgtgggcaggcagcagactgagccctgcaaaccgcatgcacgcacgccgcagccgttgccgtagatggcgaggggcatcaccaccatggaggtgcgcgccgacggcgtggccgtcatcaccatcatcaacccgcccgtcaacgccctctcgctcgacggtttgccatgctcgcatttcaacaccgtcagctcagttaggactacctgaacttcaacttggaatcattcctggaatgggagggacacaacgtcttccccgtcttgttggtctgccaaaagcccttgagatgatgttgacatcaaagactataaaaggcaagatggcacatgaactcggtttagttgatgctgttacctcagctaataaattggtcaacactgcctgttcctgggctctggaaatttttgaaaagaagaaaccatggttcaaaagtctccacagaactgatagacttccagatcttgaggaagtgaaggatattctgaaatttgcaagagttcaagctgaaatgaaggctgctaatgttcagcatccaatagtttgcattgatgttattaaagaaggaataatctctggccctcgtgcaggcctcatgaagattccaaatattaccaacataggtttgacagcacggaaaattaaaaaggcagctatcgttgggggtggtctaatgggatccggaattgcaacaatactgatattgaacaactttaatgttgtcttgaaagaagtaaatgaacagttcttatctgctggcattaacagaattaaagtgaatttgcaaagtcttgtcagaaagggtcaacttactgaagaagattatgaaaagaagctttctctgctatgtggtgctcttgactatgaacagttcagagatacagatgtagtaattgaggcggtaattgaggatatggtgctgaagcagcaaatattttctgaccttgagaagtattgccatcataattgcatatttgcaacaaacacttcaacaatagacctgaacataattggtcagaagacagcttctcaggaccgcattgttggtgcacacttctttagtccagctcatgtcatgtcactgttggaaatagtttgtactcatcatacttcctctcaagttattgtggacctgattgatttggcaaagaaaatacagaaaacaccaatagttgttggcaactgcacaggtttcgctgtcaaccggatgttctttccttacgctcaggcagcttcttttcttgttgattatggtctggatgtgtatcacatagatcatgtgatcacacaatttggaatgccaatggggcccttccgattagccgatcttgttggttttggtgttgctattgctacaagaaagcaatattaccaaagttatcctgagcgaagttacaaatcaatgcttcttcagattcttgttgaggataataggacaggtgaatcttcttgtaagggcttctatgtatatgatgataaacgcaaagcctctcgagatcctgattttgggaagtacattgaaaaatcaaggaacatggcaggtgttatgcaagatcctaagctgatgaaactaacagataatgacatcgtggagatgatcttctttcctgtggtgaatgaagcctgccgagtgcttgatgagggaattgctctcaaagcatctgaccttgatgtagcttccattatggggatgggtttcccttcttacaggggtggagtaatgttttgggctgactcgcttggtgcgaaatatgtgtatgacaaactggatgcatggtcgaaggattatggggagttcttcagaccctgtgaatatttagctgtgagagctcgtcagggtgcatccctggctgccaaggttgatggtgtcaaatcgcgactctagggttttgttgttcatttgtccggacatgcttatacggactttggcctcaatgacattgagatgttgtgaaaacccttgagcaccaactgttacaatcatgcagttgcaaaacctgcacaagtgaattatacggaggcctagcgaagtggaaattgcatgtgccttcgtgggattgctgaggatctgcagcaggaatttctctgaaatattatgtgcagttttctgaagtgatgctgacaactttgcatagaatagttacagggagtttctcctagacgttttgcgggaatatactttgttgcagtggattcttatttttttaaaaataaaactcgtgaaatccatggtcgtatgtacgatactacctccgttctttttgaatatttgtcattcgctagttaattttttaactaaaacacgataaataaaaaataatggagggaatacaacatttcagttcgatcatctgctcaaaaagtacacgttcatatcgatggaattgccaaaatgatgtaccgagctgcttatgatttccacgcattttaatcgtactgctttgtttaaaactgtagcatggtctcatgtctcatggcctgtcttttaagacagtgtttggttgagagttaagagcctg

SEQ ID NO: 62736 - DNA, 2933 bp, Zea Mays
atcggccataaaacccaggccaacacggcgccccggaatccctccactcctcccgccgcactaccgttgccgttgcgattcgcgagtcctccctagccgccgggcgccgcgccccgccggcccttcctcccgctgcatactacattagccaggggctcggcgacccggtgcggcggtgccagcagccgcagccggcaggcagcatcaggccagcatctcggcctcggcgtgacccggtggccgcgtgggcaggcagcagactgagccctgcaaaccgcatgcacgcacgccgcaggcaggctagcaagcagtcagctctgtattgattgtgcttttggagtggcactaaacgtggaaattgacgggctccgctactggtagccgttgccgtagatggcgaggggcatcaccaccatggaggtgcgcgccgacggcgtggccgtcatcaccatcatcaacccgcccgtcaacgccctctcgctcgacggtttgccatgctcgcatttcaacaccgtcagctcagttaggactacctgaacttcaacttggaatcattcctggaatgggagggacacaacgtcttccccgtcttgttggtctgccaaaagcccttgagatgatgttgacatcaaagactataaaaggcaagatggcacatgaactcggtttagttgatgctgttacctcagctaataaattggtcaacactgcctgttcctgggctctggaaatttttgaaaagaagaaaccatggttcaaaagtctccacagaactgatagacttccagatcttgaggaagtgaaggatattctgaaatttgcaagagttcaagctgaaatgaaggctgctaatgttcagcatccaatagtttgcattgatgttattaaagaaggaataatctctggccctcgtgcaggcctcatgaaggaagtgctctctgggaaaatgcttgagcagtctcaaacaagcaaaagcttaaggcactttttttttgctcagcgtgccacttcaaagattccaaatattaccaacataggtttgacagcacggaaaattaaaaaggcagctatcgttgggggtggtctaatgggatccggaattgcaacaatactgatattgaacaactttaatgttgtcttgaaagaagtaaatgaacagttcttatctgctggcattaacagaattaaagtgaatttgcaaagtcttgtcagaaagggtcaacttactgaagaagattatgaaaagaagctttctctgctatgtggtgctcttgactatgaacagttcagagatacagatgtagtaattgaggcggtaattgaggatatggtgctgaagcagcaaatattttctgaccttgagaagtattgccatcataattgcatatttgcaacaaacacttcaacaatagacctgaacataattggtcagaagacagcttctcaggaccgcattgttggtgcacacttctttagtccagctcatgtcatgtcactgttggaaatagtttgtactcatcatacttcctctcaagttattgtggacctgattgatttggcaaagaaaatacagaaaacaccaatagttgttggcaactgcacaggtttcgctgtcaaccggatgttctttccttacgctcaggcagcttcttttcttgttgattatggtctggatgtgtatcacatagatcatgtgatcacacaatttggaatgccaatggggcccttccgattagccgatcttgttggttttggtgttgctattgctacaagaaagcaatattaccaaagttatcctgagcgaagttacaaatcaatgcttcttcagattcttgttgaggataataggacaggtgaatcttcttgtaagggcttctatgtatatgatgataaacgcaaagcctctcgagatcctgattttgggaagtacattgaaaaatcaaggaacatggcaggtgttatgcaagatcctaagctgatgaaactaacagataatgacatcgtggagatgatcttctttcctgtggtgaatgaagcctgccgagtgcttgatgagggaattgctctcaaagcatctgaccttgatgtagcttccattatggggatgggtttcccttcttacaggggtggagtaatgttttgggctgactcgcttggtgcgaaatatgtgtatgacaaactggatgcatggtcgaaggattatggggagttcttcagaccctgtgaatatttagctgtgagagctcgtcagggtgcatccctggctgccaaggttgatggtgtcaaatcgcgactctagggttttgttgttcatttgtccggacatgcttatacggactttggcctcaatgacattgagatgttgtgaaaacccttgagcaccaactgttacaatcatgcagttgcaaaacctgcacaagtgaattatacggaggcctagcgaagtggaaattgcatgtgccttcgtgggattgctgaggatctgcagcaggaatttctctgaaatattatgtgcagttttctgaagtgatgctgacaactttgcatagaatagttacagggagtttctcctagacgttttgcgggaatatactttgttgcagtggattcttatttttttaaaaataaaactcgtgaaatccatggtcgtatgtacgatactacctccgttctttttgaatatttgtcattcgctagttaattttttaactaaaacacgataaataaaaaataatggagggaatacaacatttcagttcgatcatctgctcaaaaagtacacgttcatatcgatggaattgccaaaatgatgtaccgagctgcttatgatttccacgcattttaatcgtactgctttgtttaaaactgtagcatggtctcatgtctcatggcctgtcttttaagacagtgtttggttgagagttaagagcctg

SEQ ID NO: 62737 - DNA, 3190 bp, Zea Mays
gtcccattcccatcggccataaaacccaggccaacacggcgccccggaatccctccactcctcccgccgcactaccgttgccgttgcgattcgcgagtcctccctagccgccgggcgccgcgccccgccggcccttcctcccgctgcatactacattagccaggggctcggcgacccggtgcggcggtgccagcagccgcagccggcaggcagcatcaggccagcatctcggcctcggcgtgacccggtggccgcgtgggcaggcagcagactgagccctgcaaaccgcatgcacgcacgccgcaggcaggctagcaagcagtcagctctgtattgattgtgcttttggagtggcactaaacgtggaaattgacgggctccgctactggtagccgttgccgtagatggcgaggggcatcaccaccatggaggtgcgcgccgacggcgtggccgtcatcaccatcatcaacccgcccgtcaacgccctctcgctcgacgtcatagctagtttgcagaggaactatgcagaggctctaagcaggaacgatatcaaggcaatcgtcctcactggttccaaaggaaggttttgtggtggattcgatatagccgcgtttgaaaataagccaaaaaatgagaagcctggatccatgtctattgattttttgactgacatagtggaagatgctcacaaaccgtcagtggctgctatagatggcattgctctaggtggtggattggaggttgcgatggtttgccatgctcgcatttcaacaccgtcagctcagttaggactacctgaacttcaacttggaatcattcctggaatgggagggacacaacgtcttccccgtcttgttggtctgccaaaagcccttgagatgatgttgacatcaaagactataaaaggcaagatggcacatgaactcggtttagttgatgctgttacctcagctaataaattggtcaacactgcctgttcctgggctctggaaatttttgaaaagaagaaaccatggttcaaaagtctccacagaactgatagacttccagatcttgaggaagtgaaggatattctgaaatttgcaagagttcaagctgaaatgaaggctgctaatgttcagcatccaatagtttgcattgatgttattaaagaaggaataatctctggccctcgtgcaggcctcatgaaggaagtgctctctgggaaaatgcttgagcagtctcaaacaagcaaaagcttaaggcactttttttttgctcagcgtgccacttcaaagattccaaatattaccaacataggtttgacagcacggaaaattaaaaaggcagctatcgttgggggtggtctaatgggatccggaattgcaacaatactgatattgaacaactttaatgttgtcttgaaagaagtaaatgaacagttcttatctgctggcattaacagaattaaagtgaatttgcaaagtcttgtcagaaagggtcaacttactgaagaagattatgaaaagaagctttctctgctatgtggtgctcttgactatgaacagttcagagatacagatgtagtaattgaggcggtaattgaggatatggtgctgaagcagcaaatattttctgaccttgagaagtattgccatcataattgcatatttgcaacaaacacttcaacaatagacctgaacataattggtcagaagacagcttctcaggaccgcattgttggtgcacacttctttagctcatgtcatgtcactgttggaaatagtttgtactcatcatacttcctctcaagttattgtggacctgattgatttggcaaagaaaatacagaaaacaccaatagttgttggcaactgcacaggtttcgctgtcaaccggatgttctttccttacgctcaggcagcttcttttcttgttgattatggtctggatgtgtatcacatagatcatgtgatcacacaatttggaatgccaatggggcccttccgattagccgatcttgttggttttggtgttgctattgctacaagaaagcaatattaccaaagttatcctgagcgaagttacaaatcaatgcttcttcagattcttgttgaggataataggacaggtgaatcttcttgtaagggcttctatgtatatgatgataaacgcaaagcctctcgagatcctgattttgggaagtacattgaaaaatcaaggaacatggcaggtgttatgcaagatcctaagctgatgaaactaacagataatgacatcgtggagatgatcttctttcctgtggtgaatgaagcctgccgagtgcttgatgagggaattgctctcaaagcatctgaccttgatgtagcttccattatggggatgggtttcccttcttacaggggtggagtaatgttttgggctgactcgcttggtgcgaaatatgtgtatgacaaactggatgcatggtcgaaggattatggggagttcttcagaccctgtgaatatttagctgtgagagctcgtcagggtgcatccctggctgccaaggttgatggtgtcaaatcgcgactctagggttttgttgttcatttgtccggacatgcttatacggactttggcctcaatgacattgagatgttgtgaaaacccttgagcaccaactgttacaatcatgcagttgcaaaacctgcacaagtgaattatacggaggcctagcgaagtggaaattgcatgtgccttcgtgggattgctgaggatctgcagcaggaatttctctgaaatattatgtgcagttttctgaagtgatgctgacaactttgcatagaatagttacagggagtttctcctagacgttttgcgggaatatactttgttgcagtggattcttatttttttaaaaataaaactcgtgaaatccatggtcgtatgtacgatactacctccgttctttttgaatatttgtcattcgctagttaattttttaactaaaacacgataaataaaaaataatggagggaatacaacatttcagttcgatcatctgctcaaaaagtacacgttcatatcgatggaattgccaaaatgatgtaccgagctgcttatgatttccacgcattttaatcgtactgctttgtttaaaactgtagcatggtctcatgtctcatggcctgtcttttaagacagtgtttggttgagagttaagagcctg

SEQ ID NO: 62738 - DNA, 2974 bp, Zea Mays
cctgaggtcccattcccatcggccataaaacccaggccaacacggcgccccggaatccctccactcctcccgccgcactaccgttgccgttgcgattcgcgagtcctccctagccgccgggcgccgcgccccgccggcccttcctcccgctgcatactacattagccaggggctcggcgacccggtgcggcggtgccagcagccgcagccggcaggcagcatcaggccagcatctcggcctcggcgtgacccggtggccgcgtgggcaggcagcagactgagccctgcaaaccgcatgcacgcacgccgcagccgttgccgtagatggcgaggggcatcaccaccatggaggtgcgcgccgacggcgtggccgtcatcaccatcatcaacccgcccgtcaacgccctctcgctcgacgtcatagctagtttgcagaggaactatgcagaggctctaagcaggaacgatatcaaggcaatcgtcctcactggttccaaaggaaggttttgtggtggattcgatatagccgcgtttgaaaataagccaaatgctcacaaaccgtcagtggctgctatagatggcattgctctaggtggtggattggaggttgcgatggtttgccatgctcgcatttcaacaccgtcagctcagttaggactacctgaacttcaacttggaatcattcctggaatgggagggacacaacgtcttccccgtcttgttggtctgccaaaagcccttgagatgatgttgacatcaaagactataaaaggcaagatggcacatgaactcggtttagttgatgctgttacctcagctaataaattggtcaacactgcctgttcctgggctctggaaatttttgaaaagaagaaaccatggttcaaaagtctccacagaactgatagacttccagatcttgaggaagtgaaggatattctgaaatttgcaagagttcaagctgaaatgaaggctgctaatgttcagcatccaatagtttgcattgatgttattaaagaaggaataatctctggccctcgtgcaggcctcatgaagattccaaatattaccaacataggtttgacagcacggaaaattaaaaaggcagctatcgttgggggtggtctaatgggatccggaattgcaacaatactgatattgaacaactttaatgttgtcttgaaagaagtaaatgaacagttcttatctgctggcattaacagaattaaagtgaatttgcaaagtcttgtcagaaagggtcaacttactgaagaagattatgaaaagaagctttctctgctatgtggtgctcttgactatgaacagttcagagatacagatgtagtaattgaggcggtaattgaggatatggtgctgaagcagcaaatattttctgaccttgagaagtattgccatcataattgcatatttgcaacaaacacttcaacaatagacctgaacataattggtcagaagacagcttctcaggaccgcattgttggtgcacacttctttagtccagctcatgtcatgtcactgttggaaatagtttgtactcatcatacttcctctcaagttattgtggacctgattgatttggcaaagaaaatacagaaaacaccaatagttgttggcaactgcacaggtttcgctgtcaaccggatgttctttccttacgctcaggcagcttcttttcttgttgattatggtctggatgtgtatcacatagatcatgtgatcacacaatttggaatgccaatggggcccttccgattagccgatcttgttggttttggtgttgctattgctacaagaaagcaatattaccaaagttatcctgagcgaagttacaaatcaatgcttcttcagattcttgttgaggataataggacaggtgaatcttcttgtaagggcttctatgtatatgatgataaacgcaaagcctctcgagatcctgattttgggaagtacattgaaaaatcaaggaacatggcaggtgttatgcaagatcctaagctgatgaaactaacagataatgacatcgtggagatgatcttctttcctgtggtgaatgaagcctgccgagtgcttgatgagggaattgctctcaaagcatctgaccttgatgtagcttccattatggggatgggtttcccttcttacaggggtggagtaatgttttgggctgactcgcttggtgcgaaatatgtgtatgacaaactggatgcatggtcgaaggattatggggagttcttcagaccctgtgaatatttagctgtgagagctcgtcagggtgcatccctggctgccaaggttgatggtgtcaaatcgcgactctagggttttgttgttcatttgtccggacatgcttatacggactttggcctcaatgacattgagatgttgtgaaaacccttgagcaccaactgttacaatcatgcagttgcaaaacctgcacaagtgaattatacggaggcctagcgaagtggaaattgcatgtgccttcgtgggattgctgaggatctgcagcaggaatttctctgaaatattatgtgcagttttctgaagtgatgctgacaactttgcatagaatagttacagggagtttctcctagacgttttgcgggaatatactttgttgcagtggattcttatttttttaaaaataaaactcgtgaaatccatggtcgtatgtacgatactacctccgttctttttgaatatttgtcattcgctagttaattttttaactaaaacacgataaataaaaaataatggagggaatacaacatttcagttcgatcatctgctcaaaaagtacacgttcatatcgatggaattgccaaaatgatgtaccgagctgcttatgatttccacgcattttaatcgtactgctttgtttaaaactgtagcatggtctcatgtctcatggcctgtcttttaagacagtgtttggttgagagttaagagcctg

SEQ ID NO: 62739 - DNA, 3141 bp, Zea Mays
gtcacatctcacaagcatacaaaacccctgaggtcccattcccatcggccataaaacccaggccaacacggcgccccggaatccctccactcctcccgccgcactaccgttgccgttgcgattcgcgagtcctccctagccgccgggcgccgcgccccgccggcccttcctcccgctgcatactacattagccaggggctcggcgacccggtgcggcggtgccagcagccgcagccggcaggcagcatcaggccagcatctcggcctcggcgtgacccggtggccgcgtgggcaggcagcagactgagccctgcaaaccgcatgcacgcacgccgcagccgttgccgtagatggcgaggggcatcaccaccatggaggtgcgcgccgacggcgtggccgtcatcaccatcatcaacccgcccgtcaacgccctctcgctcgacgtcatagctagtttgcagaggaactatgcagaggctctaagcaggaacgatatcaaggcaatcgtcctcactggttccaaaggaaggttttgtggtggattcgatatagccgcgtttgaaaataagccaaaaaatgagaagcctggatccatgtctattgattttttgactgacatagtggaagatgctcacaaaccgtcagtggctgctatagatggcattgctctaggtggtggattggaggttgcgatggtttgccatgctcgcatttcaacaccgtcagctcagttaggactacctgaacttcaacttggaatcattcctggaatgggagggacacaacgtcttccccgtcttgttggtctgccaaaagcccttgagatgatgttgacatcaaagactataaaaggcaagatggcacatgaactcggtttagttgatgctgttacctcagctaataaattggtcaacactgcctgttcctgggctctggaaatttttgaaaagaagaaaccatggttcaaaagtctccacagaactgatagacttccagatcttgaggaagtgaaggatattctgaaatttgcaagagttcaagctgaaatgaaggctgctaatgttcagcatccaatagtttgcattgatgttattaaagaaggaataatctctggccctcgtgcaggcctcatgaaggaagtgctctctgggaaaatgcttgagcagtctcaaacaagcaaaagcttaaggcactttttttttgctcagcgtgccacttcaaagattccaaatattaccaacataggtttgacagcacggaaaattaaaaaggcagctatcgttgggggtggtctaatgggatccggaattgcaacaatactgatattgaacaactttaatgttgtcttgaaagaagtaaatgaacagttcttatctgctggcattaacagaattaaagtgaatttgcaaagtcttgtcagaaagggtcaacttactgaagaagattatgaaaagaagctttctctgctatgtggtgctcttgactatgaacagttcagagatacagatgtagtaattgaggcggtaattgaggatatggtgctgaagcagcaaatattttctgaccttgagaagtattgccatcataattgcatatttgcaacaaacacttcaacaatagacctgaacataattggtcagaagacagcttctcaggaccgcattgttggtgcacacttctttagtccagctcatgtcatgtcactgttggaaatagtttgtactcatcatacttcctctcaagttattgtggacctgattgatttggcaaagaaaatacagaaaacaccaatagttgttggcaactgcacaggtttcgctgtcaaccggatgttctttccttacgctcaggcagcttcttttcttgttgattatggtctggatgtgtatcacatagatcatgtgatcacacaatttggaatgccaatggggcccttccgattagccgatcttgttggttttggtgttgctattgctacaagaaagcaatattaccaaagttatcctgagcgaagttacaaatcaatgcttcttcagattcttgttgaggataataggacaggtgaatcttcttgtaagggcttctatgtatatgatgataaacgcaaagcctctcgagatcctgattttgggaagtacattgaaaaatcaaggaacatggcaggtgttatgcaagatcctaagctgatgaaactaacagataatgacatcgtggagatgatcttctttcctgtggtgaatgaagcctgccgagtgcttgatgagggaattgctctcaaagcatctgaccttgatgtagcttccattatggggatgggtttcccttcttacaggggtggagtaatgttttgggctgactcgcttggtgcgaaatatgtgtatgacaaactggatgcatggtcgaaggattatggggagttcttcagaccctgtgaatatttagctgtgagagctcgtcagggtgcatccctggctgccaaggttgatggtgtcaaatcgcgactctagggttttgttgttcatttgtccggacatgcttatacggactttggcctcaatgacattgagatgttgtgaaaacccttgagcaccaactgttacaatcatgcagttgcaaaacctgcacaagtgaattatacggaggcctagcgaagtggaaattgcatgtgccttcgtgggattgctgaggatctgcagcaggaatttctctgaaatattatgtgcagttttctgaagtgatgctgacaactttgcatagaatagttacagggagtttctcctagacgttttgcgggaatatactttgttgcagtggattcttatttttttaaaaataaaactcgtgaaatccatggtcgtatgtacgatactacctccgttctttttgaatatttgtcattcgctagttaattttttaactaaaacacgataaataaaaaataatggagggaatacaacatttcagttcgatcatctgctcaaaaagtacacgttcatatcgatggaattgccaaaatgatgtaccgagctgcttatgatttccacgcattttaatcgtactgctttgtttaaaactgtagcatggtctcatgtctcatggcctgtcttttaagacagtgtttggttgagagttaagagcctg

SEQ ID NO: 62740 - DNA, 3140 bp, Zea Mays
gtcacatctcacaagcatacaaaacccctgaggtcccattcccatcggccataaaacccaggccaacacggcgccccggaatccctccactcctcccgccgcactaccgttgccgttgcgattcgcgagtcctccctagccgccgggcgccgcgccccgccggcccttcctcccgctgcatactacattagccaggggctcggcgacccggtgcggcggtgccagcagccgcagccggcaggcagcatcaggccagcatctcggcctcggcgtgacccggtggccgcgtgggcaggcagcagactgagccctgcaaaccgcatgcacgcacgccgcaggcaggctagcaagcagtcagctctgtattgattgtgcttttggagtggcactaaacgtggaaattgacgggctccgctactggtagccgttgccgtagatggcgaggggcatcaccaccatggaggtgcgcgccgacggcgtggccgtcatcaccatcatcaacccgcccgtcaacgccctctcgctcgacgtcatagctagtttgcagaggaactatgcagaggctctaagcaggaacgatatcaaggcaatcgtcctcactggttccaaaggaaggttttgtggtggattcgatatagccgcgtttgaaaataagccaaaaaatgagaagcctggatccatgtctattgattttttgactgacatagtggaagatgctcacaaaccgtcagtggctgctatagatggcattgctctaggtggtggattggaggttgcgatggtttgccatgctcgcatttcaacaccgtcagctcagttaggactacctgaacttcaacttggaatcattcctggaatgggagggacacaacgtcttccccgtcttgttggtctgccaaaagcccttgagatgatgttgacatcaaagactataaaaggcaagatggcacatgaactcggtttagttgatgctgttacctcagctaataaattggtcaacactgcctgttcctgggctctggaaatttttgaaaagaagaaaccatggttcaaaagtctccacagaactgatagacttccagatcttgaggaagtgaaggatattctgaaatttgcaagagttcaagctgaaatgaaggctgctaatgttcagcatccaatagtttgcattgatgttattaaagaaggaataatctctggccctcgtgcaggcctcatgaagattccaaatattaccaacataggtttgacagcacggaaaattaaaaaggcagctatcgttgggggtggtctaatgggatccggaattgcaacaatactgatattgaacaactttaatgttgtcttgaaagaagtaaatgaacagttcttatctgctggcattaacagaattaaagtgaatttgcaaagtcttgtcagaaagggtcaacttactgaagaagattatgaaaagaagctttctctgctatgtggtgctcttgactatgaacagttcagagatacagatgtagtaattgaggcggtaattgaggatatggtgctgaagcagcaaatattttctgaccttgagaagtattgccatcataattgcatatttgcaacaaacacttcaacaatagacctgaacataattggtcagaagacagcttctcaggaccgcattgttggtgcacacttctttagtccagctcatgtcatgtcactgttggaaatagtttgtactcatcatacttcctctcaagttattgtggacctgattgatttggcaaagaaaatacagaaaacaccaatagttgttggcaactgcacaggtttcgctgtcaaccggatgttctttccttacgctcaggcagcttcttttcttgttgattatggtctggatgtgtatcacatagatcatgtgatcacacaatttggaatgccaatggggcccttccgattagccgatcttgttggttttggtgttgctattgctacaagaaagcaatattaccaaagttatcctgagcgaagttacaaatcaatgcttcttcagattcttgttgaggataataggacaggtgaatcttcttgtaagggcttctatgtatatgatgataaacgcaaagcctctcgagatcctgattttgggaagtacattgaaaaatcaaggaacatggcaggtgttatgcaagatcctaagctgatgaaactaacagataatgacatcgtggagatgatcttctttcctgtggtgaatgaagcctgccgagtgcttgatgagggaattgctctcaaagcatctgaccttgatgtagcttccattatggggatgggtttcccttcttacaggggtggagtaatgttttgggctgactcgcttggtgcgaaatatgtgtatgacaaactggatgcatggtcgaaggattatggggagttcttcagaccctgtgaatatttagctgtgagagctcgtcagggtgcatccctggctgccaaggttgatggtgtcaaatcgcgactctagggttttgttgttcatttgtccggacatgcttatacggactttggcctcaatgacattgagatgttgtgaaaacccttgagcaccaactgttacaatcatgcagttgcaaaacctgcacaagtgaattatacggaggcctagcgaagtggaaattgcatgtgccttcgtgggattgctgaggatctgcagcaggaatttctctgaaatattatgtgcagttttctgaagtgatgctgacaactttgcatagaatagttacagggagtttctcctagacgttttgcgggaatatactttgttgcagtggattcttatttttttaaaaataaaactcgtgaaatccatggtcgtatgtacgatactacctccgttctttttgaatatttgtcattcgctagttaattttttaactaaaacacgataaataaaaaataatggagggaatacaacatttcagttcgatcatctgctcaaaaagtacacgttcatatcgatggaattgccaaaatgatgtaccgagctgcttatgatttccacgcattttaatcgtactgctttgtttaaaactgtagcatggtctcatgtctcatggcctgtcttttaagacagtgtttggttgagagttaagagcctg

SEQ ID NO: 62741 - DNA, 1220 bp, Zea Mays
atcacattgcttctgcgacctgatcgacatactatcgcacggactgcatgcacacggatcccatcgtctaccaccaaactagcccaccaaatctcctttccactttctacctacctcctcgcatccgtcgcagtcgccggttgtttcactcattcgaaatttcgttccaccacgtgcgatccctttcggttattttctagggtttccaaaaatcatcggtcgcaaatcagtattctcgggcgaactggtccccttttcgctagcgttctgagttgttcaagctaacagatagcgctacggtctgcgcataattcaatcaaggagagcagcagcggatttagagttttcaatcggctctttgtccaagataaatgtcaacctccagtgagcacacaagttcggacatgggggtgaacagtggtagaacagacttgaaggatgtctctagccgctcgtagggttcaaaatcccgcaacaaggagagattcgtcaaatgatgatctggtgttccctccataccttgttaggcgctctggaaggaacaaagcacccaaacggcaacttactaggcaaatatatgatgaccatctaccgaggaagtgccaagcagtgggcaaaaagataaaggctgctactggaaaacaacaggacaaaatgcgagtcaaaaggcatggctgatatattcagagccgattgtcaaaagggcatgtctgcttttaagaagctgagcatgaatgagtctcaatatatccgaggtagattatgcccctatcgaagacatgaacatatcaaaggaatatgactaatgtcaatccatatgtgacggtctaaagaccaaggcagacaagttctgggctgacagattgggaaaatcgtcgacacccactatacaaggatgcattattttcctgattgtcatatttttttcttttcgctacttagatccagtaattgttattagtagtggtatttttgtatatttatgcatcaagtttttctagtattagtaatagctagcactattagtaatactctctacctagtatcagtaatagtagtagtagtgatctgaataatagtgtatcaagttttatagtctttgtattagttagtcgtggcagtaacacttaccaaatagttttttagtaatattttctattgtggtagtaatacccactatatactctcattaatagttagtagtgctattctgaacaatt

SEQ ID NO: 62742 - DNA, 1157 bp, Zea Mays
gtcaaaccgtactggccgaggtcaatcacattgcttctgcgacctgatcgacatactatcgcacggactgcatgcacacggatcccatcgtctaccaccaaactagcccaccaaatctcctttccactttctacctacctcctcgcatccgtcgcagtcgccggttgtttcactcattcgaaatttcgttccaccacgtgcgatccctttcggttattttctagggtttccaaaaatcatcggtcgcaaatcagtattctcgggcgaactggtccccttttcgctagcgttctgagttgttcaagctaacagatagcgctacggtctgcgcataattcaatcaaggagagcagcagcggatttagagttttcaatcggctctttgtccaagataaatgtcaacctccagtgagcacacaagttcggacatgggggtgaacagtggtagaacagacttgaaggatgtctctagccgctcgtagggttcaaaatcccgcaacaaggagagattcgtcaaatgatgatctggtgttccctccataccttgttaggcgctctggaaggaacaaagcacccaaacggcaacttactaggcaaatatatgatgaccatctaccgaggaagtgccaagcagtgggcaaaaagataaaggctgctactggaaaacaacagtgagtctcaatatatccgaggtagattatgcccctatcgaagacatgaacatatcaaaggaatatgactaatgtcaatccatatgtgacggtctaaagaccaaggcagacaagttctgggctgacagattgggaaaatcgtcgacacccactatacaaggatgcattattttcctgattgtcatatttttttcttttcgctacttagatccagtaattgttattagtagtggtatttttgtatatttatgcatcaagtttttctagtattagtaatagctagcactattagtaatactctctacctagtatcagtaatagtagtagtagtgatctgaataatagtgtatcaagttttatagtctttgtattagttagtcgtggcagtaacacttaccaaatagttttttagtaatattttctattgtggtagtaatacccactatatactctcattaatagttagtagtgctattctgaacaatt

SEQ ID NO: 62743 - DNA, 1727 bp, Zea Mays
gtgaacaagttttgtttcattacacaagaacaagaacaatcatgcacaaacttgtattagtatttcttaaaagaattcgtgccgtgggaaattcttcagatttttgtccggtccaaaacaatcagtaactgacgaattgggtgggtcaaaactaagccagaatgctgtacaatcattgcaccatagacgacaattttatgattccacagtgacatcacacacaaccaaccgaaagaagaaccaaccatttgagccacctagcagtaggtcatgattgtcctcactctatcggatgctttggtttgcagaattaaaaagccagattagttaggcaacacgaatagaaaatacaatctccaggaaggaaaaatatgccgtccacgaagaactctcaggaatgtgttgtgggttaatcttaatccactatgtgatgatgatgtggctaacttttccgtcttaagcagtgagcttaactacagctaccttgggacttgggttgagataccgagagctgaaaagaaaccatatcaccaaggacacgtatgaccccggccctctcctgtattgtttgtgaggaagagaaagccaagaggaaacaccagagactcgtgctccaatacctatgcctcctaattggcctttatccctctgaaacgaagaagtgcttactattatatgtttggttaaaaaaagggggggcttttttccatgagttgtcagaatcacaaaatgagctgaaacactgatctgacgctgtttcatgtttggtttcttatatatatgcagtagaacgcatgagcccgacgagaattttccagttttttttttttttaaaaaaagaactctatggagatatcacgtgcaatcacaaactttatgatgacacccgaaatccagtacaaaaagccgaacgaaattaatggaagaaagaagcagaacgaacagcagaggccgagtaacagagagagagggagacagagagagagagagctgacctcccagacgatggagcagtcctggttgatgcctttctcgccgcgccgcgagcagacggcggcgaacgtgtccgagccgtcgccccacagggtgcccgacgtccgcagcaccgccggcacggcggtcttgcggtcgcctgcgccgttccctttccggtccctgtccctgtccctgtccctccccaccgagagtgaccgggccaggccctgcagcagcgacgagatctgccgcattctctgggaccgctgctagcacagattaaagagctccttctcctgggcggcgcgcgacgtggctgatggagagccggctcgggagttcagagcgccggccggctgccgtgacgagggtggacagcaggcccggccatagaggacctctctctctctctctcgtccctttggggtgaagggaggagcttggattggattggacgggtagaactggatcgaacaggaagaagaaaaaaaaagagacgcttccagactaccacgctagcacgagacgatcgaacagcgtgttcttggcagctaaggagatagagggccgggaaaaaaaaggtggaccgaggaaggaagagtatcggagagggcctgtgaattgtggtttgaagcgaggtgaaagcttggacggagcttttaaaggagatggaggaggagaggaggaggaagatgaggtgggagggagagccgtgggagcaggggaagccgagtcaacaagcgcggtgcccg

SEQ ID NO: 62744 - DNA, 4652 bp, Zea Mays
atgacctatctacctcttctagaaaaccctccaagcgcggccaaaaacattcaaagtgaaatcgcctcctcccttgggagaactcatgcaaacccagcagaagggggcaatggtctgaaatcgtggaccaacaatgatgatctgcggaaagatgctgcagaagcgctctgctgcctcgcacatgcccttggagaagactttactatcttcataccatcaatacgcaaaattcttgtgaagcaccacttgcggtacagaaaatgggatgagattgaaaatcggctactgaggcgagagctactcatcactgaaaacttgtctgtgcaaaagtacacacaatgtccacctgatgtcattagagacccccttgatgattgtgatggtacaccttctgagatagctgatgatacacagcgacaagcaagaagtcatcaagtcaatgatgtccggttgcggagtgccggtgaggcttctcaaaggagtactagggaagactgggctgaatggatgagacatttcagtattgcgcttctcaaagagtcaccatctccagctttacgcacctgtgcaaggctagctcagcttcaggcagaatttatggaacatgatgagaagccacttcctattgatacaagactgcttggtgcacttgctgagaagtgtcgagcatttgcaaaggcactccattataaagaaatggaatttgaagctgtgtgcaccaagaagatgggtgcaaatcctgttacagtggttgaatcccttattcatattaacaatcaactacagcagcatgaggcagctattggcatattgacttactcacagcaaaattcggaagttcaattgaaagaatcatggtatgaaaagttgcaccgttgggatgaggctcttaaagcatacaccgtgaaatcatctcaaacatctggtccctttacaaaacttggatgctacattaggtcgaatgaggtgtctagcagctttggctcggtgggaagatttaagtgcattgtgtagagagcaatggacgggtgcagaaccatctgctcgactggaaatggctccaatggctgcaaatgctgcttggcatatgggtgagtgggaccatatggcagactatgtttctcgcctggatgatgcagatgaaaataagctccgtatgttgggtaacgcaacagctagtggtgacggaagcagtaatggtgctttcttccgggcagttcttttagttcgttacaaaaagtatgatgacgctcggatgtatgttgagcgagctcggcggtgtttagctacagaacttgcagcactggtacttgagagttatgagcgagcgtataataacatggtgcgtgttcaacaactttcagaactggaagaggtgattgattactgcactcttcccatggaaagcccgattgctgacggacggagggaacttattcgcaatatgtggaatgaacggattaaaggaacaaaacggaatgtcgaggtgtggcaagccctacttgctgtcagggagttggttcttccccctaacgaagacagagacacctggataaagttcgctgaactttgctggaagaacggtcgtattagtcaggctagatctacgttagtcaaacttttacagtttgatcctgaatcttcccctgaattgacactgtatcatgcacatccacaagtagctctggcttatctaaaataccagtatgcagttggtgatgagcttaaaaggagggatgcattttctaaactgcaagagttgtctgtgcaggttgctaccaccatgggcaatttacctggaacatcagcaaaccatggcaccatgtcaaatgctggagtaccactcattgctcgtgtctacttgacacttggtagctggaagaaggcactatcacctgcattagatgacgattccattcaagaaattttgatttcttaccataatgccacgctaagtgcaaaggactgggggaaggcctggcacatatgggctttgttcaacacagaagtcatgtcacgctatactttccgaggccgaccagatattgctggaaaatatgttgttgcagcagtaactgggtatttttattctattgcttgtgcatctactacgaaaggggtcgatgatagcttgcaggatatccttcgtctgttaactctttggttcaaccatggggatacctcagaagttcaaacagcgttgcagaaaggtttttcccttgtcaagattgagatgtggctggttgtgctgccccagataattgctaggattcattcgaacaatagagtagttagagaactgatacaatctttgctagttcgaattggaaaggggcatccacaggctttgatgtatcctctcttggttgcctgcaaatcaataagtatattgagacaacgtgcagcgcaggaggtcgttgataagatccgccagcacagtggaggtcttgttgaccaggcacaacttgtgtcgaaggaactgatacgggtagcaattttgtggcatgaaatgtggcatgaggcactcgaggaagctagcaggatgtattttggtgagcacaatatcgaaggaatgcttgctgtacttgagccattgcatgcaatgcttgagaggggggatgagacaattaaagaaaatgccttcattcaggcttatgggcatgaattactggaagctcatgaatgctgtttgaaatatcgggctacaggagaggatgctgagctaactaaggcctgggatttgtattaccatgttttcagaagaatcgacaaacagcttccaagtcttacgaccctcgatctgcactctgtttcgcctgagctactcaaatgtcgaaagttggaacttgctgtgccaggaacttatgctgcagattcaccacttgtgacgattgagtattttgttccccaattgatttgttataacgtccaaacaaaggccaagaaagctgacaattcatggaagtgatggcaatgattatgcattcttgcttaaaggccacgaagatttgcggcaagatgaacgagtaatgcagctttttggtttggtgaatactctcctagagaactcaaggaaaacatcagagaaggatttatcaatccaaagatatgctgttatacctttgtcacctaacagtggtttaattggatgggttccaaactgtgacacacttcatgctctgatccgtgaatacagagatgccaggaagattttcttgaatcaggagcacagacttatgttggcttttgcacccgattatgatcacttacccctcattgcaaaggtggaagtgtttcagcatgctttgcaaaatactgagggaaatgaccttgcgaaggttctgtggctgaagagtcgaacttcggaagtatggcttgagcgccgcacaaactacgctagaagcctggctgttatgagcatggttgggtatttgcttggtttaggagatcggcatccaagcaaccttatgttagatcgctatagtggaaaaatattacacatcgacttcggagattgctttgaggcttcaatgaatcgagaaaagttccctgaaaaagtaccattccgtttgactcgaatgcttgtgaaagctatggaagttagcggtattgagggtacattccgaacaacttgtgaaaatgtgatgcaagtccttcgcacaaacagagacagcgttatggccatgatggaggcatttgtacatgacccgttaatcaattggcgtctgttcaatttcaatgaggttcctcaagtgtcgaactatggtaatgttcatgctcacacggttgtcagtagtgaagaagcagtggctaaccgagagctcatgcaacctcagcgaggagcacgtgagagggaactgctacaggctgtcaatcaactcggtgatgccaatgaggttttgaatgagcgtgctgtagctgtgatggcacggatgagtgacaaactaacagggcgtgacttctcttctgggtcagctttggctggagcaggtagctctatccaacatggcagtgagcatttggcttcaggagatgcccgggatgcccaacctggtctctcagtgaaggttcaggttcagaagctcatactccaagcgacttcacacgaaaatttgtgccaaaactatgtcgggtggtgtccgttctggtgagctctcttggaaacagtagcagtttataacatgtaaatattgtgaataccgtgtgcatagaagtttcgtggtgacagtttgtatgtgcagctttgtaattagcagaacttcaagatgccttggaccatccttttgtcagtttcttagaccgtgtttagcagttcacccttatggccatccaaaacactgtttttgtactgtagattgtattgtttgtagattgtactgttcgcagggtggatttttgaatatgagtataagaatgtgtaagctgttgaagatagccttaggttttcttccgtgccacttgagggtttgttcgattagctctcaatttatgtggattgagtgagatcggattggtttaaatctcaagcaagttaaattttcttcttaatttttctaatctcatcaaatccatgtgtaacgggaataaccgaacaaggtctgactgaaaatgttaagagggtgtcggatcctctagaccaaagtttagtccag

SEQ ID NO: 62745 - DNA, 4762 bp, Zea Mays
atgacctatctacctcttctagaaaaccctccaagcgcggccaaaaacattcaaagtgaaatcgcctcctcccttgggagaactcatgcaaacccagcagaagggggcaatggtctgaaatcgtggaccaacaatgatgatctgcggaaagatgctgcagaagcgctctgctgcctcgcacatgcccttggagaagactttactatcttcataccatcaatacgcaaaattcttgtgaagcaccacttgcggtacagaaaatgggatgagattgaaaatcggctactgaggcgagagctactcatcactgaaaacttgtctgtgcaaaagtacacacaatgtccacctgatgtcattagagacccccttgatgattgtgatggtacaccttctgagatagctgatgatacacagcgacaagcaagaagtcatcaagtcaatgatgtccggttgcggagtgccggtgaggcttctcaaaggagtactagggaagactgggctgaatggatgagacatttcagtattgcgcttctcaaagagtcaccatctccagctttacgcacctgtgcaaggctagctcagcttcaggcagaatttatggaacatgatgagaagccacttcctattgatacaagactgcttggtgcacttgctgagaagtgtcgagcatttgcaaaggcactccattataaagaaatggaatttgaagctgtgtgcaccaagaagatgggtgcaaatcctgttacagtggttgaatcccttattcatattaacaatcaactacagcagcatgaggcagctattggcatattgacttactcacagcaaaattcggaagttcaattgaaagaatcatggtatgaaaagttgcaccgttgggatgaggctcttaaagcatacaccgtgaaatcatctcaaacatctggtccctttacaaaacttggatgctacattaggtcgaatgaggtgtctagcagctttggctcggtgggaagatttaagtgcattgtgtagagagcaatggacgggtgcagaaccatctgctcgactggaaatggctccaatggttgtggatacctctgattacccattctgttgtagatgataattgttaaccgagctgcaaatgctgcttggcatatgggtgagtgggaccatatggcagactatgtttctcgcctggatgatgcagatgaaaataagctccgtatgttgggtaacgcaacagctagtggtgacggaagcagtaatggtgctttcttccgggcagttcttttagttcgttacaaaaagtatgatgacgctcggatgtatgttgagcgagctcggcggtgtttagctacagaacttgcagcactggtacttgagagttatgagcgagcgtataataacatggtgcgtgttcaacaactttcagaactggaagaggtgattgattactgcactcttcccatggaaagcccgattgctgacggacggagggaacttattcgcaatatgtggaatgaacggattaaaggaacaaaacggaatgtcgaggtgtggcaagccctacttgctgtcagggagttggttcttccccctaacgaagacagagacacctggataaagttcgctgaactttgctggaagaacggtcgtattagtcaggctagatctacgttagtcaaacttttacagtttgatcctgaatcttcccctgaattgacactgtatcatgcacatccacaagtagctctggcttatctaaaataccagtatgcagttggtgatgagcttaaaaggagggatgcattttctaaactgcaagagttgtctgtgcaggttgctaccaccatgggcaatttacctggaacatcagcaaaccatggcaccatgtcaaatgctggagtaccactcattgctcgtgtctacttgacacttggtagctggaagaaggcactatcacctgcattagatgacgattccattcaagaaattttgatttcttaccataatgccacgctaagtgcaaaggactgggggaaggcctggcacatatgggctttgttcaacacagaagtcatgtcacgctatactttccgaggccgaccagatattgctggaaaatatgttgttgcagcagtaactgggtatttttattctattgcttgtgcatctactacgaaaggggtcgatgatagcttgcagctttactttgaccaaaggaaaaataactcggccggggagggaaagaccgccctcccggatatccttcgtctgttaactctttggttcaaccatggggatacctcagaagttcaaacagcgttgcagaaaggtttttcccttgtcaagattgagatgtggctggttgtgctgccccagataattgctaggattcattcgaacaatagagtagttagagaactgatacaatctttgctagttcgaattggaaaggggcatccacaggctttgatgtatcctctcttggttgcctgcaaatcaataagtatattgagacaacgtgcagcgcaggaggtcgttgataagatccgccagcacagtggaggtcttgttgaccaggcacaacttgtgtcgaaggaactgatacgggtagcaattttgtggcatgaaatgtggcatgaggcactcgaggaagctagcaggatgtattttggtgagcacaatatcgaaggaatgcttgctgtacttgagccattgcatgcaatgcttgagaggggggatgagacaattaaagaaaatgccttcattcaggcttatgggcatgaattactggaagctcatgaatgctgtttgaaatatcgggctacaggagaggatgctgagctaactaaggcctgggatttgtattaccatgttttcagaagaatcgacaaacagcttccaagtcttacgaccctcgatctgcactctgtttcgcctgagctactcaaatgtcgaaagttggaacttgctgtgccaggaacttatgctgcagattcaccacttgtgacgattgagtattttgttccccaattgatttgttataacgtccaaacaaaggccaagaaagctgacaattcatggaagtgatggcaatgattatgcattcttgcttaaaggccacgaagatttgcggcaagatgaacgagtaatgcagctttttggtttggtgaatactctcctagagaactcaaggaaaacatcagagaaggatttatcaatccaaagatatgctgttatacctttgtcacctaacagtggtttaattggatgggttccaaactgtgacacacttcatgctctgatccgtgaatacagagatgccaggaagattttcttgaatcaggagcacagacttatgttggcttttgcacccgattatgatcacttacccctcattgcaaaggtggaagtgtttcagcatgctttgcaaaatactgagggaaatgaccttgcgaaggttctgtggctgaagagtcgaacttcggaagtatggcttgagcgccgcacaaactacgctagaagcctggctgttatgagcatggttgggtatttgcttggtttaggagatcggcatccaagcaaccttatgttagatcgctatagtggaaaaatattacacatcgacttcggagattgctttgaggcttcaatgaatcgagaaaagttccctgaaaaagtaccattccgtttgactcgaatgcttgtgaaagctatggaagttagcggtattgagggtacattccgaacaacttgtgaaaatgtgatgcaagtccttcgcacaaacagagacagcgttatggccatgatggaggcatttgtacatgacccgttaatcaattggcgtctgttcaatttcaatgaggttcctcaagtgtcgaactatggtaatgttcatgctcacacggttgtcagtagtgaagaagcagtggctaaccgagagctcatgcaacctcagcgaggagcacgtgagagggaactgctacaggctgtcaatcaactcggtgatgccaatgaggttttgaatgagcgtgctgtagctgtgatggcacggatgagtgacaaactaacagggcgtgacttctcttctgggtcagctttggctggagcaggtagctctatccaacatggcagtgagcatttggcttcaggagatgcccgggatgcccaacctggtctctcagtgaaggttcaggttcagaagctcatactccaagcgacttcacacgaaaatttgtgccaaaactatgtcgggtggtgtccgttctggtgagctctcttggaaacagtagcagtttataacatgtaaatattgtgaataccgtgtgcatagaagtttcgtggtgacagtttgtatgtgcagctttgtaattagcagaacttcaagatgccttggaccatccttttgtcagtttcttagaccgtgtttagcagttcacccttatggccatccaaaacactgtttttgtactgtagattgtattgtttgtagattgtactgttcgcagggtggatttttgaatatgagtataagaatgtgtaagctgttgaagatagccttaggttttcttccgtgccacttgagggtttgttcgattagctctcaatttatgtggattgagtgagatcggattggtttaaatctcaagcaagttaaattttcttcttaatttttctaatctcatcaaatccatgtgtaacgggaataaccgaacaaggtctgactgaaaatgttaagagggtgtcggatcctctagaccaaagtttagtccag

SEQ ID NO: 62746 - DNA, 4706 bp, Zea Mays
atgacctatctacctcttctagaaaaccctccaagcgcggccaaaaacattcaaagtgaaatcgcctcctcccttgggagaactcatgcaaacccagcagaagggggcaatggtctgaaatcgtggaccaacaatgatgatctgcggaaagatgctgcagaagcgctctgctgcctcgcacatgcccttggagaagactttactatcttcataccatcaatacgcaaaattcttgtgaagcaccacttgcggtacagaaaatgggatgagattgaaaatcggctactgaggcgagagctactcatcactgaaaacttgtctgtgcaaaagtacacacaatgtccacctgatgtcattagagacccccttgatgattgtgatggtacaccttctgagatagctgatgatacacagcgacaagcaagaagtcatcaagtcaatgatgtccggttgcggagtgccggtgaggcttctcaaaggagtactagggaagactgggctgaatggatgagacatttcagtattgcgcttctcaaagagtcaccatctccagctttacgcacctgtgcaaggctagctcagcttcaggttttgcaagttgctgggcccaaatgagtgaatcctcccaggaacagctagtgagaagtctcaagacagccttctcatctcagacattcctcctgaaattcttgccacgctgctgaacttagcagaatttatggaacatgatgagaagccacttcctattgatacaagactgcttggtgcacttgctgagaagtgtcgagcatttgcaaaggcactccattataaagaaatggaatttgaagctgtgtgcaccaagaagatgggtgcaaatcctgttacagtggttgaatcccttattcatattaacaatcaactacagcagcatgaggcagctattggcatattgacttactcacagcaaaattcggaagttcaattgaaagaatcatggtatgaaaagttgcaccgttgggatgaggctcttaaagcatacaccgtgaaatcatctcaaacatctggtccctttacaaaacttggatgctacattaggtcgaatgaggtgtctagcagctttggctcggtgggaagatttaagtgcattgtgtagagagcaatggacgggtgcagaaccatctgctcgactggaaatggctccaatggctgcaaatgctgcttggcatatgggtgagtgggaccatatggcagactatgtttctcgcctggatgatgcagatgaaaataagctccgtatgttgggtaacgcaacagctagtggtgacggaagcagtaatggtgctttcttccgggcagttcttttagttcgttacaaaaagtatgatgacgctcggatgtatgttgagcgagctcggcggtgtttagctacagaacttgcagcactggtacttgagagttatgagcgagcgtataataacatggtgcgtgttcaacaactttcagaactggaagaggtgattgattactgcactcttcccatggaaagcccgattgctgacggacggagggaacttattcgcaatatgtggaatgaacggattaaaggaacaaaacggaatgtcgaggtgtggcaagccctacttgctgtcagggagttggttcttccccctaacgaagacagagacacctggataaagttcgctgaactttgctggaagaacggtcgtattagtcaggctagatctacgttagtcaaacttttacagtttgatcctgaatcttcccctgaattgacactgtatcatgcacatccacaagtagctctggcttatctaaaataccagtatgcagttggtgatgagcttaaaaggagggatgcattttctaaactgcaagagttgtctgtgcaggttgctaccaccatgggcaatttacctggaacatcagcaaaccatggcaccatgtcaaatgctggagtaccactcattgctcgtgtctacttgacacttggtagctggaagaaggcactatcacctgcattagatgacgattccattcaagaaattttgatttcttaccataatgccacgctaagtgcaaaggactgggggaaggcctggcacatatgggctttgttcaacacagaagtcatgtcacgctatactttccgaggccgaccagatattgctggaaaatatgttgttgcagcagtaactgggtatttttattctattgcttgtgcatctactacgaaaggggtcgatgatagcttgcagctttactttgaccaaaggaaaaataactcggccggggagggaaagaccgccctcccggatatccttcgtctgttaactctttggttcaaccatggggatacctcagaagttcaaacagcgttgcagaaaggtttttcccttgtcaagattgagatgtggctggttgtgctgccccagataattgctaggattcattcgaacaatagagtagttagagaactgatacaatctttgctagttcgaattggaaaggggcatccacaggctttgatgtatcctctcttggttgcctgcaaatcaataagtatattgagacaacgtgcagcgcaggaggtcgttgataagatccgccagcacagtggaggtcttgttgaccaggcacaacttgtgtcgaaggaactgatacgggtagcaattttgtggcatgaaatgtggcatgaggcactcgaggaagctagcaggatgtattttggtgagcacaatatcgaaggaatgcttgctgtacttgagccattgcatgcaatgcttgagaggggggatgagacaattaaagaaaatgccttcattcaggcttatgggcatgaattactggaagctcatgaatgctgtttgaaatatcgggctacaggagaggatgctgagctaactaaggcctgggatttgtattaccatgttttcagaagaatcgacaaacagcttccaagtcttacgaccctcgatctgcactctgtttcgcctgagctactcaaatgtcgaaagttggaacttgctgtgccaggaacttatgctgcaggccacgaagatttgcggcaagatgaacgagtaatgcagctttttggtttggtgaatactctcctagagaactcaaggaaaacatcagagaaggatttatcaatccaaagatatgctgttatacctttgtcacctaacagtggtttaattggatgggttccaaactgtgacacacttcatgctctgatccgtgaatacagagatgccaggaagattttcttgaatcaggagcacagacttatgttggcttttgcacccgattatgatcacttacccctcattgcaaaggtggaagtgtttcagcatgctttgcaaaatactgagggaaatgaccttgcgaaggttctgtggctgaagagtcgaacttcggaagtatggcttgagcgccgcacaaactacgctagaagcctggctgttatgagcatggttgggtatttgcttggtttaggagatcggcatccaagcaaccttatgttagatcgctatagtggaaaaatattacacatcgacttcggagattgctttgaggcttcaatgaatcgagaaaagttccctgaaaaagtaccattccgtttgactcgaatgcttgtgaaagctatggaagttagcggtattgagggtacattccgaacaacttgtgaaaatgtgatgcaagtccttcgcacaaacagagacagcgttatggccatgatggaggcatttgtacatgacccgttaatcaattggcgtctgttcaatttcaatgaggttcctcaagtgtcgaactatggtaatgttcatgctcacacggttgtcagtagtgaagaagcagtggctaaccgagagctcatgcaacctcagcgaggagcacgtgagagggaactgctacaggctgtcaatcaactcggtgatgccaatgaggttttgaatgagcgtgctgtagctgtgatggcacggatgagtgacaaactaacagggcgtgacttctcttctgggtcagctttggctggagcaggtagctctatccaacatggcagtgagcatttggcttcaggagatgcccgggatgcccaacctggtctctcagtgaaggttcaggttcagaagctcatactccaagcgacttcacacgaaaatttgtgccaaaactatgtcgggtggtgtccgttctggtgagctctcttggaaacagtagcagtttataacatgtaaatattgtgaataccgtgtgcatagaagtttcgtggtgacagtttgtatgtgcagctttgtaattagcagaacttcaagatgccttggaccatccttttgtcagtttcttagaccgtgtttagcagttcacccttatggccatccaaaacactgtttttgtactgtagattgtattgtttgtagattgtactgttcgcagggtggatttttgaatatgagtataagaatgtgtaagctgttgaagatagccttaggttttcttccgtgccacttgagggtttgttcgattagctctcaatttatgtggattgagtgagatcggattggtttaaatctcaagcaagttaaattttcttcttaatttttctaatctcatcaaatccatgtgtaacgggaataaccgaacaaggtctgactgaaaatgttaagagggtgtcggatcctctagaccaaagtttagtccag

SEQ ID NO: 62747 - DNA, 4569 bp, Zea Mays
atgacctatctacctcttctagaaaaccctccaagcgcggccaaaaacattcaaagtgaaatcgcctcctcccttgggagaactcatgcaaacccagcagaagggggcaatggtctgaaatcgtggaccaacaatgatgatctgcggaaagatgctgcagaagcgctctgctgcctcgcacatgcccttggagaagactttactatcttcataccatcaatacgcaaaattcttgtgaagcaccacttgcggtacagaaaatgggatgagattgaaaatcggctactgaggcgagagctactcatcactgaaaacttgtctgtgcaaaagtacacacaatgtccacctgatgtcattagagacccccttgatgattgtgatggtacaccttctgagatagctgatgatacacagcgacaagcaagaagtcatcaagtcaatgatgtccggttgcggagtgccggtgaggcttctcaaaggagtactagggaagactgggctgaatggatgagacatttcagtattgcgcttctcaaagagtcaccatctccagctttacgcacctgtgcaaggctagctcagcttcaggcagaatttatggaacatgatgagaagccacttcctattgatacaagactgcttggtgcacttgctgagaagtgtcgagcatttgcaaaggcactccattataaagaaatggaatttgaagctgtgtgcaccaagaagatgggtgcaaatcctgttacagtggttgaatcccttattcatattaacaatcaactacagcagcatgagctattggcatattgacttactcacagcaaaattcggaagttcaattgaaagaatcatggtatgaaaagttgcaccgttgggatgaggctcttaaagcatacaccgtgaaatcatctcaaacatctggtccctttacaaaacttggatgctacattaggtcgaatgaggtgtctagcagctttggctcggctgcaaatgctgcttggcatatgggtgagtgggaccatatggcagactatgtttctcgcctggatgatgcagatgaaaataagctccgtatgttgggtaacgcaacagctagtggtgacggaagcagtaatggtgctttcttccgggcagttcttttagttcgttacaaaaagtatgatgacgctcggatgtatgttgagcgagctcggcggtgtttagctacagaacttgcagcactggtacttgagagttatgagcgagcgtataataacatggtgcgtgttcaacaactttcagaactggaagaggtgattgattactgcactcttcccatggaaagcccgattgctgacggacggagggaacttattcgcaatatgtggaatgaacggattaaaggaacaaaacggaatgtcgaggtgtggcaagccctacttgctgtcagggagttggttcttccccctaacgaagacagagacacctggataaagttcgctgaactttgctggaagaacggtcgtattagtcaggctagatctacgttagtcaaacttttacagtttgatcctgaatcttcccctgaattgacactgtatcatgcacatccacaagtagctctggcttatctaaaataccagtatgcagttggtgatgagcttaaaaggagggatgcattttctaaactgcaagagttgtctgtgcaggttgctaccaccatgggcaatttacctggaacatcagcaaaccatggcaccatgtcaaatgctggagtaccactcattgctcgtgtctacttgacacttggtagctggaagaaggcactatcacctgcattagatgacgattccattcaagaaattttgatttcttaccataatgccacgctaagtgcaaaggactgggggaaggcctggcacatatgggctttgttcaacacagaagtcatgtcacgctatactttccgaggccgaccagatattgctggaaaatatgttgttgcagcagtaactgggtatttttattctattgcttgtgcatctactacgaaaggggtcgatgatagcttgcaggatatccttcgtctgttaactctttggttcaaccatggggatacctcagaagttcaaacagcgttgcagaaaggtttttcccttgtcaagattgagatgtggctggttgtgctgccccagataattgctaggattcattcgaacaatagagtagttagagaactgatacaatctttgctagttcgaattggaaaggggcatccacaggctttgatgtatcctctcttggttgcctgcaaatcaataagtatattgagacaacgtgcagcgcaggaggtcgttgataagatccgccagcacagtggaggtcttgttgaccaggcacaacttgtgtcgaaggaactgatacgggtagcaattttgtggcatgaaatgtggcatgaggcactcgaggaagctagcaggatgtattttggtgagcacaatatcgaaggaatgcttgctgtacttgagccattgcatgcaatgcttgagaggggggatgagacaattaaagaaaatgccttcattcaggcttatgggcatgaattactggaagctcatgaatgctgtttgaaatatcgggctacaggagaggatgctgagctaactaaggcctgggatttgtattaccatgttttcagaagaatcgacaaacagcttccaagtcttacgaccctcgatctgcactctgtttcgcctgagctactcaaatgtcgaaagttggaacttgctgtgccaggaacttatgctgcagattcaccacttgtgacgattgagtattttgttccccaattgatttgttataacgtccaaacaaaggccaagaaagctgacaattcatggaagtgatggcaatgattatgcattcttgcttaaaggccacgaagatttgcggcaagatgaacgagtaatgcagctttttggtttggtgaatactctcctagagaactcaaggaaaacatcagagaaggatttatcaatccaaagatatgctgttatacctttgtcacctaacagtggtttaattggatgggttccaaactgtgacacacttcatgctctgatccgtgaatacagagatgccaggaagattttcttgaatcaggagcacagacttatgttggcttttgcacccgattatgatcacttacccctcattgcaaaggtggaagtgtttcagcatgctttgcaaaatactgagggaaatgaccttgcgaaggttctgtggctgaagagtcgaacttcggaagtatggcttgagcgccgcacaaactacgctagaagcctggctgttatgagcatggttgggtatttgcttggtttaggagatcggcatccaagcaaccttatgttagatcgctatagtggaaaaatattacacatcgacttcggagattgctttgaggcttcaatgaatcgagaaaagttccctgaaaaagtaccattccgtttgactcgaatgcttgtgaaagctatggaagttagcggtattgagggtacattccgaacaacttgtgaaaatgtgatgcaagtccttcgcacaaacagagacagcgttatggccatgatggaggcatttgtacatgacccgttaatcaattggcgtctgttcaatttcaatgaggttcctcaagtgtcgaactatggtaatgttcatgctcacacggttgtcagtagtgaagaagcagtggctaaccgagagctcatgcaacctcagcgaggagcacgtgagagggaactgctacaggctgtcaatcaactcggtgatgccaatgaggttttgaatgagcgtgctgtagctgtgatggcacggatgagtgacaaactaacagggcgtgacttctcttctgggtcagctttggctggagcaggtagctctatccaacatggcagtgagcatttggcttcaggagatgcccgggatgcccaacctggtctctcagtgaaggttcaggttcagaagctcatactccaagcgacttcacacgaaaatttgtgccaaaactatgtcgggtggtgtccgttctggtgagctctcttggaaacagtagcagtttataacatgtaaatattgtgaataccgtgtgcatagaagtttcgtggtgacagtttgtatgtgcagctttgtaattagcagaacttcaagatgccttggaccatccttttgtcagtttcttagaccgtgtttagcagttcacccttatggccatccaaaacactgtttttgtactgtagattgtattgtttgtagattgtactgttcgcagggtggatttttgaatatgagtataagaatgtgtaagctgttgaagatagccttaggttttcttccgtgccacttgagggtttgttcgattagctctcaatttatgtggattgagtgagatcggattggtttaaatctcaagcaagttaaattttcttcttaatttttctaatctcatcaaatccatgtgtaacgggaataaccgaacaaggtctgactgaaaatgttaagagggtgtcggatcctctagaccaaagtttagtccag

SEQ ID NO: 62748 - DNA, 4861 bp, Zea Mays
atgacctatctacctcttctagaaaaccctccaagcgcggccaaaaacattcaaagtgaaatcgcctcctcccttgggagaactcatgcaaacccagcagaagggggcaatggtctgaaatcgtggaccaacaatgatgatctgcggaaagatgctgcagaagcgctctgctgcctcgcacatgcccttggagaagactttactatcttcataccatcaatacgcaaaattcttgtgaagcaccacttgcggtacagaaaatgggatgagattgaaaatcggctactgaggcgagagctactcatcactgaaaacttgtctgtgcaaaagtacacacaatgtccacctgatgtcattagagacccccttgatgattgtgatggtacaccttctgagatagctgatgatacacagcgacaagcaagaagtcatcaagtcaatgatgtccggttgcggagtgccggtgaggcttctcaaaggagtactagggaagactgggctgaatggatgagacatttcagtattgcgcttctcaaagagtcaccatctccagctttacgcacctgtgcaaggctagctcagcttcagccttctgttggccgcgagttgtttgctgcaggttttgcaagttgctgggcccaaatgagtgaatcctcccaggaacagctagtgagaagtctcaagacagccttctcatctcagacattcctcctgaaattcttgccacgctgctgaacttagcagaatttatggaacatgatgagaagccacttcctattgatacaagactgcttggtgcacttgctgagaagtgtcgagcatttgcaaaggcactccattataaagaaatggaatttgaagctgtgtgcaccaagaagatgggtgcaaatcctgttacagtggttgaatcccttattcatattaacaatcaactacagcagcatgaggcagctattggcatattgacttactcacagcaaaattcggaagttcaattgaaagaatcatggtatgaaaagttgcaccgttgggatgaggctcttaaagcatacaccgtgaaatcatctcaaacatctggtccctttacaaaacttggatgctacattaggtcgaatgaggtgtctagcagctttggctcggtgggaagatttaagtgcattgtgtagagagcaatggacgggtgcagaaccatctgctcgactggaaatggctccaatggctgcaaatgctgcttggcatatgggtgagtgggaccatatggcagactatgtttctcgcctggatgatgcagatgaaaataagctccgtatgttgggtaacgcaacagctagtggtgacggaagcagtaatggtgctttcttccgggcagttcttttagttcgttacaaaaagtatgatgacgctcggatgtatgttgagcgagctcggcggtgtttagctacagaacttgcagcactggtacttgagagttatgagcgagcgtataataacatggtgcgtgttcaacaactttcagaactggaagaggtgattgattactgcactcttcccatggaaagcccgattgctgacggacggagggaacttattcgcaatatgtggaatgaacggattaaaggaacaaaacggaatgtcgaggtgtggcaagccctacttgctgtcagggagttggttcttccccctaacgaagacagagacacctggataaagttcgctgaactttgctggaagaacggtcgtattagtcaggctagatctacgttagtcaaacttttacagtttgatcctgaatcttcccctgaattgacactgtatcatgcacatccacaagtagctctggcttatctaaaataccagtatgcagttggtgatgagcttaaaaggagggatgcattttctaaactgcaagagttgtctgtgcaggttgctaccaccatgggcaatttacctggaacatcagcaaaccatggcaccatgtcaaatgctggagtaccactcattgctcgtgtctacttgacacttggtagctggaagaaggcactatcacctgcattagatgacgattccattcaagaaattttgatttcttaccataatgccacgctaagtgcaaaggactgggggaaggcctggcacatatgggctttgttcaacacagaagtcatgtcacgctatactttccgaggccgaccagatattgctggaaaatatgttgttgcagcagtaactgggtatttttattctattgcttgtgcatctactacgaaaggggtcgatgatagcttgcagctttactttgaccaaaggaaaaataactcggccggggagggaaagaccgccctcccggatatccttcgtctgttaactctttggttcaaccatggggatacctcagaagttcaaacagcgttgcagaaaggtttttcccttgtcaagattgagatgtggctggttgtgctgccccagataattgctaggattcattcgaacaatagagtagttagagaactgatacaatctttgctagttcgaattggaaaggggcatccacaggctttgatgtatcctctcttggttgcctgcaaatcaataagtatattgagacaacgtgcagcgcaggaggtcgttgataagatccgccagcacagtggaggtcttgttgaccaggcacaacttgtgtcgaaggaactgatacgggtagcaattttgtggcatgaaatgtggcatgaggcactcgaggaagctagcaggatgtattttggtgagcacaatatcgaaggaatgcttgctgtacttgagccattgcatgcaatgcttgagaggggggatgagacaattaaagaaaatgccttcattcaggcttatgggcatgaattactggaagctcatgaatgctgtttgaaatatcgggctacaggagaggatgctgagctaactaaggcctgggatttgtattaccatgttttcagaagaatcgacaaacagcttccaagtcttacgaccctcgatctgcactctgtttcgcctgagctactcaaatgtcgaaagttggaacttgctgtgccaggaacttatgctgcagattcaccacttgtgacgattgagtattttgttccccaattgatttgttataacgtccaaacaaaggccaagaaagctgacaattcatggaagtgatggcaatgattatgcattcttgcttaaaggccacgaagatttgcggcaagatgaacgagtaatgcagctttttggtttggtgaatactctcctagagaactcaaggaaaacatcagagaaggatttatcaatccaaagatatgctgttatacctttgtcacctaacagtggtttaattggatgggttccaaactgtgacacacttcatgctctgatccgtgaatacagagatgccaggaagattttcttgaatcaggagcacagacttatgttggcttttgcacccgattatgatcacttacccctcattgcaaaggtggaagtgtttcagcatgctttgcaaaatactgagggaaatgaccttgcgaaggttctgtggctgaagagtcgaacttcggaagtatggcttgagcgccgcacaaactacgctagaagcctggctgttatgagcatggttgggtatttgcttggtttaggagatcggcatccaagcaaccttatgttagatcgctatagtggaaaaatattacacatcgacttcggagattgctttgaggcttcaatgaatcgagaaaagttccctgaaaaagtaccattccgtttgactcgaatgcttgtgaaagctatggaagttagcggtattgagggtacattccgaacaacttgtgaaaatgtgatgcaagtccttcgcacaaacagagacagcgttatggccatgatggaggcatttgtacatgacccgttaatcaattggcgtctgttcaatttcaatgaggttcctcaagtgtcgaactatggtaatgttcatgctcacacggttgtcagtagtgaagaagcagtggctaaccgagagctcatgcaacctcagcgaggagcacgtgagagggaactgctacaggctgtcaatcaactcggtgatgccaatgaggttttgaatgagcgtgctgtagctgtgatggcacggatgagtgacaaactaacagggcgtgacttctcttctgggtcagctttggctggagcaggtagctctatccaacatggcagtgagcatttggcttcaggagatgcccgggatgcccaacctggtctctcagtgaaggttcaggttcagaagctcatactccaagcgacttcacacgaaaatttgtgccaaaactatgtcgggtggtgtccgttctggtgagctctcttggaaacagtagcagtttataacatgtaaatattgtgaataccgtgtgcatagaagtttcgtggtgacagtttgtatgtgcagctttgtaattagcagaacttcaagatgccttggaccatccttttgtcagtttcttagaccgtgtttagcagttcacccttatggccatccaaaacactgtttttgtactgtagattgtattgtttgtagattgtactgttcgcagggtggatttttgaatatgagtataagaatgtgtaagctgttgaagatagccttaggttttcttccgtgccacttgagggtttgttcgattagctctcaatttatgtggattgagtgagatcggattggtttaaatctcaagcaagttaaattttcttcttaatttttctaatctcatcaaatccatgtgtaacgggaataaccgaacaaggtctgactgaaaatgttaagagggtgtcggatcctctagaccaaagtttagtccag

SEQ ID NO: 62749 - DNA, 4573 bp, Zea Mays
atgacctatctacctcttctagaaaaccctccaagcgcggccaaaaacattcaaagtgaaatcgcctcctcccttgggagaactcatgcaaacccagcagaagggggcaatggtctgaaatcgtggaccaacaatgatgatctgcggaaagatgctgcagaagcgctctgctgcctcgcacatgcccttggagaagactttactatcttcataccatcaatacgcaaaattcttgtgaagcaccacttgcggtacagaaaatgggatgagattgaaaatcggctactgaggcgagagctactcatcactgaaaacttgtctgtgcaaaagtacacacaatgtccacctgatgtcattagagacccccttgatgattgtgatggtacaccttctgagatagctgatgatacacagcgacaagcaagaagtcatcaagtcaatgatgtccggttgcggagtgccggtgaggcttctcaaaggagtactagggaagactgggctgaatggatgagacatttcagtattgcgcttctcaaagagtcaccatctccagctttacgcacctgtgcaaggctagctcagcttcaggcagaatttatggaacatgatgagaagccacttcctattgatacaagactgcttggtgcacttgctgagaagtgtcgagcatttgcaaaggcactccattataaagaaatggaatttgaagctgtgtgcaccaagaagatgggtgcaaatcctgttacagtggttgaatcccttattcatattaacaatcaactacagcagcatgaggcagctattggcatattgacttactcacagcaaaattcggaagttcaattgaaagaatcatggtatgaaaagttgcaccgttgggatgaggctcttaaagcatacaccgtgaaatcatctcaaacatctggtccctttacaaaacttggatgctacattaggtcgaatgaggtgtctagcagctttggctcggctgcaaatgctgcttggcatatgggtgagtgggaccatatggcagactatgtttctcgcctggatgatgcagatgaaaataagctccgtatgttgggtaacgcaacagctagtggtgacggaagcagtaatggtgctttcttccgggcagttcttttagttcgttacaaaaagtatgatgacgctcggatgtatgttgagcgagctcggcggtgtttagctacagaacttgcagcactggtacttgagagttatgagcgagcgtataataacatggtgcgtgttcaacaactttcagaactggaagaggtgattgattactgcactcttcccatggaaagcccgattgctgacggacggagggaacttattcgcaatatgtggaatgaacggattaaaggaacaaaacggaatgtcgaggtgtggcaagccctacttgctgtcagggagttggttcttccccctaacgaagacagagacacctggataaagttcgctgaactttgctggaagaacggtcgtattagtcaggctagatctacgttagtcaaacttttacagtttgatcctgaatcttcccctgaattgacactgtatcatgcacatccacaagtagctctggcttatctaaaataccagtatgcagttggtgatgagcttaaaaggagggatgcattttctaaactgcaagagttgtctgtgcaggttgctaccaccatgggcaatttacctggaacatcagcaaaccatggcaccatgtcaaatgctggagtaccactcattgctcgtgtctacttgacacttggtagctggaagaaggcactatcacctgcattagatgacgattccattcaagaaattttgatttcttaccataatgccacgctaagtgcaaaggactgggggaaggcctggcacatatgggctttgttcaacacagaagtcatgtcacgctatactttccgaggccgaccagatattgctggaaaatatgttgttgcagcagtaactgggtatttttattctattgcttgtgcatctactacgaaaggggtcgatgatagcttgcaggatatccttcgtctgttaactctttggttcaaccatggggatacctcagaagttcaaacagcgttgcagaaaggtttttcccttgtcaagattgagatgtggctggttgtgctgccccagataattgctaggattcattcgaacaatagagtagttagagaactgatacaatctttgctagttcgaattggaaaggggcatccacaggctttgatgtatcctctcttggttgcctgcaaatcaataagtatattgagacaacgtgcagcgcaggaggtcgttgataagatccgccagcacagtggaggtcttgttgaccaggcacaacttgtgtcgaaggaactgatacgggtagcaattttgtggcatgaaatgtggcatgaggcactcgaggaagctagcaggatgtattttggtgagcacaatatcgaaggaatgcttgctgtacttgagccattgcatgcaatgcttgagaggggggatgagacaattaaagaaaatgccttcattcaggcttatgggcatgaattactggaagctcatgaatgctgtttgaaatatcgggctacaggagaggatgctgagctaactaaggcctgggatttgtattaccatgttttcagaagaatcgacaaacagcttccaagtcttacgaccctcgatctgcactctgtttcgcctgagctactcaaatgtcgaaagttggaacttgctgtgccaggaacttatgctgcagattcaccacttgtgacgattgagtattttgttccccaattgatttgttataacgtccaaacaaaggccaagaaagctgacaattcatggaagtgatggcaatgattatgcattcttgcttaaaggccacgaagatttgcggcaagatgaacgagtaatgcagctttttggtttggtgaatactctcctagagaactcaaggaaaacatcagagaaggatttatcaatccaaagatatgctgttatacctttgtcacctaacagtggtttaattggatgggttccaaactgtgacacacttcatgctctgatccgtgaatacagagatgccaggaagattttcttgaatcaggagcacagacttatgttggcttttgcacccgattatgatcacttacccctcattgcaaaggtggaagtgtttcagcatgctttgcaaaatactgagggaaatgaccttgcgaaggttctgtggctgaagagtcgaacttcggaagtatggcttgagcgccgcacaaactacgctagaagcctggctgttatgagcatggttgggtatttgcttggtttaggagatcggcatccaagcaaccttatgttagatcgctatagtggaaaaatattacacatcgacttcggagattgctttgaggcttcaatgaatcgagaaaagttccctgaaaaagtaccattccgtttgactcgaatgcttgtgaaagctatggaagttagcggtattgagggtacattccgaacaacttgtgaaaatgtgatgcaagtccttcgcacaaacagagacagcgttatggccatgatggaggcatttgtacatgacccgttaatcaattggcgtctgttcaatttcaatgaggttcctcaagtgtcgaactatggtaatgttcatgctcacacggttgtcagtagtgaagaagcagtggctaaccgagagctcatgcaacctcagcgaggagcacgtgagagggaactgctacaggctgtcaatcaactcggtgatgccaatgaggttttgaatgagcgtgctgtagctgtgatggcacggatgagtgacaaactaacagggcgtgacttctcttctgggtcagctttggctggagcaggtagctctatccaacatggcagtgagcatttggcttcaggagatgcccgggatgcccaacctggtctctcagtgaaggttcaggttcagaagctcatactccaagcgacttcacacgaaaatttgtgccaaaactatgtcgggtggtgtccgttctggtgagctctcttggaaacagtagcagtttataacatgtaaatattgtgaataccgtgtgcatagaagtttcgtggtgacagtttgtatgtgcagctttgtaattagcagaacttcaagatgccttggaccatccttttgtcagtttcttagaccgtgtttagcagttcacccttatggccatccaaaacactgtttttgtactgtagattgtattgtttgtagattgtactgttcgcagggtggatttttgaatatgagtataagaatgtgtaagctgttgaagatagccttaggttttcttccgtgccacttgagggtttgttcgattagctctcaatttatgtggattgagtgagatcggattggtttaaatctcaagcaagttaaattttcttcttaatttttctaatctcatcaaatccatgtgtaacgggaataaccgaacaaggtctgactgaaaatgttaagagggtgtcggatcctctagaccaaagtttagtccag

SEQ ID NO: 62750 - DNA, 4574 bp, Zea Mays
atgacctatctacctcttctagaaaaccctccaagcgcggccaaaaacattcaaagtgaaatcgcctcctcccttgggagaactcatgcaaacccagcagaagggggcaatggtctgaaatcgtggaccaacaatgatgatctgcggaaagatgctgcagaagcgctctgctgcctcgcacatgcccttggagaagactttactatcttcataccatcaatacgcaaaattcttgtgaagcaccacttgcggtacagaaaatgggatgagattgaaaatcggctactgaggcgagagctactcatcactgaaaacttgtctgtgcaaaagtacacacaatgtccacctgatgtcattagagacccccttgatgattgtgatggtacaccttctgagatagctgatgatacacagcgacaagcaagaagtcatcaagtcaatgatgtccggttgcggagtgccggtgaggcttctcaaaggagtactagggaagactgggctgaatggatgagacatttcagtattgcgcttctcaaagagtcaccatctccagctttacgcacctgtgcaaggctagctcagcttcaggcagaatttatggaacatgatgagaagccacttcctattgatacaagactgcttggtgcacttgctgagaaggcagctattggcatattgacttactcacagcaaaattcggaagttcaattgaaagaatcatggtatgaaaagttgcaccgttgggatgaggctcttaaagcatacaccgtgaaatcatctcaaacatctggtccctttacaaaacttggatgctacattaggtcgaatgaggtgtctagcagctttggctcggtgggaagatttaagtgcattgtgtagagagcaatggacgggtgcagaaccatctgctcgactggaaatggctccaatggctgcaaatgctgcttggcatatgggtgagtgggaccatatggcagactatgtttctcgcctggatgatgcagatgaaaataagctccgtatgttgggtaacgcaacagctagtggtgacggaagcagtaatggtgctttcttccgggcagttcttttagttcgttacaaaaagtatgatgacgctcggatgtatgttgagcgagctcggcggtgtttagctacagaacttgcagcactggtacttgagagttatgagcgagcgtataataacatggtgcgtgttcaacaactttcagaactggaagaggtgattgattactgcactcttcccatggaaagcccgattgctgacggacggagggaacttattcgcaatatgtggaatgaacggattaaaggaacaaaacggaatgtcgaggtgtggcaagccctacttgctgtcagggagttggttcttccccctaacgaagacagagacacctggataaagttcgctgaactttgctggaagaacggtcgtattagtcaggctagatctacgttagtcaaacttttacagtttgatcctgaatcttcccctgaattgacactgtatcatgcacatccacaagtagctctggcttatctaaaataccagtatgcagttggtgatgagcttaaaaggagggatgcattttctaaactgcaagagttgtctgtgcaggttgctaccaccatgggcaatttacctggaacatcagcaaaccatggcaccatgtcaaatgctggagtaccactcattgctcgtgtctacttgacacttggtagctggaagaaggcactatcacctgcattagatgacgattccattcaagaaattttgatttcttaccataatgccacgctaagtgcaaaggactgggggaaggcctggcacatatgggctttgttcaacacagaagtcatgtcacgctatactttccgaggccgaccagatattgctggaaaatatgttgttgcagcagtaactgggtatttttattctattgcttgtgcatctactacgaaaggggtcgatgatagcttgcagctttactttgaccaaaggaaaaataactcggccggggagggaaagaccgccctcccggatatccttcgtctgttaactctttggttcaaccatggggatacctcagaagttcaaacagcgttgcagaaaggtttttcccttgtcaagattgagatgtggctggttgtgctgccccagataattgctaggattcattcgaacaatagagtagttagagaactgatacaatctttgctagttcgaattggaaaggggcatccacaggctttgatgtatcctctcttggttgcctgcaaatcaataagtatattgagacaacgtgcagcgcaggaggtcgttgataagatccgccagcacagtggaggtcttgttgaccaggcacaacttgtgtcgaaggaactgatacgggtagcaattttgtggcatgaaatgtggcatgaggcactcgaggaagctagcaggatgtattttggtgagcacaatatcgaaggaatgcttgctgtacttgagccattgcatgcaatgcttgagaggggggatgagacaattaaagaaaatgccttcattcaggcttatgggcatgaattactggaagctcatgaatgctgtttgaaatatcgggctacaggagaggatgctgagctaactaaggcctgggatttgtattaccatgttttcagaagaatcgacaaacagcttccaagtcttacgaccctcgatctgcactctgtttcgcctgagctactcaaatgtcgaaagttggaacttgctgtgccaggaacttatgctgcagattcaccacttgtgacgattgagtattttgttccccaattgatttgttataacgtccaaacaaaggccaagaaagctgacaattcatggaagtgatggcaatgattatgcattcttgcttaaaggccacgaagatttgcggcaagatgaacgagtaatgcagctttttggtttggtgaatactctcctagagaactcaaggaaaacatcagagaaggatttatcaatccaaagatatgctgttatacctttgtcacctaacagtggtttaattggatgggttccaaactgtgacacacttcatgctctgatccgtgaatacagagatgccaggaagattttcttgaatcaggagcacagacttatgttggcttttgcacccgattatgatcacttacccctcattgcaaaggtggaagtgtttcagcatgctttgcaaaatactgagggaaatgaccttgcgaaggttctgtggctgaagagtcgaacttcggaagtatggcttgagcgccgcacaaactacgctagaagcctggctgttatgagcatggttgggtatttgcttggtttaggagatcggcatccaagcaaccttatgttagatcgctatagtggaaaaatattacacatcgacttcggagattgctttgaggcttcaatgaatcgagaaaagttccctgaaaaagtaccattccgtttgactcgaatgcttgtgaaagctatggaagttagcggtattgagggtacattccgaacaacttgtgaaaatgtgatgcaagtccttcgcacaaacagagacagcgttatggccatgatggaggcatttgtacatgacccgttaatcaattggcgtctgttcaatttcaatgaggttcctcaagtgtcgaactatggtaatgttcatgctcacacggttgtcagtagtgaagaagcagtggctaaccgagagctcatgcaacctcagcgaggagcacgtgagagggaactgctacaggctgtcaatcaactcggtgatgccaatgaggttttgaatgagcgtgctgtagctgtgatggcacggatgagtgacaaactaacagggcgtgacttctcttctgggtcagctttggctggagcaggtagctctatccaacatggcagtgagcatttggcttcaggagatgcccgggatgcccaacctggtctctcagtgaaggttcaggttcagaagctcatactccaagcgacttcacacgaaaatttgtgccaaaactatgtcgggtggtgtccgttctggtgagctctcttggaaacagtagcagtttataacatgtaaatattgtgaataccgtgtgcatagaagtttcgtggtgacagtttgtatgtgcagctttgtaattagcagaacttcaagatgccttggaccatccttttgtcagtttcttagaccgtgtttagcagttcacccttatggccatccaaaacactgtttttgtactgtagattgtattgtttgtagattgtactgttcgcagggtggatttttgaatatgagtataagaatgtgtaagctgttgaagatagccttaggttttcttccgtgccacttgagggtttgttcgattagctctcaatttatgtggattgagtgagatcggattggtttaaatctcaagcaagttaaattttcttcttaatttttctaatctcatcaaatccatgtgtaacgggaataaccgaacaaggtctgactgaaaatgttaagagggtgtcggatcctctagaccaaagtttagtccag

SEQ ID NO: 62751 - DNA, 4449 bp, Zea Mays
atgacctatctacctcttctagaaaaccctccaagcgcggccaaaaacattcaaagtgaaatcgcctcctcccttgggagaactcatgcaaacccagcagaagggggcaatggtctgaaatcgtggaccaacaatgatgatctgcggaaagatgctgcagaagcgctctgctgcctcgcacatgcccttggagaagactttactatcttcataccatcaatacgcaaaattcttgtgaagcaccacttgcggtacagaaaatgggatgagattgaaaatcggctactgaggcgagagctactcatcactgaaaacttgtctgtgcaaaagtacacacaatgtccacctgatgtcattagagacccccttgatgattgtgatggtacaccttctgagatagctgatgatacacagcgacaagcaagaagtcatcaagtcaatgatgtccggttgcggagtgccggtgaggcttctcaaaggagtactagggaagactgggctgaatggatgagacatttcagtattgcgcttctcaaagagtcaccatctccagctttacgcacctgtgcaaggctagctcagcttcaggcagaatttatggaacatgatgagaagccacttcctattgatacaagactgcttggtgcacttgctgagaagtgtcgagcatttgcaaaggcactccattataaagaaatggaatttgaagctgtgtgcaccaagaagatgggtgcaaatcctgttacagtggttgaatcccttattcatattaacaatcaactacagcagcatgaggcagctattggcatattgacttactcacagcaaaattcggaagttcaattgaaagaatcatggtatgaaaagttgcaccgttgggatgaggctcttaaagcatacaccgtgaaatcatctcaaacatctggtccctttacaaaacttggatgctacattaggtcgaatgaggtgtctagcagctttggctcggctgcaaatgctgcttggcatatgggtgagtgggaccatatggcagactatgtttctcgcctggatgatgcagatgaaaataagctccgtatgttgggtaacgcaacagctagtggtgacggaagcagtaatggtgctttcttccgggcagttcttttagttcgttacaaaaagtatgatgacgctcggatgtatgttgagcgagctcggcggtgtttagctacagaacttgcagcactggtacttgagagttatgagcgagcgtataataacatggtgcgtgttcaacaactttcagaactggaagaggtgattgattactgcactcttcccatggaaagcccgattgctgacggacggagggaacttattcgcaatatgtggaatgaacggattaaaggaacaaaacggaatgtcgaggtgtggcaagccctacttgctgtcagggagttggttcttccccctaacgaagacagagacacctggataaagttcgctgaactttgctggaagaacggtcgtattagtcaggctagatctacgttagtcaaacttttacagtttgatcctgaatcttcccctgaattgacactgtatcatgcacatccacaagtagctctggcttatctaaaataccagtatgcagttggtgatgagcttaaaaggagggatgcattttctaaactgcaagagttgtctgtgcaggttgctaccaccatgggcaatttacctggaacatcagcaaaccatggcaccatgtcaaatgctggagtaccactcattgctcgtgtctacttgacacttggtagctggaagaaggcactatcacctgcattagatgacgattccattcaagaaattttgatttcttaccataatgccacgctaagtgcaaaggactgggggaaggcctggcacatatgggctttgttcaacacagaagtcatgtcacgctatactttccgaggccgaccagatattgctggaaaatatgttgttgcagcagtaactgggtatttttattctattgcttgtgcatctactacgaaaggggtcgatgatagcttgcaggatatccttcgtctgttaactctttggttcaaccatggggatacctcagaagttcaaacagcgttgcagaaaggtttttcccttgtcaagattgagatgtggctggttgtgctgccccagataattgctaggattcattcgaacaatagagtagttagagaactgatacaatctttgctagttcgaattggaaaggggcatccacaggctttgatgtatcctctcttggttgcctgcaaatcaataagtatattgagacaacgtgcagcgcaggaggtcgttgataagatccgccagcacagtggaggtcttgttgaccaggcacaacttgtgtcgaaggaactgatacgggtagcaattttgtggcatgaaatgtggcatgaggcactcgaggaagctagcaggatgtattttggtgagcacaatatcgaaggaatgcttgctgtacttgagccattgcatgcaatgcttgagaggggggatgagacaattaaagaaaatgccttcattcaggcttatgggcatgaattactggaagctcatgaatgctgtttgaaatatcgggctacaggagaggatgctgagctaactaaggcctgggatttgtattaccatgttttcagaagaatcgacaaacagcttccaagtcttacgaccctcgatctgcactctgtttcgcctgagctactcaaatgtcgaaagttggaacttgctgtgccaggaacttatgctgcaggccacgaagatttgcggcaagatgaacgagtaatgcagctttttggtttggtgaatactctcctagagaactcaaggaaaacatcagagaaggatttatcaatccaaagatatgctgttatacctttgtcacctaacagtggtttaattggatgggttccaaactgtgacacacttcatgctctgatccgtgaatacagagatgccaggaagattttcttgaatcaggagcacagacttatgttggcttttgcacccgattatgatcacttacccctcattgcaaaggtggaagtgtttcagcatgctttgcaaaatactgagggaaatgaccttgcgaaggttctgtggctgaagagtcgaacttcggaagtatggcttgagcgccgcacaaactacgctagaagcctggctgttatgagcatggttgggtatttgcttggtttaggagatcggcatccaagcaaccttatgttagatcgctatagtggaaaaatattacacatcgacttcggagattgctttgaggcttcaatgaatcgagaaaagttccctgaaaaagtaccattccgtttgactcgaatgcttgtgaaagctatggaagttagcggtattgagggtacattccgaacaacttgtgaaaatgtgatgcaagtccttcgcacaaacagagacagcgttatggccatgatggaggcatttgtacatgacccgttaatcaattggcgtctgttcaatttcaatgaggttcctcaagtgtcgaactatggtaatgttcatgctcacacggttgtcagtagtgaagaagcagtggctaaccgagagctcatgcaacctcagcgaggagcacgtgagagggaactgctacaggctgtcaatcaactcggtgatgccaatgaggttttgaatgagcgtgctgtagctgtgatggcacggatgagtgacaaactaacagggcgtgacttctcttctgggtcagctttggctggagcaggtagctctatccaacatggcagtgagcatttggcttcaggagatgcccgggatgcccaacctggtctctcagtgaaggttcaggttcagaagctcatactccaagcgacttcacacgaaaatttgtgccaaaactatgtcgggtggtgtccgttctggtgagctctcttggaaacagtagcagtttataacatgtaaatattgtgaataccgtgtgcatagaagtttcgtggtgacagtttgtatgtgcagctttgtaattagcagaacttcaagatgccttggaccatccttttgtcagtttcttagaccgtgtttagcagttcacccttatggccatccaaaacactgtttttgtactgtagattgtattgtttgtagattgtactgttcgcagggtggatttttgaatatgagtataagaatgtgtaagctgttgaagatagccttaggttttcttccgtgccacttgagggtttgttcgattagctctcaatttatgtggattgagtgagatcggattggtttaaatctcaagcaagttaaattttcttcttaatttttctaatctcatcaaatccatgtgtaacgggaataaccgaacaaggtctgactgaaaatgttaagagggtgtcggatcctctagaccaaagtttagtccag

SEQ ID NO: 62752 - DNA, 4596 bp, Zea Mays
atgacctatctacctcttctagaaaaccctccaagcgcggccaaaaacattcaaagtgaaatcgcctcctcccttgggagaactcatgcaaacccagcagaagggggcaatggtctgaaatcgtggaccaacaatgatgatctgcggaaagatgctgcagaagcgctctgctgcctcgcacatgcccttggagaagactttactatcttcataccatcaatacgcaaaattcttgtgaagcaccacttgcggaaaatgggatgagattgaaaatcggctactgaggcgagagctactcatcactgaaaacttgtctgtgcaaaagtacacacaatgtccacctgatgtcattagagacccccttgatgattgtgatggtacaccttctgagatagctgatgatacacagcgacaagcaagaagtcatcaagtcaatgatgtccggttgcggagtgccggtgaggcttctcaaaggagtactagggaagactgggctgaatggatgagacatttcagtattgcgcttctcaaagagtcaccatctccagctttacgcacctgtgcaaggctagctcagcttcagccttctgttggccgcgagttgtttgctgcaggttttgcaagttgctgggcccaaatgagtgaatcctcccaggaacagctagtgagaagtctcaagacagccttctcatctcagacattcctcctgaaattcttgccacgctgctgaacttagcagaatttatggaacatgatgagaagccacttcctattgatacaagactgcttggtgcacttgctgagaagtgtcgagcatttgcaaaggcactccattataaagaaatggaatttgaagctgtgtgcaccaagaagatgggtgcaaatcctgttacagtggttgaatcccttattcatattaacaatcaactacagcagcatgaggcagctattggcatattgacttactcacagcaaaattcggaagttcaattgaaagaatcatggtatgaaaagttgcaccgttgggatgaggctcttaaagcatacaccgtgaaatcatctcaaacatctggtccctttacaaaacttggatgctacattaggtcgaatgaggtgtctagcagctttggctcggctgcaaatgctgcttggcatatgggtgagtgggaccatatggcagactatgtttctcgcctggatgatgcagatgaaaataagctccgtatgttgggtaacgcaacagctagtggtgacggaagcagtaatggtgctttcttccgggcagttcttttagttcgttacaaaaagtatgatgacgctcggatgtatgttgagcgagctcggcggtgtttagctacagaacttgcagcactggtacttgagagttatgagcgagcgtataataacatggtgcgtgttcaacaactttcagaactggaagaggtgattgattactgcactcttcccatggaaagcccgattgctgacggacggagggaacttattcgcaatatgtggaatgaacggattaaaggaacaaaacggaatgtcgaggtgtggcaagccctacttgctgtcagggagttggttcttccccctaacgaagacagagacacctggataaagttcgctgaactttgctggaagaacggtcgtattagtcaggctagatctacgttagtcaaacttttacagtttgatcctgaatcttcccctgaattgacactgtatcatgcacatccacaagtagctctggcttatctaaaataccagtatgcagttggtgatgagcttaaaaggagggatgcattttctaaactgcaagagttgtctgtgcaggttgctaccaccatgggcaatttacctggaacatcagcaaaccatggcaccatgtcaaatgctggagtaccactcattgctcgtgtctacttgacacttggtagctggaagaaggcactatcacctgcattagatgacgattccattcaagaaattttgatttcttaccataatgccacgctaagtgcaaaggactgggggaaggcctggcacatatgggctttgttcaacacagaagtcatgtcacgctatactttccgaggccgaccagatattgctggaaaatatgttgttgcagcagtaactgggtatttttattctattgcttgtgcatctactacgaaaggggtcgatgatagcttgcaggatatccttcgtctgttaactctttggttcaaccatggggatacctcagaagttcaaacagcgttgcagaaaggtttttcccttgtcaagattgagatgtggctggttgtgctgccccagataattgctaggattcattcgaacaatagagtagttagagaactgatacaatctttgctagttcgaattggaaaggggcatccacaggctttgatgtatcctctcttggttgcctgcaaatcaataagtatattgagacaacgtgcagcgcaggaggtcgttgataagatccgccagcacagtggaggtcttgttgaccaggcacaacttgtgtcgaaggaactgatacgggtagcaattttgtggcatgaaatgtggcatgaggcactcgaggaagctagcaggatgtattttggtgagcacaatatcgaaggaatgcttgctgtacttgagccattgcatgcaatgcttgagaggggggatgagacaattaaagaaaatgccttcattcaggcttatgggcatgaattactggaagctcatgaatgctgtttgaaatatcgggctacaggagaggatgctgagctaactaaggcctgggatttgtattaccatgttttcagaagaatcgacaaacagcttccaagtcttacgaccctcgatctgcactctgtttcgcctgagctactcaaatgtcgaaagttggaacttgctgtgccaggaacttatgctgcaggccacgaagatttgcggcaagatgaacgagtaatgcagctttttggtttggtgaatactctcctagagaactcaaggaaaacatcagagaaggatttatcaatccaaagatatgctgttatacctttgtcacctaacagtggtttaattggatgggttccaaactgtgacacacttcatgctctgatccgtgaatacagagatgccaggaagattttcttgaatcaggagcacagacttatgttggcttttgcacccgattatgatcacttacccctcattgcaaaggtggaagtgtttcagcatgctttgcaaaatactgagggaaatgaccttgcgaaggttctgtggctgaagagtcgaacttcggaagtatggcttgagcgccgcacaaactacgctagaagcctggctgttatgagcatggttgggtatttgcttggtttaggagatcggcatccaagcaaccttatgttagatcgctatagtggaaaaatattacacatcgacttcggagattgctttgaggcttcaatgaatcgagaaaagttccctgaaaaagtaccattccgtttgactcgaatgcttgtgaaagctatggaagttagcggtattgagggtacattccgaacaacttgtgaaaatgtgatgcaagtccttcgcacaaacagagacagcgttatggccatgatggaggcatttgtacatgacccgttaatcaattggcgtctgttcaatttcaatgaggttcctcaagtgtcgaactatggtaatgttcatgctcacacggttgtcagtagtgaagaagcagtggctaaccgagagctcatgcaacctcagcgaggagcacgtgagagggaactgctacaggctgtcaatcaactcggtgatgccaatgaggttttgaatgagcgtgctgtagctgtgatggcacggatgagtgacaaactaacagggcgtgacttctcttctgggtcagctttggctggagcaggtagctctatccaacatggcagtgagcatttggcttcaggagatgcccgggatgcccaacctggtctctcagtgaaggttcaggttcagaagctcatactccaagcgacttcacacgaaaatttgtgccaaaactatgtcgggtggtgtccgttctggtgagctctcttggaaacagtagcagtttataacatgtaaatattgtgaataccgtgtgcatagaagtttcgtggtgacagtttgtatgtgcagctttgtaattagcagaacttcaagatgccttggaccatccttttgtcagtttcttagaccgtgtttagcagttcacccttatggccatccaaaacactgtttttgtactgtagattgtattgtttgtagattgtactgttcgcagggtggatttttgaatatgagtataagaatgtgtaagctgttgaagatagccttaggttttcttccgtgccacttgagggtttgttcgattagctctcaatttatgtggattgagtgagatcggattggtttaaatctcaagcaagttaaattttcttcttaatttttctaatctcatcaaatccatgtgtaacgggaataaccgaacaaggtctgactgaaaatgttaagagggtgtcggatcctctagaccaaagtttagtccag

SEQ ID NO: 62753 - DNA, 4821 bp, Zea Mays
atcaatcggctggcaccatgacctatctacctcttctagaaaaccctccaagcgcggccaaaaacattcaaagtgaaatcgcctcctcccttgggagaactcatgcaaacccagcagaagggggcaatggtctgaaatcgtggaccaacaatgatgatctgcggaaagatgctgcagaagcgctctgctgcctcgcacatgcccttggagaagactttactatcttcataccatcaatacgcaaaattcttgtgaagcaccacttgcggtacagaaaatgggatgagattgaaaatcggctactgaggcgagagctactcatcactgaaaacttgtctgtgcaaaagtacacacaatgtccacctgatgtcattagagacccccttgatgattgtgatggtacaccttctgagatagctgatgatacacagcgacaagcaagaagtcatcaagtcaatgatgtccggttgcggagtgccggtgaggcttctcaaaggagtactagggaagactgggctgaatggatgagacatttcagtattgcgcttctcaaagagtcaccatctccagctttacgcacctgtgcaaggctagctcagcttcagccttctgttggccgcgagttgtttgctgcaggttttgcaagttgctgggcccaaatgagtgaatcctcccaggaacagctagtgagaagtctcaagacagccttctcatctcagacattcctcctgaaattcttgccacgctgctgaacttagcagaatttatggaacatgatgagaagccacttcctattgatacaagactgcttggtgcacttgctgagaagtgtcgagcatttgcaaaggcactccattataaagaaatggaatttgaagctgtgtgcaccaagaagatgggtgcaaatcctgttacagtggttgaatcccttattcatattaacaatcaactacagcagcatgaggcagctattggcatattgacttactcacagcaaaattcggaagttcaattgaaagaatcatggtatgaaaagttgcaccgttgggatgaggctcttaaagcatacaccgtgaaatcatctcaaacatctggtccctttacaaaacttggatgctacattaggtcgaatgaggtgtctagcagctttggctcggtgggaagatttaagtgcattgtgtagagagcaatggacgggtgcagaaccatctgctcgactggaaatggctccaatggctgcaaatgctgcttggcatatgggtgagtgggaccatatggcagactatgtttctcgcctggatgatgcagatgaaaataagctccgtatgttgggtaacgcaacagctagtggtgacggaagcagtaatggtgctttcttccgggcagttcttttagttcgttacaaaaagtatgatgacgctcggatgtatgttgagcgagctcggcggtgtttagctacagaacttgcagcactggtacttgagagttatgagcgagcgtataataacatggtgcgtgttcaacaactttcagaactggaagaggtgattgattactgcactcttcccatggaaagcccgattgctgacggacggagggaacttattcgcaatatgtggaatgaacggattaaaggaacaaaacggaatgtcgaggtgtggcaagccctacttgctgtcagggagttggttcttccccctaacgaagacagagacacctggataaagttcgctgaactttgctggaagaacggtcgtattagtcaggctagatctacgttagtcaaacttttacagtttgatcctgaatcttcccctgaattgacactgtatcatgcacatccacaagtagctctggcttatctaaaataccagtatgcagttggtgatgagcttaaaaggagggatgcattttctaaactgcaagagttgtctgtgcaggttgctaccaccatgggcaatttacctggaacatcagcaaaccatggcaccatgtcaaatgctggagtaccactcattgctcgtgtctacttgacacttggtagctggaagaaggcactatcacctgcattagatgacgattccattcaagaaattttgatttcttaccataatgccacgctaagtgcaaaggactgggggaaggcctggcacatatgggctttgttcaacacagaagtcatgtcacgctatactttccgaggccgaccagatattgctggaaaatatgttgttgcagcagtaactgggtatttttattctattgcttgtgcatctactacgaaaggggtcgatgatagcttgcaggatatccttcgtctgttaactctttggttcaaccatggggatacctcagaagttcaaacagcgttgcagaaaggtttttcccttgtcaagattgagatgtggctggttgtgctgccccagataattgctaggattcattcgaacaatagagtagttagagaactgatacaatctttgctagttcgaattggaaaggggcatccacaggctttgatgtatcctctcttggttgcctgcaaatcaataagtatattgagacaacgtgcagcgcaggaggtcgttgataagatccgccagcacagtggaggtcttgttgaccaggcacaacttgtgtcgaaggaactgatacgggtagcaattttgtggcatgaaatgtggcatgaggcactcgaggaagctagcaggatgtattttggtgagcacaatatcgaaggaatgcttgctgtacttgagccattgcatgcaatgcttgagaggggggatgagacaattaaagaaaatgccttcattcaggcttatgggcatgaattactggaagctcatgaatgctgtttgaaatatcgggctacaggagaggatgctgagctaactaaggcctgggatttgtattaccatgttttcagaagaatcgacaaacagcttccaagtcttacgaccctcgatctgcactctgtttcgcctgagctactcaaatgtcgaaagttggaacttgctgtgccaggaacttatgctgcagattcaccacttgtgacgattgagtattttgttccccaattgatttgttataacgtccaaacaaaggccaagaaagctgacaattcatggaagtgatggcaatgattatgcattcttgcttaaaggccacgaagatttgcggcaagatgaacgagtaatgcagctttttggtttggtgaatactctcctagagaactcaaggaaaacatcagagaaggatttatcaatccaaagatatgctgttatacctttgtcacctaacagtggtttaattggatgggttccaaactgtgacacacttcatgctctgatccgtgaatacagagatgccaggaagattttcttgaatcaggagcacagacttatgttggcttttgcacccgattatgatcacttacccctcattgcaaaggtggaagtgtttcagcatgctttgcaaaatactgagggaaatgaccttgcgaaggttctgtggctgaagagtcgaacttcggaagtatggcttgagcgccgcacaaactacgctagaagcctggctgttatgagcatggttgggtatttgcttggtttaggagatcggcatccaagcaaccttatgttagatcgctatagtggaaaaatattacacatcgacttcggagattgctttgaggcttcaatgaatcgagaaaagttccctgaaaaagtaccattccgtttgactcgaatgcttgtgaaagctatggaagttagcggtattgagggtacattccgaacaacttgtgaaaatgtgatgcaagtccttcgcacaaacagagacagcgttatggccatgatggaggcatttgtacatgacccgttaatcaattggcgtctgttcaatttcaatgaggttcctcaagtgtcgaactatggtaatgttcatgctcacacggttgtcagtagtgaagaagcagtggctaaccgagagctcatgcaacctcagcgaggagcacgtgagagggaactgctacaggctgtcaatcaactcggtgatgccaatgaggttttgaatgagcgtgctgtagctgtgatggcacggatgagtgacaaactaacagggcgtgacttctcttctgggtcagctttggctggagcaggtagctctatccaacatggcagtgagcatttggcttcaggagatgcccgggatgcccaacctggtctctcagtgaaggttcaggttcagaagctcatactccaagcgacttcacacgaaaatttgtgccaaaactatgtcgggtggtgtccgttctggtgagctctcttggaaacagtagcagtttataacatgtaaatattgtgaataccgtgtgcatagaagtttcgtggtgacagtttgtatgtgcagctttgtaattagcagaacttcaagatgccttggaccatccttttgtcagtttcttagaccgtgtttagcagttcacccttatggccatccaaaacactgtttttgtactgtagattgtattgtttgtagattgtactgttcgcagggtggatttttgaatatgagtataagaatgtgtaagctgttgaagatagccttaggttttcttccgtgccacttgagggtttgttcgattagctctcaatttatgtggattgagtgagatcggattggtttaaatctcaagcaagttaaattttcttcttaatttttctaatctcatcaaatccatgtgtaacgggaataaccgaacaaggtctgactgaaaatgttaagagggtgtcggatcctctagaccaaagtttagtccag

SEQ ID NO: 62754 - DNA, 5785 bp, Zea Mays
agagaattggcaatttctgttgctggtcgattgtctgaaaagaatcctgcatatgtactgcctgcccttcgtcgctatcttatacaattgctcacatatcttgaccagagtatggatagcaagtgtagagaggaaagtgctagattattgggttgtttaattaggagctgcgcgcggctcattcttccttacattgctccagttcacaaggcgctagtgactagattgtgtgaaggaacgggaccaaatgctaataatgctcttgctgcgggagtgcttgccactgttggagaactggccaaagtgggtggctttgctatgaggcaatatcttcctgagctgatgcctgtagttgtggattctcttttagatggaggtgctgttagtaaaagggaagtggcagtgtcaactctgggacagattatccagagcacaggctatgttattgccccctataatgagtacccgccattgcttggcttactcttgaagttgcttaatggtgaattggaatggtcaactagactagaagtgctgaaggttttagggattatgggtgcattggaccctcacgcacacaagcgaaatcagcacaatctacctggtcagcatagagaggtcctacggccaacaatcgagaccgcacaacatattgtttccatggaagagttaccgactgactactggccttctttttcagcatccgaggactactattcaacagttgcaattagctccctcatgcgaattcttcgagatccttctctttcaagttatcaccaaatggtggttggctcccttatctttatttttaagtcaatgggcctcggctgtgttccatacttaccaaaggttcttcctgatttattccgtgctgttcgcatgtgcgaggatggtgctttaaaagagttcataacctggaaacttggaacattgatatctattgtccggcagcacatccgaaaatatttacaagacatactttccctcatctctgagctgtggacttcctcattcagcttggctgcaccaaatcggaccatacagggcccacagggttcaccggttcttcaccttgtcgagcagctatgcttagctttaaatgatgagttcagaatgtatttacttcacattctaccgagttgtatccaagtcttaggtgacgctgaacgttgcaatgattattactatgttcctgacatattacacacacttgaagtttttggcggaaatttggatgagcacatgcacttggttgctccggtgcttgttcgtttatttaaagtggagctggttgatatcaggcggcgtgcaattgttactttgactaatcttatacctaaggttcaggttggtactcatgtttcggctttagtgcatcatctgaagcttgtcttggatggcaacaatgatgatctgcggaaagatgctgcagaagcgctctgctgcctcgcacatgcccttggagaagactttactatcttcataccatcaatacgcaaaattcttgtgaagcaccacttgcggtacagaaaatgggatgagattgaaaatcggctactgaggcgagagctactcatcactgaaaacttgtctgtgcaaaagtacacacaatgtccacctgatgtcattagagacccccttgatgattgtgatggtacaccttctgagatagctgatgatacacagcgacaagcaagaagtcatcaagtcaatgatgtccggttgcggagtgccggtgaggcttctcaaaggagtactagggaagactgggctgaatggatgagacatttcagtattgcgcttctcaaagagtcaccatctccagctttacgcacctgtgcaaggctagctcagcttcaggcagaatttatggaacatgatgagaagccacttcctattgatacaagactgcttggtgcacttgctgagaagtgtcgagcatttgcaaaggcactccattataaagaaatggaatttgaagctgtgtgcaccaagaagatgggtgcaaatcctgttacagtggttgaatcccttattcatattaacaatcaactacagcagcatgaggcagctattggcatattgacttactcacagcaaaattcggaagttcaattgaaagaatcatggtatgaaaagttgcaccgttgggatgaggctcttaaagcatacaccgtgaaatcatctcaaacatctggtccctttacaaaacttggatgctacattaggtcgaatgaggtgtctagcagctttggctcggtgggaagatttaagtgcattgtgtagagagcaatggacgggtgcagaaccatctgctcgactggaaatggctccaatggctgcaaatgctgcttggcatatgggtgagtgggaccatatggcagactatgtttctcgcctggatgatgcagatgaaaataagctccgtatgttgggtaacgcaacagctagtggtgacggaagcagtaatggtgctttcttccgggcagttcttttagttcgttacaaaaagtatgatgacgctcggatgtatgttgagcgagctcggcggtgtttagctacagaacttgcagcactggtacttgagagttatgagcgagcgtataataacatggtgcgtgttcaacaactttcagaactggaagaggtgattgattactgcactcttcccatggaaagcccgattgctgacggacggagggaacttattcgcaatatgtggaatgaacggattaaaggaacaaaacggaatgtcgaggtgtggcaagccctacttgctgtcagggagttggttcttccccctaacgaagacagagacacctggataaagttcgctgaactttgctggaagaacggtcgtattagtcaggctagatctacgttagtcaaacttttacagtttgatcctgaatcttcccctgaattgacactgtatcatgcacatccacaagtagctctggcttatctaaaataccagtatgcagttggtgatgagcttaaaaggagggatgcattttctaaactgcaagagttgtctgtgcaggttgctaccaccatgggcaatttacctggaacatcagcaaaccatggcaccatgtcaaatgctggagtaccactcattgctcgtgtctacttgacacttggtagctggaagaaggcactatcacctgcattagatgacgattccattcaagaaattttgatttcttaccataatgccacgctaagtgcaaaggactgggggaaggcctggcacatatgggctttgttcaacacagaagtcatgtcacgctatactttccgaggccgaccagatattgctggaaaatatgttgttgcagcagtaactgggtatttttattctattgcttgtgcatctactacgaaaggggtcgatgatagcttgcaggatatccttcgtctgttaactctttggttcaaccatggggatacctcagaagttcaaacagcgttgcagaaaggtttttcccttgtcaagattgagatgtggctggttgtgctgccccagataattgctaggattcattcgaacaatagagtagttagagaactgatacaatctttgctagttcgaattggaaaggggcatccacaggctttgatgtatcctctcttggttgcctgcaaatcaataagtatattgagacaacgtgcagcgcaggaggtcgttgataagatccgccagcacagtggaggtcttgttgaccaggcacaacttgtgtcgaaggaactgatacgggtagcaattttgtggcatgaaatgtggcatgaggcactcgaggaagctagcaggatgtattttggtgagcacaatatcgaaggaatgcttgctgtacttgagccattgcatgcaatgcttgagaggggggatgagacaattaaagaaaatgccttcattcaggcttatgggcatgaattactggaagctcatgaatgctgtttgaaatatcgggctacaggagaggatgctgagctaactaaggcctgggatttgtattaccatgttttcagaagaatcgacaaacagcttccaagtcttacgaccctcgatctgcactctgtttcgcctgagctactcaaatgtcgaaagttggaacttgctgtgccaggaacttatgctgcagattcaccacttgtgacgattgagtattttgttccccaattgatttgttataacgtccaaacaaaggccaagaaagctgacaattcatggaagtgatggcaatgattatgcattcttgcttaaaggccacgaagatttgcggcaagatgaacgagtaatgcagctttttggtttggtgaatactctcctagagaactcaaggaaaacatcagagaaggatttatcaatccaaagatatgctgttatacctttgtcacctaacagtggtttaattggatgggttccaaactgtgacacacttcatgctctgatccgtgaatacagagatgccaggaagattttcttgaatcaggagcacagacttatgttggcttttgcacccgattatgatcacttacccctcattgcaaaggtggaagtgtttcagcatgctttgcaaaatactgagggaaatgaccttgcgaaggttctgtggctgaagagtcgaacttcggaagtatggcttgagcgccgcacaaactacgctagaagcctggctgttatgagcatggttgggtatttgcttggtttaggagatcggcatccaagcaaccttatgttagatcgctatagtggaaaaatattacacatcgacttcggagattgctttgaggcttcaatgaatcgagaaaagttccctgaaaaagtaccattccgtttgactcgaatgcttgtgaaagctatggaagttagcggtattgagggtacattccgaacaacttgtgaaaatgtgatgcaagtccttcgcacaaacagagacagcgttatggccatgatggaggcatttgtacatgacccgttaatcaattggcgtctgttcaatttcaatgaggttcctcaagtgtcgaactatggtaatgttcatgctcacacggttgtcagtagtgaagaagcagtggctaaccgagagctcatgcaacctcagcgaggagcacgtgagagggaactgctacaggctgtcaatcaactcggtgatgccaatgaggttttgaatgagcgtgctgtagctgtgatggcacggatgagtgacaaactaacagggcgtgacttctcttctgggtcagctttggctggagcaggtggtgtccgttctggtgagctctcttggaaacagtagcagtttataacatgtaaatattgtgaataccgtgtgcatagaagtttcgtggtgacagtttgtatgtgcagctttgtaattagcagaacttcaagatgccttggaccatccttttgtcagtttcttagaccgtgtttagcagttcacccttatggccatccaaaacactgtttttgtactgtagattgtattgtttgtagattgtactgttcgcagggtggatttttgaatatgagtataagaatgtgtaagctgttgaagatagccttaggttttcttccgtgccacttgagggtttgttcgattagctctcaatttatgtggattgagtgagatcggattggtttaaatctcaagcaagttaaattttcttcttaatttttctaatctcatcaaatccatgtgtaacgggaataaccgaacaaggtctgactgaaaatgttaagagggtgtcggatcctctagaccaaagtttagtccag

SEQ ID NO: 62755 - DNA, 7010 bp, Zea Mays
cgcgcgttctgcactcttcgcgccatcgctctcctcgcgccgtcgcccggccgcgccgtcgccctcctcggcctgccctgctcgcgtggagcgtccgcgtgagcgagacagggagacggagcaagacggcgtctcggtgggacgagcgcattcggccgatttgagagagcgagctcgtccattcctgcagtgcgcgttcgcatagttaaacccttgacagttcccctgcccccgcctctatccggcgcgccggccttgcagccgccaacatcgccatgaaaccctcgccgcacttcccggagatcggaaagaagcctaaagatttgtgactaattacctgaagatttgtatggatcatatcttgtttgttctacgtacaccagacgagcgcgctagtggttttgttgcccttggagagatggctggggctctgggtgttgaacttgtgccttatttaccagcaattacctcacatttgcaagatgcgattgctcctcgcagaggaaggccatctcttgaggcaatttcttgtgtaggaagctttgcaaaagctatgggtcctgcaatggaacctcatattcgtagcggacttctagatgctatgttttttgctggtctttctgataaacttatagatgcactcgagtctataagcacaagcatcccgtctttactacccacaatacaggagcgtttattggattgtatatctcaagcactaccaaagtcatcaataaggccaggtgcttctgttggtcgagcaagcaggtcaaacaatttgcaacagtttgtggactctaatagtcctgttcttgtgcaacttgcactgtggactctagcaaacttcaactttaagggccatgaacttctggaattcgctagagagagtgtcatactttatttggaagatgaagatagcagtaccagaaaagctgcctctttgtgctgttgcaaattagttgcacactccctttctgcttcttcagcttcacagttcggttcaaataggacaaatcgtattggaggagctaagcgccgccggcttgtagaggagatagtggagaaacttcttatggctgcagttgctgatgctgatgttggtgttagaagttcagtcttcaaggctttgtatcgaaatccagcttttgatgatttcttggcccaagctgacatcttgacttcaatttttgttgccttaaatgatgaggaatatgatgtcagagaattggcaatttctgttgctggtcgattgtctgaaaagaatcctgcatatgtactgcctgcccttcgtcgctatcttatacaattgctcacatatcttgaccagagtatggatagcaagtgtagagaggaaagtgctagattattgggttgtttaattaggagctgcgcgcggctcattcttccttacattgctccagttcacaaggcgctagtgactagattgtgtgaaggaacgggaccaaatgctaataatgctcttgctgcgggagtgcttgccactgttggagaactggccaaagtgggtggctttgctatgaggcaatatcttcctgagctgatgcctgtagttgtggattctcttttagatggaggtgctgttagtaaaagggaagtggcagtgtcaactctgggacagattatccagagcacaggctatgttattgccccctataatgagtacccgccattgcttggcttactcttgaagttgcttaatggtgaattggaatggtcaactagactagaagtgctgaaggttttagggattatgggtgcattggaccctcacgcacacaagcgaaatcagcacaatctacctggtcagcatagagaggtcctacggccaacaatcgagaccgcacaacatattgtttccatggaagagttaccgactgactactggccttctttttcagcatccgaggactactattcaacagttgcaattagctccctcatgcgaattcttcgagatccttctctttcaagttatcaccaaatggtggttggctcccttatctttatttttaagtcaatgggcctcggctgtgttccatacttaccaaaggttcttcctgatttattccgtgctgttcgcatgtgcgaggatggtgctttaaaagagttcataacctggaaacttggaacattgatatctattgtccggcagcacatccgaaaatatttacaagacatactttccctcatctctgagctgtggacttcctcattcagcttggctgcaccaaatcggaccatacagggcccacagggttcaccggttcttcaccttgtcgagcagctatgcttagctttaaatgatgagttcagaatgtatttacttcacattctaccgagttgtatccaagtcttaggtgacgctgaacgttgcaatgattattactatgttcctgacatattacacacacttgaagtttttggcggaaatttggatgagcacatgcacttggttgctccggtgcttgttcgtttatttaaagtggagctggttgatatcaggcggcgtgcaattgttactttgactaatcttatacctaaggttcaggttggtactcatgtttcggctttagtgcatcatctgaagcttgtcttggatggcaacaatgatgatctgcggaaagatgctgcagaagcgctctgctgcctcgcacatgcccttggagaagactttactatcttcataccatcaatacgcaaaattcttgtgaagcaccacttgcggtacagaaaatgggatgagattgaaaatcggctactgaggcgagagctactcatcactgaaaacttgtctgtgcaaaagtacacacaatgtccacctgatgtcattagagacccccttgatgattgtgatggtacaccttctgagatagctgatgatacacagcgacaagcaagaagtcatcaagtcaatgatgtccggttgcggagtgccggtgaggcttctcaaaggagtactagggaagactgggctgaatggatgagacatttcagtattgcgcttctcaaagagtcaccatctccagctttacgcacctgtgcaaggctagctcagcttcagccttctgttggccgcgagttgtttgctgcaggttttgcaagttgctgggcccaaatgagtgaatcctcccaggaacagctagtgagaagtctcaagacagccttctcatctcagacattcctcctgaaattcttgccacgctgctgaacttagcagaatttatggaacatgatgagaagccacttcctattgatacaagactgcttggtgcacttgctgagaagtgtcgagcatttgcaaaggcactccattataaagaaatggaatttgaagctgtgtgcaccaagaagatgggtgcaaatcctgttacagtggttgaatcccttattcatattaacaatcaactacagcagcatgaggcagctattggcatattgacttactcacagcaaaattcggaagttcaattgaaagaatcatggtatgaaaagttgcaccgttgggatgaggctcttaaagcatacaccgtgaaatcatctcaaacatctggtccctttacaaaacttggatgctacattaggtcgaatgaggtgtctagcagctttggctcggctgcaaatgctgcttggcatatgggtgagtgggaccatatggcagactatgtttctcgcctggatgatgcagatgaaaataagctccgtatgttgggtaacgcaacagctagtggtgacggaagcagtaatggtgctttcttccgggcagttcttttagttcgttacaaaaagtatgatgacgctcggatgtatgttgagcgagctcggcggtgtttagctacagaacttgcagcactggtacttgagagttatgagcgagcgtataataacatggtgcgtgttcaacaactttcagaactggaagaggtgattgattactgcactcttcccatggaaagcccgattgctgacggacggagggaacttattcgcaatatgtggaatgaacggattaaaggaacaaaacggaatgtcgaggtgtggcaagccctacttgctgtcagggagttggttcttccccctaacgaagacagagacacctggataaagttcgctgaactttgctggaagaacggtcgtattagtcaggctagatctacgttagtcaaacttttacagtttgatcctgaatcttcccctgaattgacactgtatcatgcacatccacaagtagctctggcttatctaaaataccagtatgcagttggtgatgagcttaaaaggagggatgcattttctaaactgcaagagttgtctgtgcaggttgctaccaccatgggcaatttacctggaacatcagcaaaccatggcaccatgtcaaatgctggagtaccactcattgctcgtgtctacttgacacttggtagctggaagaaggcactatcacctgcattagatgacgattccattcaagaaattttgatttcttaccataatgccacgctaagtgcaaaggactgggggaaggcctggcacatatgggctttgttcaacacagaagtcatgtcacgctatactttccgaggccgaccagatattgctggaaaatatgttgttgcagcagtaactgggtatttttattctattgcttgtgcatctactacgaaaggggtcgatgatagcttgcagctttactttgaccaaaggaaaaataactcggccggggagggaaagaccgccctcccggatatccttcgtctgttaactctttggttcaaccatggggatacctcagaagttcaaacagcgttgcagaaaggtttttcccttgtcaagattgagatgtggctggttgtgctgccccagataattgctaggattcattcgaacaatagagtagttagagaactgatacaatctttgctagttcgaattggaaaggggcatccacaggctttgatgtatcctctcttggttgcctgcaaatcaataagtatattgagacaacgtgcagcgcaggaggtcgttgataagatccgccagcacagtggaggtcttgttgaccaggcacaacttgtgtcgaaggaactgatacgggtagcaattttgtggcatgaaatgtggcatgaggcactcgaggaagctagcaggatgtattttggtgagcacaatatcgaaggaatgcttgctgtacttgagccattgcatgcaatgcttgagaggggggatgagacaattaaagaaaatgccttcattcaggcttatgggcatgaattactggaagctcatgaatgctgtttgaaatatcgggctacaggagaggatgctgagctaactaaggcctgggatttgtattaccatgttttcagaagaatcgacaaacagcttccaagtcttacgaccctcgatctgcactctgtttcgcctgagctactcaaatgtcgaaagttggaacttgctgtgccaggaacttatgctgcaggccacgaagatttgcggcaagatgaacgagtaatgcagctttttggtttggtgaatactctcctagagaactcaaggaaaacatcagagaaggatttatcaatccaaagatatgctgttatacctttgtcacctaacagtggtttaattggatgggttccaaactgtgacacacttcatgctctgatccgtgaatacagagatgccaggaagattttcttgaatcaggagcacagacttatgttggcttttgcacccgattatgatcacttacccctcattgcaaaggtggaagtgtttcagcatgctttgcaaaatactgagggaaatgaccttgcgaaggttctgtggctgaagagtcgaacttcggaagtatggcttgagcgccgcacaaactacgctagaagcctggctgttatgagcatggttgggtatttgcttggtttaggagatcggcatccaagcaaccttatgttagatcgctatagtggaaaaatattacacatcgacttcggagattgctttgaggcttcaatgaatcgagaaaagttccctgaaaaagtaccattccgtttgactcgaatgcttgtgaaagctatggaagttagcggtattgagggtacattccgaacaacttgtgaaaatgtgatgcaagtccttcgcacaaacagagacagcgttatggccatgatggaggcatttgtacatgacccgttaatcaattggcgtctgttcaatttcaatgaggttcctcaagtgtcgaactatggtaatgttcatgctcacacggttgtcagtagtgaagaagcagtggctaaccgagagctcatgcaacctcagcgaggagcacgtgagagggaactgctacaggctgtcaatcaactcggtgatgccaatgaggttttgaatgagcgtgctgtagctgtgatggcacggatgagtgacaaactaacagggcgtgacttctcttctgggtcagctttggctggagcaggtggtgtccgttctggtgagctctcttggaaacagtagcagtttataacatgtaaatattgtgaataccgtgtgcatagaagtttcgtggtgacagtttgtatgtgcagctttgtaattagcagaacttcaagatgccttggaccatccttttgtcagtttcttagaccgtgtttagcagttcacccttatggccatccaaaacactgtttttgtactgtagattgtattgtttgtagattgtactgttcgcagggtggatttttgaatatgagtataagaatgtgtaagctgttgaagatagccttaggttttcttccgtgccacttgagggtttgttcgattagctctcaatttatgtggattgagtgagatcggattggtttaaatctcaagcaagttaaattttcttcttaatttttctaatctcatcaaatccatgtgtaacgggaataaccgaacaaggtctgactgaaaatgttaagagggtgtcggatcctctagaccaaagtttagtccag

SEQ ID NO: 62756 - DNA, 8127 bp, Zea Mays
gcgggacccacgtgtcatacaaaggcttctttccctttcttcttcgttcttccgttcaccgttctccgccaccgcggcccaaccgcgccgccgcacagccgcgccgccgccgagccgcgcgttctgcactcttcgcgccatcgctctcctcgcgccgtcgcccggccgcgccgtcgccctcctcggcctgccctgctcgcgtggagcgtccgcgtgagcgagacagggagacggagcaagacggcgtctcggtgggacgagcgcattcggccgatttgagagagcgagctcgtccattcctgcagtgcgcgttcgcatagttaaacccttgacagttcccctgcccccgcctctatccggcgcgccggccttgcagccgccaacatcgccatgaaaccctcgccgcacttcccggagatcggaaagaagcctaaagatttgattgctaaggaccacacatttaacatcgcggcttacatctcgtctggagcggatgttattgctgccgcgctccgtaaacatgttgaggaggaagcccgagatctcagcggtgaagcttttttaaggtttatggatcagctctatgagcagatatctagtttactgcagagcaacgatgttaatgaaaatttactggctctccgtgctatcgatgcattaattgatatgccctttggagaaggcgcttccaaagtttctaagtttgccagcttcttgagaaacgtatttgaagtgaagcgcgaccctgaaatcctagttcccgcaagtgaagtgctgggtcatttagcaaaagcgggaggagcaatgactgcagatgaagtggagcggcagattaaaacggctttggggtggcttactggtgaacgagtggaatatcgccgatttgcagctgtactcattctcaaagagatggcagaaaatgcgtcaacagttttcaatgttcatgttcctgagtttgttgatgctatatgggtagcactgagagaccctaaacaagctgttcgtgaaaaagcagttgaagccttgcgcgcttgtctccatgttattgaaaaacgggagacacgttggcgtgtacaatggtattaccggatgtgtgaagccgcacaagttgggcttggcagaaatgcttctgttcatagtattcatggatcattattggccgttggagaattgctgaggaatacaggggagtttatgatgtctcggtacagagaagtggctgatattgtcctcgattatttaaagcatcgagatcagcttgttcgacgtagtataacatcacttcttcctcgaattgcccacttcctgcgtgacagatttgtgactaattacctgaagatttgtatggatcatatcttgtttgttctacgtacaccagacgagcgcgctagtggttttgttgcccttggagagatggctggggctctgggtgttgaacttgtgccttatttaccagcaattacctcacatttgcaagatgcgattgctcctcgcagaggaaggccatctcttgaggcaatttcttgtgtaggaagctttgcaaaagctatgggtcctgcaatggaacctcatattcgtagcggacttctagatgctatgttttttgctggtctttctgataaacttatagatgcactcgagtctataagcacaagcatcccgtctttactacccacaatacaggagcgtttattggattgtatatctcaagcactaccaaagtcatcaataaggccaggtgcttctgttggtcgagcaagcaggtcaaacaatttgcaacagtttgtggactctaatagtcctgttcttgtgcaacttgcactgtggactctagcaaacttcaactttaagggccatgaacttctggaattcgctagagagagtgtcatactttatttggaagatgaagatagcagtaccagaaaagctgcctctttgtgctgttgcaaattagttgcacactccctttctgcttcttcagcttcacagttcggttcaaataggacaaatcgtattggaggagctaagcgccgccggcttgtagaggagatagtggagaaacttcttatggctgcagttgctgatgctgatgttggtgttagaagttcagtcttcaaggctttgtatcgaaatccagcttttgatgatttcttggcccaagctgacatcttgacttcaatttttgttgccttaaatgatgaggaatatgatgtcagagaattggcaatttctgttgctggtcgattgtctgaaaagaatcctgcatatgtactgcctgcccttcgtcgctatcttatacaattgctcacatatcttgaccagagtatggatagcaagtgtagagaggaaagtgctagattattgggttgtttaattaggagctgcgcgcggctcattcttccttacattgctccagttcacaaggcgctagtgactagattgtgtgaaggaacgggaccaaatgctaataatgctcttgctgcgggagtgcttgccactgttggagaactggccaaagtgggtggctttgctatgaggcaatatcttcctgagctgatgcctgtagttgtggattctcttttagatggaggtgctgttagtaaaagggaagtggcagtgtcaactctgggacagattatccagagcacaggctatgttattgccccctataatgagtacccgccattgcttggcttactcttgaagttgcttaatggtgaattggaatggtcaactagactagaagtgctgaaggttttagggattatgggtgcattggaccctcacgcacacaagcgaaatcagcacaatctacctggtcagcatagagaggtcctacggccaacaatcgagaccgcacaacatattgtttccatggaagagttaccgactgactactggccttctttttcagcatccgaggactactattcaacagttgcaattagctccctcatgcgaattcttcgagatccttctctttcaagttatcaccaaatggtggttggctcccttatctttatttttaagtcaatgggcctcggctgtgttccatacttaccaaaggttcttcctgatttattccgtgctgttcgcatgtgcgaggatggtgctttaaaagagttcataacctggaaacttggaacattgatatctattgtccggcagcacatccgaaaatatttacaagacatactttccctcatctctgagctgtggacttcctcattcagcttggctgcaccaaatcggaccatacagggcccacagggttcaccggttcttcaccttgtcgagcagctatgcttagctttaaatgatgagttcagaatgtatttacttcacattctaccgagttgtatccaagtcttaggtgacgctgaacgttgcaatgattattactatgttcctgacatattacacacacttgaagtttttggcggaaatttggatgagcacatgcacttggttgctccggtgcttgttcgtttatttaaagtggagctggttgatatcaggcggcgtgcaattgttactttgactaatcttatacctaaggttcaggttggtactcatgtttcggctttagtgcatcatctgaagcttgtcttggatggcaacaatgatgatctgcggaaagatgctgcagaagcgctctgctgcctcgcacatgcccttggagaagactttactatcttcataccatcaatacgcaaaattcttgtgaagcaccacttgcggtacagaaaatgggatgagattgaaaatcggctactgaggcgagagctactcatcactgaaaacttgtctgtgcaaaagtacacacaatgtccacctgatgtcattagagacccccttgatgattgtgatggtacaccttctgagatagctgatgatacacagcgacaagcaagaagtcatcaagtcaatgatgtccggttgcggagtgccggtgaggcttctcaaaggagtactagggaagactgggctgaatggatgagacatttcagtattgcgcttctcaaagagtcaccatctccagctttacgcacctgtgcaaggctagctcagcttcaggttttgcaagttgctgggcccaaatgagtgaatcctcccaggaacagctagtgagaagtctcaagacagccttctcatctcagacattcctcctgaaattcttgccacgctgctgaacttagcagaatttatggaacatgatgagaagccacttcctattgatacaagactgcttggtgcacttgctgagaaggcagctattggcatattgacttactcacagcaaaattcggaagttcaattgaaagaatcatggtatgaaaagttgcaccgttgggatgaggctcttaaagcatacaccgtgaaatcatctcaaacatctggtccctttacaaaacttggatgctacattaggtcgaatgaggtgtctagcagctttggctcggtgggaagatttaagtgcattgtgtagagagcaatggacgggtgcagaaccatctgctcgactggaaatggctccaatggctgcaaatgctgcttggcatatgggtgagtgggaccatatggcagactatgtttctcgcctggatgatgcagatgaaaataagctccgtatgttgggtaacgcaacagctagtggtgacggaagcagtaatggtgctttcttccgggcagttcttttagttcgttacaaaaagtatgatgacgctcggatgtatgttgagcgagctcggcggtgtttagctacagaacttgcagcactggtacttgagagttatgagcgagcgtataataacatggtgcgtgttcaacaactttcagaactggaagaggtgattgattactgcactcttcccatggaaagcccgattgctgacggacggagggaacttattcgcaatatgtggaatgaacggattaaaggaacaaaacggaatgtcgaggtgtggcaagccctacttgctgtcagggagttggttcttccccctaacgaagacagagacacctggataaagttcgctgaactttgctggaagaacggtcgtattagtcaggctagatctacgttagtcaaacttttacagtttgatcctgaatcttcccctgaattgacactgtatcatgcacatccacaagtagctctggcttatctaaaataccagtatgcagttggtgatgagcttaaaaggagggatgcattttctaaactgcaagagttgtctgtgcaggttgctaccaccatgggcaatttacctggaacatcagcaaaccatggcaccatgtcaaatgctggagtaccactcattgctcgtgtctacttgacacttggtagctggaagaaggcactatcacctgcattagatgacgattccattcaagaaattttgatttcttaccataatgccacgctaagtgcaaaggactgggggaaggcctggcacatatgggctttgttcaacacagaagtcatgtcacgctatactttccgaggccgaccagatattgctggaaaatatgttgttgcagcagtaactgggtatttttattctattgcttgtgcatctactacgaaaggggtcgatgatagcttgcaggatatccttcgtctgttaactctttggttcaaccatggggatacctcagaagttcaaacagcgttgcagaaaggtttttcccttgtcaagattgagatgtggctggttgtgctgccccagataattgctaggattcattcgaacaatagagtagttagagaactgatacaatctttgctagttcgaattggaaaggggcatccacaggctttgatgtatcctctcttggttgcctgcaaatcaataagtatattgagacaacgtgcagcgcaggaggtcgttgataagatccgccagcacagtggaggtcttgttgaccaggcacaacttgtgtcgaaggaactgatacgggtagcaattttgtggcatgaaatgtggcatgaggcactcgaggaagctagcaggatgtattttggtgagcacaatatcgaaggaatgcttgctgtacttgagccattgcatgcaatgcttgagaggggggatgagacaattaaagaaaatgccttcattcaggcttatgggcatgaattactggaagctcatgaatgctgtttgaaatatcgggctacaggagaggatgctgagctaactaaggcctgggatttgtattaccatgttttcagaagaatcgacaaacagcttccaagtcttacgaccctcgatctgcactctgtttcgcctgagctactcaaatgtcgaaagttggaacttgctgtgccaggaacttatgctgcagattcaccacttgtgacgattgagtattttgttccccaattgatttgttataacgtccaaacaaaggccaagaaagctgacaattcatggaagtgatggcaatgattatgcattcttgcttaaaggccacgaagatttgcggcaagatgaacgagtaatgcagctttttggtttggtgaatactctcctagagaactcaaggaaaacatcagagaaggatttatcaatccaaagatatgctgttatacctttgtcacctaacagtggtttaattggatgggttccaaactgtgacacacttcatgctctgatccgtgaatacagagatgccaggaagattttcttgaatcaggagcacagacttatgttggcttttgcacccgattatgatcacttacccctcattgcaaaggtggaagtgtttcagcatgctttgcaaaatactgagggaaatgaccttgcgaaggttctgtggctgaagagtcgaacttcggaagtatggcttgagcgccgcacaaactacgctagaagcctggctgttatgagcatggttgggtatttgcttggtttaggagatcggcatccaagcaaccttatgttagatcgctatagtggaaaaatattacacatcgacttcggagattgctttgaggcttcaatgaatcgagaaaagttccctgaaaaagtaccattccgtttgactcgaatgcttgtgaaagctatggaagttagcggtattgagggtacattccgaacaacttgtgaaaatgtgatgcaagtccttcgcacaaacagagacagcgttatggccatgatggaggcatttgtacatgacccgttaatcaattggcgtctgttcaatttcaatgaggttcctcaagtgtcgaactatggtaatgttcatgctcacacggttgtcagtagtgaagaagcagtggctaaccgagagctcatgcaacctcagcgaggagcacgtgagagggaactgctacaggctgtcaatcaactcggtgatgccaatgaggttttgaatgagcgtgctgtagctgtgatggcacggatgagtgacaaactaacagggcgtgacttctcttctgggtcagctttggctggagcaggtagctctatccaacatggcagtgagcatttggcttcaggagatgcccgggatgcccaacctggtctctcagtgaaggttcaggttcagaagctcatactccaagcgacttcacacgaaaatttgtgccaaaactatgtcgggtggtgtccgttctggtgagctctcttggaaacagtagcagtttataacatgtaaatattgtgaataccgtgtgcatagaagtttcgtggtgacagtttgtatgtgcagctttgtaattagcagaacttcaagatgccttggaccatccttttgtcagtttcttagaccgtgtttagcagttcacccttatggccatccaaaacactgtttttgtactgtagattgtattgtttgtagattgtactgttcgcagggtggatttttgaatatgagtataagaatgtgtaagctgttgaagatagccttaggttttcttccgtgccacttgagggtttgttcgattagctctcaatttatgtggattgagtgagatcggattggtttaaatctcaagcaagttaaattttcttcttaatttttctaatctcatcaaatccatgtgtaacgggaataaccgaacaaggtctgactgaaaatgttaagagggtgtcggatcctctagaccaaagtttagtccag

SEQ ID NO: 62757 - DNA, 8023 bp, Zea Mays
gcgggacccacgtgtcatacaaaggcttctttccctttcttcttcgttcttccgttcaccgttctccgccaccgcggcccaaccgcgccgccgcacagccgcgccgccgccgagccgcgcgttctgcactcttcgcgccatcgctctcctcgcgccgtcgcccggccgcgccgtcgccctcctcggcctgccctgctcgcgtggagcgtccgcgtgagcgagacagggagacggagcaagacggcgtctcggtgggacgagcgcattcggccgatttgagagagcgagctcgtccattcctgcagtgcgcgttcgcatagttaaacccttgacagttcccctgcccccgcctctatccggcgcgccggccttgcagccgccaacatcgccatgaaaccctcgccgcacttcccggagatcggaaagaagcctaaagatttgattgctaaggaccacacatttaacatcgcggcttacatctcgtctggagcggatgttattgctgccgcgctccgtaaacatgttgaggaggaagcccgagatctcagcggtgaagcttttttaaggtttatggatcagctctatgagcagatatctagtttactgcagagcaacgatgttaatgaaaatttactggctctccgtgctatcgatgcattaattgatatgccctttggagaaggcgcttccaaagtttctaagtttgccagcttcttgagaaacgtatttgaagtgaagcgcgaccctgaaatcctagttcccgcaagtgaagtgctgggtcatttagcaaaagcgggaggagcaatgactgcagatgaagtggagcggcagattaaaacggctttggggtggcttactggtgaacgagtggaatatcgccgatttgcagctgtactcattctcaaagagatggcagaaaatgcgtcaacagttttcaatgttcatgttcctgagtttgttgatgctatatgggtagcactgagagaccctaaacaagctgttcgtgaaaaagcagttgaagccttgcgcgcttgtctccatgttattgaaaaacgggagacacgttggcgtgtacaatggtattaccggatgtgtgaagccgcacaagttgggcttggcagaaatgcttctgttcatagtattcatggatcattattggccgttggagaattgctgaggaatacaggggagtttatgatgtctcggtacagagaagtggctgatattgtcctcgattatttaaagcatcgagatcagcttgttcgacgtagtataacatcacttcttcctcgaattgcccacttcctgcgtgacagatttgtgactaattacctgaagatttgtatggatcatatcttgtttgttctacgtacaccagacgagcgcgctagtggttttgttgcccttggagagatggctggggctctgggtgttgaacttgtgccttatttaccagcaattacctcacatttgcaagatgcgattgctcctcgcagaggaaggccatctcttgaggcaatttcttgtgtaggaagctttgcaaaagctatgggtcctgcaatggaacctcatattcgtagcggacttctagatgctatgttttttgctggtctttctgataaacttatagatgcactcgagtctataagcacaagcatcccgtctttactacccacaatacaggagcgtttattggattgtatatctcaagcactaccaaagtcatcaataaggccaggtgcttctgttggtcgagcaagcaggtcaaacaatttgcaacagtttgtggactctaatagtcctgttcttgtgcaacttgcactgtggactctagcaaacttcaactttaagggccatgaacttctggaattcgctagagagagtgtcatactttatttggaagatgaagatagcagtaccagaaaagctgcctctttgtgctgttgcaaattagttgcacactccctttctgcttcttcagcttcacagttcggttcaaataggacaaatcgtattggaggagctaagcgccgccggcttgtagaggagatagtggagaaacttcttatggctgcagttgctgatgctgatgttggtgttagaagttcagtcttcaaggctttgtatcgaaatccagcttttgatgatttcttggcccaagctgacatcttgacttcaatttttgttgccttaaatgatgaggaatatgatgtcagagaattggcaatttctgttgctggtcgattgtctgaaaagaatcctgcatatgtactgcctgcccttcgtcgctatcttatacaattgctcacatatcttgaccagaggcgctagtgactagattgtgtgaaggaacgggaccaaatgctaataatgctcttgctgcgggagtgcttgccactgttggagaactggccaaagtgggtggctttgctatgaggcaatatcttcctgagctgatgcctgtagttgtggattctcttttagatggaggtgctgttagtaaaagggaagtggcagtgtcaactctgggacagattatccagagcacaggctatgttattgccccctataatgagtacccgccattgcttggcttactcttgaagttgcttaatggtgaattggaatggtcaactagactagaagtgctgaaggttttagggattatgggtgcattggaccctcacgcacacaagcgaaatcagcacaatctacctggtcagcatagagaggtcctacggccaacaatcgagaccgcacaacatattgtttccatggaagagttaccgactgactactggccttctttttcagcatccgaggactactattcaacagttgcaattagctccctcatgcgaattcttcgagatccttctctttcaagttatcaccaaatggtggttggctcccttatctttatttttaagtcaatgggcctcggctgtgttccatacttaccaaaggttcttcctgatttattccgtgctgttcgcatgtgcgaggatggtgctttaaaagagttcataacctggaaacttggaacattgatatctattgtccggcagcacatccgaaaatatttacaagacatactttccctcatctctgagctgtggacttcctcattcagcttggctgcaccaaatcggaccatacagggcccacagggttcaccggttcttcaccttgtcgagcagctatgcttagctttaaatgatgagttcagaatgtatttacttcacattctaccgagttgtatccaagtcttaggtgacgctgaacgttgcaatgattattactatgttcctgacatattacacacacttgaagtttttggcggaaatttggatgagcacatgcacttggttgctccggtgcttgttcgtttatttaaagtggagctggttgatatcaggcggcgtgcaattgttactttgactaatcttatacctaaggttcaggttggtactcatgtttcggctttagtgcatcatctgaagcttgtcttggatggcaacaatgatgatctgcggaaagatgctgcagaagcgctctgctgcctcgcacatgcccttggagaagactttactatcttcataccatcaatacgcaaaattcttgtgaagcaccacttgcggtacagaaaatgggatgagattgaaaatcggctactgaggcgagagctactcatcactgaaaacttgtctgtgcaaaagtacacacaatgtccacctgatgtcattagagacccccttgatgattgtgatggtacaccttctgagatagctgatgatacacagcgacaagcaagaagtcatcaagtcaatgatgtccggttgcggagtgccggtgaggcttctcaaaggagtactagggaagactgggctgaatggatgagacatttcagtattgcgcttctcaaagagtcaccatctccagctttacgcacctgtgcaaggctagctcagcttcaggcagaatttatggaacatgatgagaagccacttcctattgatacaagactgcttggtgcacttgctgagaagtgtcgagcatttgcaaaggcactccattataaagaaatggaatttgaagctgtgtgcaccaagaagatgggtgcaaatcctgttacagtggttgaatcccttattcatattaacaatcaactacagcagcatgaggcagctattggcatattgacttactcacagcaaaattcggaagttcaattgaaagaatcatggtatgaaaagttgcaccgttgggatgaggctcttaaagcatacaccgtgaaatcatctcaaacatctggtccctttacaaaacttggatgctacattaggtcgaatgaggtgtctagcagctttggctcggtgggaagatttaagtgcattgtgtagagagcaatggacgggtgcagaaccatctgctcgactggaaatggctccaatggctgcaaatgctgcttggcatatgggtgagtgggaccatatggcagactatgtttctcgcctggatgatgcagatgaaaataagctccgtatgttgggtaacgcaacagctagtggtgacggaagcagtaatggtgctttcttccgggcagttcttttagttcgttacaaaaagtatgatgacgctcggatgtatgttgagcgagctcggcggtgtttagctacagaacttgcagcactggtacttgagagttatgagcgagcgtataataacatggtgcgtgttcaacaactttcagaactggaagaggtgattgattactgcactcttcccatggaaagcccgattgctgacggacggagggaacttattcgcaatatgtggaatgaacggattaaaggaacaaaacggaatgtcgaggtgtggcaagccctacttgctgtcagggagttggttcttccccctaacgaagacagagacacctggataaagttcgctgaactttgctggaagaacggtcgtattagtcaggctagatctacgttagtcaaacttttacagtttgatcctgaatcttcccctgaattgacactgtatcatgcacatccacaagtagctctggcttatctaaaataccagtatgcagttggtgatgagcttaaaaggagggatgcattttctaaactgcaagagttgtctgtgcaggttgctaccaccatgggcaatttacctggaacatcagcaaaccatggcaccatgtcaaatgctggagtaccactcattgctcgtgtctacttgacacttggtagctggaagaaggcactatcacctgcattagatgacgattccattcaagaaattttgatttcttaccataatgccacgctaagtgcaaaggactgggggaaggcctggcacatatgggctttgttcaacacagaagtcatgtcacgctatactttccgaggccgaccagatattgctggaaaatatgttgttgcagcagtaactgggtatttttattctattgcttgtgcatctactacgaaaggggtcgatgatagcttgcagctttactttgaccaaaggaaaaataactcggccggggagggaaagaccgccctcccggatatccttcgtctgttaactctttggttcaaccatggggatacctcagaagttcaaacagcgttgcagaaaggtttttcccttgtcaagattgagatgtggctggttgtgctgccccagataattgctaggattcattcgaacaatagagtagttagagaactgatacaatctttgctagttcgaattggaaaggggcatccacaggctttgatgtatcctctcttggttgcctgcaaatcaataagtatattgagacaacgtgcagcgcaggaggtcgttgataagatccgccagcacagtggaggtcttgttgaccaggcacaacttgtgtcgaaggaactgatacgggtagcaattttgtggcatgaaatgtggcatgaggcactcgaggaagctagcaggatgtattttggtgagcacaatatcgaaggaatgcttgctgtacttgagccattgcatgcaatgcttgagaggggggatgagacaattaaagaaaatgccttcattcaggcttatgggcatgaattactggaagctcatgaatgctgtttgaaatatcgggctacaggagaggatgctgagctaactaaggcctgggatttgtattaccatgttttcagaagaatcgacaaacagcttccaagtcttacgaccctcgatctgcactctgtttcgcctgagctactcaaatgtcgaaagttggaacttgctgtgccaggaacttatgctgcagattcaccacttgtgacgattgagtattttgttccccaattgatttgttataacgtccaaacaaaggccaagaaagctgacaattcatggaagtgatggcaatgattatgcattcttgcttaaaggccacgaagatttgcggcaagatgaacgagtaatgcagctttttggtttggtgaatactctcctagagaactcaaggaaaacatcagagaaggatttatcaatccaaagatatgctgttatacctttgtcacctaacagtggtttaattggatgggttccaaactgtgacacacttcatgctctgatccgtgaatacagagatgccaggaaggtggaagtgtttcagcatgctttgcaaaatactgagggaaatgaccttgcgaaggttctgtggctgaagagtcgaacttcggaagtatggcttgagcgccgcacaaactacgctagaagcctggctgttatgagcatggttgggtatttgcttggtttaggagatcggcatccaagcaaccttatgttagatcgctatagtggaaaaatattacacatcgacttcggagattgctttgaggcttcaatgaatcgagaaaagttccctgaaaaagtaccattccgtttgactcgaatgcttgtgaaagctatggaagttagcggtattgagggtacattccgaacaacttgtgaaaatgtgatgcaagtccttcgcacaaacagagacagcgttatggccatgatggaggcatttgtacatgacccgttaatcaattggcgtctgttcaatttcaatgaggttcctcaagtgtcgaactatggtaatgttcatgctcacacggttgtcagtagtgaagaagcagtggctaaccgagagctcatgcaacctcagcgaggagcacgtgagagggaactgctacaggctgtcaatcaactcggtgatgccaatgaggttttgaatgagcgtgctgtagctgtgatggcacggatgagtgacaaactaacagggcgtgacttctcttctgggtcagctttggctggagcaggtagctctatccaacatggcagtgagcatttggcttcaggagatgcccgggatgcccaacctggtctctcagtgaaggttcaggttcagaagctcatactccaagcgacttcacacgaaaatttgtgccaaaactatgtcgggtggtgtccgttctggtgagctctcttggaaacagtagcagtttataacatgtaaatattgtgaataccgtgtgcatagaagtttcgtggtgacagtttgtatgtgcagctttgtaattagcagaacttcaagatgccttggaccatccttttgtcagtttcttagaccgtgtttagcagttcacccttatggccatccaaaacactgtttttgtactgtagattgtattgtttgtagattgtactgttcgcagggtggatttttgaatatgagtataagaatgtgtaagctgttgaagatagccttaggttttcttccgtgccacttgagggtttgttcgattagctctcaatttatgtggattgagtgagatcggattggtttaaatctcaagcaagttaaattttcttcttaatttttctaatctcatcaaatccatgtgtaacgggaataaccgaacaaggtctgactgaaaatgttaagagggtgtcggatcctctagaccaaagtttagtccag

SEQ ID NO: 62758 - DNA, 8175 bp, Zea Mays
gcgggacccacgtgtcatacaaaggcttctttccctttcttcttcgttcttccgttcaccgttctccgccaccgcggcccaaccgcgccgccgcacagccgcgccgccgccgagccgcgcgttctgcactcttcgcgccatcgctctcctcgcgccgtcgcccggccgcgccgtcgccctcctcggcctgccctgctcgcgtggagcgtccgcgtgagcgagacagggagacggagcaagacggcgtctcggtgggacgagcgcattcggccgatttgagagagcgagctcgtccattcctgcagtgcgcgttcgcatagttaaacccttgacagttcccctgcccccgcctctatccggcgcgccggccttgcagccgccaacatcgccatgaaaccctcgccgcacttcccggagatcggaaagaagcctaaagatttgattgctaaggaccacacatttaacatcgcggcttacatctcgtctggagcggatgttattgctgccgcgctccgtaaacatgttgaggaggaagcccgagatctcagcggtgaagcttttttaaggtttatggatcagctctatgagcagatatctagtttactgcagagcaacgatgttaatgaaaatttactggctctccgtgctatcgatgcattaattgatatgccctttggagaaggcgcttccaaagtttctaagtttgccagcttcttgagaaacgtatttgaagtgaagcgcgaccctgaaatcctagttcccgcaagtgaagtgctgggtcatttagcaaaagcgggaggagcaatgactgcagatgaagtggagcggcagattaaaacggctttggggtggcttactggtgaacgagtggaatatcgccgatttgcagctgtactcattctcaaagagatggcagaaaatgcgtcaacagttttcaatgttcatgttcctgagtttgttgatgctatatgggtagcactgagagaccctaaacaagctgttcgtgaaaaagcagttgaagccttgcgcgcttgtctccatgttattgaaaaacgggagacacgttggcgtgtacaatggtattaccggatgtgtgaagccgcacaagttgggcttggcagaaatgcttctgttcatagtattcatggatcattattggccgttggagaattgctgaggaatacaggggagtttatgatgtctcggtacagagaagtggctgatattgtcctcgattatttaaagcatcgagatcagcttgttcgacgtagtataacatcacttcttcctcgaattgcccacttcctgcgtgacagatttgtgactaattacctgaagatttgtatggatcatatcttgtttgttctacgtacaccagacgagcgcgctagtggttttgttgcccttggagagatggctggggctctgggtgttgaacttgtgccttatttaccagcaattacctcacatttgcaagatgcgattgctcctcgcagaggaaggccatctcttgaggcaatttcttgtgtaggaagctttgcaaaagctatgggtcctgcaatggaacctcatattcgtagcggacttctagatgctatgttttttgctggtctttctgataaacttatagatgcactcgagtctataagcacaagcatcccgtctttactacccacaatacaggagcgtttattggattgtatatctcaagcactaccaaagtcatcaataaggccaggtgcttctgttggtcgagcaagcaggtcaaacaatttgcaacagtttgtggactctaatagtcctgttcttgtgcaacttgcactgtggactctagcaaacttcaactttaagggccatgaacttctggaattcgctagagagagtgtcatactttatttggaagatgaagatagcagtaccagaaaagctgcctctttgtgctgttgcaaattagttgcacactccctttctgcttcttcagcttcacagttcggttcaaataggacaaatcgtattggaggagctaagcgccgccggcttgtagaggagatagtggagaaacttcttatggctgcagttgctgatgctgatgttggtgttagaagttcagtcttcaaggctttgtatcgaaatccagcttttgatgatttcttggcccaagctgacatcttgacttcaatttttgttgccttaaatgatgaggaatatgatgtcagagaattggcaatttctgttgctggtcgattgtctgaaaagaatcctgcatatgtactgcctgcccttcgtcgctatcttatacaattgctcacatatcttgaccagagtatggatagcaagtgtagagaggaaagtgctagattattgggttgtttaattaggagctgcgcgcggctcattcttccttacattgctccagttcacaaggcgctagtgactagattgtgtgaaggaacgggaccaaatgctaataatgctcttgctgcgggagtgcttgccactgttggagaactggccaaagtgggtggctttgctatgaggcaatatcttcctgagctgatgcctgtagttgtggattctcttttagatggaggtgctgttagtaaaagggaagtggcagtgtcaactctgggacagattatccagagcacaggctatgttattgccccctataatgagtacccgccattgcttggcttactcttgaagttgcttaatggtgaattggaatggtcaactagactagaagtgctgaaggttttagggattatgggtgcattggaccctcacgcacacaagcgaaatcagcacaatctacctggtcagcatagagaggtcctacggccaacaatcgagaccgcacaacatattgtttccatggaagagttaccgactgactactggccttctttttcagcatccgaggactactattcaacagttgcaattagctccctcatgcgaattcttcgagatccttctctttcaagttatcaccaaatggtggttggctcccttatctttatttttaagtcaatgggcctcggctgtgttccatacttaccaaaggatggtgctttaaaagagttcataacctggaaacttggaacattgatatctattgtccggcagcacatccgaaaatatttacaagacatactttccctcatctctgagctgtggacttcctcattcagcttggctgcaccaaatcggaccatacagggcccacagggttcaccggttcttcaccttgtcgagcagctatgcttagctttaaatgatgagttcagaatgtatttacttcacattctaccgagttgtatccaagtcttaggtgacgctgaacgttgcaatgattattactatgttcctgacatattacacacacttgaagtttttggcggaaatttggatgagcacatgcacttggttgctccggtgcttgttcgtttatttaaagtggagctggttgatatcaggcggcgtgcaattgttactttgactaatcttatacctaaggttcaggttggtactcatgtttcggctttagtgcatcatctgaagcttgtcttggatggcaacaatgatgatctgcggaaagatgctgcagaagcgctctgctgcctcgcacatgcccttggagaagactttactatcttcataccatcaatacgcaaaattcttgtgaagcaccacttgcggtacagaaaatgggatgagattgaaaatcggctactgaggcgagagctactcatcactgaaaacttgtctgtgcaaaagtacacacaatgtccacctgatgtcattagagacccccttgatgattgtgatggtacaccttctgagatagctgatgatacacagcgacaagcaagaagtcatcaagtcaatgatgtccggttgcggagtgccggtgaggcttctcaaaggagtactagggaagactgggctgaatggatgagacatttcagtattgcgcttctcaaagagtcaccatctccagctttacgcacctgtgcaaggctagctcagcttcagccttctgttggccgcgagttgtttgctgcaggttttgcaagttgctgggcccaaatgagtgaatcctcccaggaacagctagtgagaagtctcaagacagccttctcatctcagacattcctcctgaaattcttgccacgctgctgaacttagcagaatttatggaacatgatgagaagccacttcctattgatacaagactgcttggtgcacttgctgagaagtgtcgagcatttgcaaaggcactccattataaagaaatggaatttgaagctgtgtgcaccaagaagatgggtgcaaatcctgttacagtggttgaatcccttattcatattaacaatcaactacagcagcatgaggcagctattggcatattgacttactcacagcaaaattcggaagttcaattgaaagaatcatggtatgaaaagttgcaccgttgggatgaggctcttaaagcatacaccgtgaaatcatctcaaacatctggtccctttacaaaacttggatgctacattaggtcgaatgaggtgtctagcagctttggctcggctgcaaatgctgcttggcatatgggtgagtgggaccatatggcagactatgtttctcgcctggatgatgcagatgaaaataagctccgtatgttgggtaacgcaacagctagtggtgacggaagcagtaatggtgctttcttccgggcagttcttttagttcgttacaaaaagtatgatgacgctcggatgtatgttgagcgagctcggcggtgtttagctacagaacttgcagcactggtacttgagagttatgagcgagcgtataataacatggtgcgtgttcaacaactttcagaactggaagaggtgattgattactgcactcttcccatggaaagcccgattgctgacggacggagggaacttattcgcaatatgtggaatgaacggattaaaggaacaaaacggaatgtcgaggtgtggcaagccctacttgctgtcagggagttggttcttccccctaacgaagacagagacacctggataaagttcgctgaactttgctggaagaacggtcgtattagtcaggctagatctacgttagtcaaacttttacagtttgatcctgaatcttcccctgaattgacactgtatcatgcacatccacaagtagctctggcttatctaaaataccagtatgcagttggtgatgagcttaaaaggagggatgcattttctaaactgcaagagttgtctgtgcaggttgctaccaccatgggcaatttacctggaacatcagcaaaccatggcaccatgtcaaatgctggagtaccactcattgctcgtgtctacttgacacttggtagctggaagaaggcactatcacctgcattagatgacgattccattcaagaaattttgatttcttaccataatgccacgctaagtgcaaaggactgggggaaggcctggcacatatgggctttgttcaacacagaagtcatgtcacgctatactttccgaggccgaccagatattgctggaaaatatgttgttgcagcagtaactgggtatttttattctattgcttgtgcatctactacgaaaggggtcgatgatagcttgcaggatatccttcgtctgttaactctttggttcaaccatggggatacctcagaagttcaaacagcgttgcagaaaggtttttcccttgtcaagattgagatgtggctggttgtgctgccccagataattgctaggattcattcgaacaatagagtagttagagaactgatacaatctttgctagttcgaattggaaaggggcatccacaggctttgatgtatcctctcttggttgcctgcaaatcaataagtatattgagacaacgtgcagcgcaggaggtcgttgataagatccgccagcacagtggaggtcttgttgaccaggcacaacttgtgtcgaaggaactgatacgggtagcaattttgtggcatgaaatgtggcatgaggcactcgaggaagctagcaggatgtattttggtgagcacaatatcgaaggaatgcttgctgtacttgagccattgcatgcaatgcttgagaggggggatgagacaattaaagaaaatgccttcattcaggcttatgggcatgaattactggaagctcatgaatgctgtttgaaatatcgggctacaggagaggatgctgagctaactaaggcctgggatttgtattaccatgttttcagaagaatcgacaaacagcttccaagtcttacgaccctcgatctgcactctgtttcgcctgagctactcaaatgtcgaaagttggaacttgctgtgccaggaacttatgctgcagattcaccacttgtgacgattgagtattttgttccccaattgatttgttataacgtccaaacaaaggccaagaaagctgacaattcatggaagtgatggcaatgattatgcattcttgcttaaaggccacgaagatttgcggcaagatgaacgagtaatgcagctttttggtttggtgaatactctcctagagaactcaaggaaaacatcagagaaggatttatcaatccaaagatatgctgttatacctttgtcacctaacagtggtttaattggatgggttccaaactgtgacacacttcatgctctgatccgtgaatacagagatgccaggaagattttcttgaatcaggagcacagacttatgttggcttttgcacccgattatgatcacttacccctcattgcaaaggtggaagtgtttcagcatgctttgcaaaatactgagggaaatgaccttgcgaaggttctgtggctgaagagtcgaacttcggaagtatggcttgagcgccgcacaaactacgctagaagcctggctgttatgagcatggttgggtatttgcttggtttaggagatcggcatccaagcaaccttatgttagatcgctatagtggaaaaatattacacatcgacttcggagattgctttgaggcttcaatgaatcgagaaaagttccctgaaaaagtaccattccgtttgactcgaatgcttgtgaaagctatggaagttagcggtattgagggtacattccgaacaacttgtgaaaatgtgatgcaagtccttcgcacaaacagagacagcgttatggccatgatggaggcatttgtacatgacccgttaatcaattggcgtctgttcaatttcaatgaggttcctcaagtgtcgaactatggtaatgttcatgctcacacggttgtcagtagtgaagaagcagtggctaaccgagagctcatgcaacctcagcgaggagcacgtgagagggaactgctacaggctgtcaatcaactcggtgatgccaatgaggttttgaatgagcgtgctgtagctgtgatggcacggatgagtgacaaactaacagggcgtgacttctcttctgggtcagctttggctggagcaggtagctctatccaacatggcagtgagcatttggcttcaggagatgcccgggatgcccaacctggtctctcagtgaaggttcaggttcagaagctcatactccaagcgacttcacacgaaaatttgtgccaaaactatgtcgggtggtgtccgttctggtgagctctcttggaaacagtagcagtttataacatgtaaatattgtgaataccgtgtgcatagaagtttcgtggtgacagtttgtatgtgcagctttgtaattagcagaacttcaagatgccttggaccatccttttgtcagtttcttagaccgtgtttagcagttcacccttatggccatccaaaacactgtttttgtactgtagattgtattgtttgtagattgtactgttcgcagggtggatttttgaatatgagtataagaatgtgtaagctgttgaagatagccttaggttttcttccgtgccacttgagggtttgttcgattagctctcaatttatgtggattgagtgagatcggattggtttaaatctcaagcaagttaaattttcttcttaatttttctaatctcatcaaatccatgtgtaacgggaataaccgaacaaggtctgactgaaaatgttaagagggtgtcggatcctctagaccaaagtttagtccag

SEQ ID NO: 62759 - DNA, 8350 bp, Zea Mays
gcgggacccacgtgtcatacaaaggcttctttccctttcttcttcgttcttccgttcaccgttctccgccaccgcggcccaaccgcgccgccgcacagccgcgccgccgccgagccgcgcgttctgcactcttcgcgccatcgctctcctcgcgccgtcgcccggccgcgccgtcgccctcctcggcctgccctgctcgcgtggagcgtccgcgtgagcgagacagggagacggagcaagacggcgtctcggtgggacgagcgcattcggccgatttgagagagcgagctcgtccattcctgcagtgcgcgttcgcatagttaaacccttgacagttcccctgcccccgcctctatccggcgcgccggccttgcagccgccaacatcgccatgaaaccctcgccgcacttcccggagatcggaaagaagcctaaagatttgattgctaaggaccacacatttaacatcgcggcttacatctcgtctggagcggatgttattgctgccgcgctccgtaaacatgttgaggaggaagcccgagatctcagcggtgaagcttttttaaggtttatggatcagctctatgagcagatatctagtttactgcagagcaacgatgttaatgaaaatttactggctctccgtgctatcgatgcattaattgatatgccctttggagaaggcgcttccaaagtttctaagtttgccagcttcttgagaaacgtatttgaagtgaagcgcgaccctgaaatcctagttcccgcaagtgaagtgctgggtcatttagcaaaagcgggaggagcaatgactgcagatgaagtggagcggcagattaaaacggctttggggtggcttactggtgaacgagtggaatatcgccgatttgcagctgtactcattctcaaagagatggcagaaaatgcgtcaacagttttcaatgttcatgttcctgagtttgttgatgctatatgggtagcactgagagaccctaaacaagctgttcgtgaaaaagcagttgaagccttgcgcgcttgtctccatgttattgaaaaacgggagacacgttggcgtgtacaatggtattaccggatgtgtgaagccgcacaagttgggcttggcagaaatgcttctgttcatagtattcatggatcattattggccgttggagaattgctgaggaatacaggggagtttatgatgtctcggtacagagaagtggctgatattgtcctcgattatttaaagcatcgagatcagcttgttcgacgtagtataacatcacttcttcctcgaattgcccacttcctgcgtgacagatttgtgactaattacctgaagatttgtatggatcatatcttgtttgttctacgtacaccagacgagcgcgctagtggttttgttgcccttggagagatggctggggctctgggtgttgaacttgtgccttatttaccagcaattacctcacatttgcaagatgcgattgctcctcgcagaggaaggccatctcttgaggcaatttcttgtgtaggaagctttgcaaaagctatgggtcctgcaatggaacctcatattcgtagcggacttctagatgctatgttttttgctggtctttctgataaacttatagatgcactcgagtctataagcacaagcatcccgtctttactacccacaatacaggagcgtttattggattgtatatctcaagcactaccaaagtcatcaataaggccaggtgcttctgttggtcgagcaagcaggtcaaacaatttgcaacagtttgtggactctaatagtcctgttcttgtgcaacttgcactgtggactctagcaaacttcaactttaagggccatgaacttctggaattcgctagagagagtgtcatactttatttggaagatgaagatagcagtaccagaaaagctgcctctttgtgctgttgcaaattagttgcacactccctttctgcttcttcagcttcacagttcggttcaaataggacaaatcgtattggaggagctaagcgccgccggcttgtagaggagatagtggagaaacttcttatggctgcagttgctgatgctgatgttggtgttagaagttcagtcttcaaggctttgtatcgaaatccagcttttgatgatttcttggcccaagctgacatcttgacttcaatttttgttgccttaaatgatgaggaatatgatgtcagagaattggcaatttctgttgctggtcgattgtctgaaaagaatcctgcatatgtactgcctgcccttcgtcgctatcttatacaattgctcacatatcttgaccagagtatggatagcaagtgtagagaggaaagtgctagattattgggttgtttaattaggagctgcgcgcggctcattcttccttacattgctccagttcacaaggcgctagtgactagattgtgtgaaggaacgggaccaaatgctaataatgctcttgctgcgggagtgcttgccactgttggagaactggccaaagtgggtggctttgctatgaggcaatatcttcctgagctgatgcctgtagttgtggattctcttttagatggaggtgctgttagtaaaagggaagtggcagtgtcaactctgggacagattatccagagcacaggctatgttattgccccctataatgagtacccgccattgcttggcttactcttgaagttgcttaatggtgaattggaatggtcaactagactagaagtgctgaaggttttagggattatgggtgcattggaccctcacgcacacaagcgaaatcagcacaatctacctggtcagcatagagaggtcctacggccaacaatcgagaccgcacaacatattgtttccatggaagagttaccgactgactactggccttctttttcagcatccgaggactactattcaacagttgcaattagctccctcatgcgaattcttcgagatccttctctttcaagttatcaccaaatggtggttggctcccttatctttatttttaagtcaatgggcctcggctgtgttccatacttaccaaaggttcttcctgatttattccgtgctgttcgcatgtgcgaggatggtgctttaaaagagttcataacctggaaacttggaacattgatatctattgtccggcagcacatccgaaaatatttacaagacatactttccctcatctctgagctgtggacttcctcattcagcttggctgcaccaaatcggaccatacagggcccacagggttcaccggttcttcaccttgtcgagcagctatgcttagctttaaatgatgagttcagaatgtatttacttcacattctaccgagttgtatccaagtcttaggtgacgctgaacgttgcaatgattattactatgttcctgacatattacacacacttgaagtttttggcggaaatttggatgagcacatgcacttggttgctccggtgcttgttcgtttatttaaagtggagctggttgatatcaggcggcgtgcaattgttactttgactaatcttatacctaaggttcaggttggtactcatgtttcggctttagtgcatcatctgaagcttgtcttggatggcaacaatgatgatctgcggaaagatgctgcagaagcgctctgctgcctcgcacatgcccttggagaagactttactatcttcataccatcaatacgcaaaattcttgtgaagcaccacttgcggtacagaaaatgggatgagattgaaaatcggctactgaggcgagagctactcatcactgaaaacttgtctgtgcaaaagtacacacaatgtccacctgatgtcattagagacccccttgatgattgtgatggtacaccttctgagatagctgatgatacacagcgacaagcaagaagtcatcaagtcaatgatgtccggttgcggagtgccggtgaggcttctcaaaggagtactagggaagactgggctgaatggatgagacatttcagtattgcgcttctcaaagagtcaccatctccagctttacgcacctgtgcaaggctagctcagcttcagccttctgttggccgcgagttgtttgctgcaggttttgcaagttgctgggcccaaatgagtgaatcctcccaggaacagctagtgagaagtctcaagacagccttctcatctcagacattcctcctgaaattcttgccacgctgctgaacttagcagaatttatggaacatgatgagaagccacttcctattgatacaagactgcttggtgcacttgctgagaagtgtcgagcatttgcaaaggcactccattataaagaaatggaatttgaagctgtgtgcaccaagaagatgggtgcaaatcctgttacagtggttgaatcccttattcatattaacaatcaactacagcagcatgaggcagctattggcatattgacttactcacagcaaaattcggaagttcaattgaaagaatcatggtatgaaaagttgcaccgttgggatgaggctcttaaagcatacaccgtgaaatcatctcaaacatctggtccctttacaaaacttggatgctacattaggtcgaatgaggtgtctagcagctttggctcggtgggaagatttaagtgcattgtgtagagagcaatggacgggtgcagaaccatctgctcgactggaaatggctccaatggctgcaaatgctgcttggcatatgggtgagtgggaccatatggcagactatgtttctcgcctggatgatgcagatgaaaataagctccgtatgttgggtaacgcaacagctagtggtgacggaagcagtaatggtgctttcttccgggcagttcttttagttcgttacaaaaagtatgatgacgctcggatgtatgttgagcgagctcggcggtgtttagctacagaacttgcagcactggtacttgagagttatgagcgagcgtataataacatggtgcgtgttcaacaactttcagaactggaagaggtgattgattactgcactcttcccatggaaagcccgattgctgacggacggagggaacttattcgcaatatgtggaatgaacggattaaaggaacaaaacggaatgtcgaggtgtggcaagccctacttgctgtcagggagttggttcttccccctaacgaagacagagacacctggataaagttcgctgaactttgctggaagaacggtcgtattagtcaggctagatctacgttagtcaaacttttacagtttgatcctgaatcttcccctgaattgacactgtatcatgcacatccacaagtagctctggcttatctaaaataccagtatgcagttggtgatgagcttaaaaggagggatgcattttctaaactgcaagagttgtctgtgcaggttgctaccaccatgggcaatttacctggaacatcagcaaaccatggcaccatgtcaaatgctggagtaccactcattgctcgtgtctacttgacacttggtagctggaagaaggcactatcacctgcattagatgacgattccattcaagaaattttgatttcttaccataatgccacgctaagtgcaaaggactgggggaaggcctggcacatatgggctttgttcaacacagaagtcatgtcacgctatactttccgaggccgaccagatattgctggaaaatatgttgttgcagcagtaactgggtatttttattctattgcttgtgcatctactacgaaaggggtcgatgatagcttgcagctttactttgaccaaaggaaaaataactcggccggggagggaaagaccgccctcccggatatccttcgtctgttaactctttggttcaaccatggggatacctcagaagttcaaacagcgttgcagaaaggtttttcccttgtcaagattgagatgtggctggttgtgctgccccagataattgctaggattcattcgaacaatagagtagttagagaactgatacaatctttgctagttcgaattggaaaggggcatccacaggctttgatgtatcctctcttggttgcctgcaaatcaataagtatattgagacaacgtgcagcgcaggaggtcgttgataagatccgccagcacagtggaggtcttgttgaccaggcacaacttgtgtcgaaggaactgatacgggtagcaattttgtggcatgaaatgtggcatgaggcactcgaggaagctagcaggatgtattttggtgagcacaatatcgaaggaatgcttgctgtacttgagccattgcatgcaatgcttgagaggggggatgagacaattaaagaaaatgccttcattcaggcttatgggcatgaattactggaagctcatgaatgctgtttgaaatatcgggctacaggagaggatgctgagctaactaaggcctgggatttgtattaccatgttttcagaagaatcgacaaacagcttccaagtcttacgaccctcgatctgcactctgtttcgcctgagctactcaaatgtcgaaagttggaacttgctgtgccaggaacttatgctgcagattcaccacttgtgacgattgagtattttgttccccaattgatttgttataacgtccaaacaaaggccaagaaagctgacaattcatggaagtgatggcaatgattatgcattcttgcttaaaggccacgaagatttgcggcaagatgaacgagtaatgcagctttttggtttggtgaatactctcctagagaactcaaggaaaacatcagagaaggatttatcaatccaaagatatgctgttatacctttgtcacctaacagtggtttaattggatgggttccaaactgtgacacacttcatgctctgatccgtgaatacagagatgccaggaagattttcttgaatcaggagcacagacttatgttggcttttgcacccgattatgatcacttacccctcattgcaaaggtggaagtgtttcagcatgctttgcaaaatactgagggaaatgaccttgcgaaggttctgtggctgaagagtcgaacttcggaagtatggcttgagcgccgcacaaactacgctagaagcctggctgttatgagcatggttgggtatttgcttggtttaggagatcggcatccaagcaaccttatgttagatcgctatagtggaaaaatattacacatcgacttcggagattgctttgaggcttcaatgaatcgagaaaagttccctgaaaaagtaccattccgtttgactcgaatgcttgtgaaagctatggaagttagcggtattgagggtacattccgaacaacttgtgaaaatgtgatgcaagtccttcgcacaaacagagacagcgttatggccatgatggaggcatttgtacatgacccgttaatcaattggcgtctgttcaatttcaatgaggttcctcaagtgtcgaactatggtaatgttcatgctcacacggttgtcagtagtgaagaagcagtggctaaccgagagctcatgcaacctcagcgaggagcacgtgagagggaactgctacaggctgtcaatcaactcggtgatgccaatgaggttttgaatgagcgtgctgtagctgtgatggcacggatgagtgacaaactaacagggcgtgacttctcttctgggtcagctttggctggagcaggtagctctatccaacatggcagtgagcatttggcttcaggagatgcccgggatgcccaacctggtctctcagtgaaggttcaggttcagaagctcatactccaagcgacttcacacgaaaatttgtgccaaaactatgtcgggtggtgtccgttctggtgagctctcttggaaacagtagcagtttataacatgtaaatattgtgaataccgtgtgcatagaagtttcgtggtgacagtttgtatgtgcagctttgtaattagcagaacttcaagatgccttggaccatccttttgtcagtttcttagaccgtgtttagcagttcacccttatggccatccaaaacactgtttttgtactgtagattgtattgtttgtagattgtactgttcgcagggtggatttttgaatatgagtataagaatgtgtaagctgttgaagatagccttaggttttcttccgtgccacttgagggtttgttcgattagctctcaatttatgtggattgagtgagatcggattggtttaaatctcaagcaagttaaattttcttcttaatttttctaatctcatcaaatccatgtgtaacgggaataaccgaacaaggtctgactgaaaatgttaagagggtgtcggatcctctagaccaaagtttagtccag

SEQ ID NO: 62760 - DNA, 8293 bp, Zea Mays
gcgggacccacgtgtcatacaaaggcttctttccctttcttcttcgttcttccgttcaccgttctccgccaccgcggcccaaccgcgccgccgcacagccgcgccgccgccgagccgcgcgttctgcactcttcgcgccatcgctctcctcgcgccgtcgcccggccgcgccgtcgccctcctcggcctgccctgctcgcgtggagcgtccgcgtgagcgagacagggagacggagcaagacggcgtctcggtgggacgagcgcattcggccgatttgagagagcgagctcgtccattcctgcagtgcgcgttcgcatagttaaacccttgacagttcccctgcccccgcctctatccggcgcgccggccttgcagccgccaacatcgccatgaaaccctcgccgcacttcccggagatcggaaagaagcctaaagatttgattgctaaggaccacacatttaacatcgcggcttacatctcgtctggagcggatgttattgctgccgcgctccgtaaacatgttgaggaggaagcccgagatctcagcggtgaagcttttttaaggtttatggatcagctctatgagcagatatctagtttactgcagagcaacgatgttaatgaaaatttactggctctccgtgctatcgatgcattaattgatatgccctttggagaaggcgcttccaaagtttctaagtttgccagcttcttgagaaacgtatttgaagtgaagcgcgaccctgaaatcctagttcccgcaagtgaagtgctgggtcatttagcaaaagcgggaggagcaatgactgcagatgaagtggagcggcagattaaaacggctttggggtggcttactggtgaacgagtggaatatcgccgatttgcagctgtactcattctcaaagagatggcagaaaatgcgtcaacagttttcaatgttcatgttcctgagtttgttgatgctatatgggtagcactgagagaccctaaacaagctgttcgtgaaaaagcagttgaagccttgcgcgcttgtctccatgttattgaaaaacgggagacacgttggcgtgtacaatggtattaccggatgtgtgaagccgcacaagttgggcttggcagaaatgcttctgttcatagtattcatggatcattattggccgttggagaattgctgaggaatacaggggagtttatgatgtctcggtacagagaagtggctgatattgtcctcgattatttaaagcatcgagatcagcttgttcgacgtagtataacatcacttcttcctcgaattgcccacttcctgcgtgacagatttgtgactaattacctgaagatttgtatggatcatatcttgtttgttctacgtacaccagacgagcgcgctagtggttttgttgcccttggagagatggctggggctctgggtgttgaacttgtgccttatttaccagcaattacctcacatttgcaagatgcgattgctcctcgcagaggaaggccatctcttgaggcaatttcttgtgtaggaagctttgcaaaagctatgggtcctgcaatggaacctcatattcgtagcggacttctagatgctatgttttttgctggtctttctgataaacttatagatgcactcgagtctataagcacaagcatcccgtctttactacccacaatacaggagcgtttattggattgtatatctcaagcactaccaaagtcatcaataaggccaggtgcttctgttggtcgagcaagcaggtcaaacaatttgcaacagtttgtggactctaatagtcctgttcttgtgcaacttgcactgtggactctagcaaacttcaactttaagggccatgaacttctggaattcgctagagagagtgtcatactttatttggaagatgaagatagcagtaccagaaaagctgcctctttgtgctgttgcaaattagttgcacactccctttctgcttcttcagcttcacagttcggttcaaataggacaaatcgtattggaggagctaagcgccgccggcttgtagaggagatagtggagaaacttcttatggctgcagttgctgatgctgatgttggtgttagaagttcagtcttcaaggctttgtatcgaaatccagcttttgatgatttcttggcccaagctgacatcttgacttcaatttttgttgccttaaatgatgaggaatatgatgtcagagaattggcaatttctgttgctggtcgattgtctgaaaagaatcctgcatatgtactgcctgcccttcgtcgctatcttatacaattgctcacatatcttgaccagagtatggatagcaagtgtagagaggaaagtgctagattattgggttgtttaattaggagctgcgcgcggctcattcttccttacattgctccagttcacaaggcgctagtgactagattgtgtgaaggaacgggaccaaatgctaataatgctcttgctgcgggagtgcttgccactgttggagaactggccaaagtgggtggctttgctatgaggcaatatcttcctgagctgatgcctgtagttgtggattctcttttagatggaggtgctgttagtaaaagggaagtggcagtgtcaactctgggacagattatccagagcacaggctatgttattgccccctataatgagtacccgccattgcttggcttactcttgaagttgcttaatggtgaattggaatggtcaactagactagaagtgctgaaggttttagggattatgggtgcattggaccctcacgcacacaagcgaaatcagcacaatctacctggtcagcatagagaggtcctacggccaacaatcgagaccgcacaacatattgtttccatggaagagttaccgactgactactggccttctttttcagcatccgaggactactattcaacagttgcaattagctccctcatgcgaattcttcgagatccttctctttcaagttatcaccaaatggtggttggctcccttatctttatttttaagtcaatgggcctcggctgtgttccatacttaccaaaggttcttcctgatttattccgtgctgttcgcatgtgcgaggatggtgctttaaaagagttcataacctggaaacttggaacattgatatctattgtccggcagcacatccgaaaatatttacaagacatactttccctcatctctgagctgtggacttcctcattcagcttggctgcaccaaatcggaccatacagggcccacagggttcaccggttcttcaccttgtcgagcagctatgcttagctttaaatgatgagttcagaatgtatttacttcacattctaccgagttgtatccaagtcttaggtgacgctgaacgttgcaatgattattactatgttcctgacatattacacacacttgaagtttttggcggaaatttggatgagcacatgcacttggttgctccggtgcttgttcgtttatttaaagtggagctggttgatatcaggcggcgtgcaattgttactttgactaatcttatacctaaggttcaggttggtactcatgtttcggctttagtgcatcatctgaagcttgtcttggatggcaacaatgatgatctgcggaaagatgctgcagaagcgctctgctgcctcgcacatgcccttggagaagactttactatcttcataccatcaatacgcaaaattcttgtgaagcaccacttgcggtacagaaaatgggatgagattgaaaatcggctactgaggcgagagctactcatcactgaaaacttgtctgtgcaaaagtacacacaatgtccacctgatgtcattagagacccccttgatgattgtgatggtacaccttctgagatagctgatgatacacagcgacaagcaagaagtcatcaagtcaatgatgtccggttgcggagtgccggtgaggcttctcaaaggagtactagggaagactgggctgaatggatgagacatttcagtattgcgcttctcaaagagtcaccatctccagctttacgcacctgtgcaaggctagctcagcttcagccttctgttggccgcgagttgtttgctgcaggttttgcaagttgctgggcccaaatgagtgaatcctcccaggaacagctagtgagaagtctcaagacagccttctcatctcagacattcctcctgaaattcttgccacgctgctgaacttagcagaatttatggaacatgatgagaagccacttcctattgatacaagactgcttggtgcacttgctgagaagtgtcgagcatttgcaaaggcactccattataaagaaatggaatttgaagctgtgtgcaccaagaagatgggtgcaaatcctgttacagtggttgaatcccttattcatattaacaatcaactacagcagcatgaggcagctattggcatattgacttactcacagcaaaattcggaagttcaattgaaagaatcatggtatgaaaagttgcaccgttgggatgaggctcttaaagcatacaccgtgaaatcatctcaaacatctggtccctttacaaaacttggatgctacattaggtcgaatgaggtgtctagcagctttggctcggtgggaagatttaagtgcattgtgtagagagcaatggacgggtgcagaaccatctgctcgactggaaatggctccaatggctgcaaatgctgcttggcatatgggtgagtgggaccatatggcagactatgtttctcgcctggatgatgcagatgaaaataagctccgtatgttgggtaacgcaacagctagtggtgacggaagcagtaatggtgctttcttccgggcagttcttttagttcgttacaaaaagtatgatgacgctcggatgtatgttgagcgagctcggcggtgtttagctacagaacttgcagcactggtacttgagagttatgagcgagcgtataataacatggtgcgtgttcaacaactttcagaactggaagaggtgattgattactgcactcttcccatggaaagcccgattgctgacggacggagggaacttattcgcaatatgtggaatgaacggattaaaggaacaaaacggaatgtcgaggtgtggcaagccctacttgctgtcagggagttggttcttccccctaacgaagacagagacacctggataaagttcgctgaactttgctggaagaacggtcgtattagtcaggctagatctacgttagtcaaacttttacagtttgatcctgaatcttcccctgaattgacactgtatcatgcacatccacaagtagctctggcttatctaaaataccagtatgcagttggtgatgagcttaaaaggagggatgcattttctaaactgcaagagttgtctgtgcaggttgctaccaccatgggcaatttacctggaacatcagcaaaccatggcaccatgtcaaatgctggagtaccactcattgctcgtgtctacttgacacttggtagctggaagaaggcactatcacctgcattagatgacgattccattcaagaaattttgatttcttaccataatgccacgctaagtgcaaaggactgggggaaggcctggcacatatgggctttgttcaacacagaagtcatgtcacgctatactttccgaggccgaccagatattgctggaaaatatgttgttgcagcagtaactgggtatttttattctattgcttgtgcatctactacgaaaggggtcgatgatagcttgcaggatatccttcgtctgttaactctttggttcaaccatggggatacctcagaagttcaaacagcgttgcagaaaggtttttcccttgtcaagattgagatgtggctggttgtgctgccccagataattgctaggattcattcgaacaatagagtagttagagaactgatacaatctttgctagttcgaattggaaaggggcatccacaggctttgatgtatcctctcttggttgcctgcaaatcaataagtatattgagacaacgtgcagcgcaggaggtcgttgataagatccgccagcacagtggaggtcttgttgaccaggcacaacttgtgtcgaaggaactgatacgggtagcaattttgtggcatgaaatgtggcatgaggcactcgaggaagctagcaggatgtattttggtgagcacaatatcgaaggaatgcttgctgtacttgagccattgcatgcaatgcttgagaggggggatgagacaattaaagaaaatgccttcattcaggcttatgggcatgaattactggaagctcatgaatgctgtttgaaatatcgggctacaggagaggatgctgagctaactaaggcctgggatttgtattaccatgttttcagaagaatcgacaaacagcttccaagtcttacgaccctcgatctgcactctgtttcgcctgagctactcaaatgtcgaaagttggaacttgctgtgccaggaacttatgctgcagattcaccacttgtgacgattgagtattttgttccccaattgatttgttataacgtccaaacaaaggccaagaaagctgacaattcatggaagtgatggcaatgattatgcattcttgcttaaaggccacgaagatttgcggcaagatgaacgagtaatgcagctttttggtttggtgaatactctcctagagaactcaaggaaaacatcagagaaggatttatcaatccaaagatatgctgttatacctttgtcacctaacagtggtttaattggatgggttccaaactgtgacacacttcatgctctgatccgtgaatacagagatgccaggaagattttcttgaatcaggagcacagacttatgttggcttttgcacccgattatgatcacttacccctcattgcaaaggtggaagtgtttcagcatgctttgcaaaatactgagggaaatgaccttgcgaaggttctgtggctgaagagtcgaacttcggaagtatggcttgagcgccgcacaaactacgctagaagcctggctgttatgagcatggttgggtatttgcttggtttaggagatcggcatccaagcaaccttatgttagatcgctatagtggaaaaatattacacatcgacttcggagattgctttgaggcttcaatgaatcgagaaaagttccctgaaaaagtaccattccgtttgactcgaatgcttgtgaaagctatggaagttagcggtattgagggtacattccgaacaacttgtgaaaatgtgatgcaagtccttcgcacaaacagagacagcgttatggccatgatggaggcatttgtacatgacccgttaatcaattggcgtctgttcaatttcaatgaggttcctcaagtgtcgaactatggtaatgttcatgctcacacggttgtcagtagtgaagaagcagtggctaaccgagagctcatgcaacctcagcgaggagcacgtgagagggaactgctacaggctgtcaatcaactcggtgatgccaatgaggttttgaatgagcgtgctgtagctgtgatggcacggatgagtgacaaactaacagggcgtgacttctcttctgggtcagctttggctggagcaggtagctctatccaacatggcagtgagcatttggcttcaggagatgcccgggatgcccaacctggtctctcagtgaaggttcaggttcagaagctcatactccaagcgacttcacacgaaaatttgtgccaaaactatgtcgggtggtgtccgttctggtgagctctcttggaaacagtagcagtttataacatgtaaatattgtgaataccgtgtgcatagaagtttcgtggtgacagtttgtatgtgcagctttgtaattagcagaacttcaagatgccttggaccatccttttgtcagtttcttagaccgtgtttagcagttcacccttatggccatccaaaacactgtttttgtactgtagattgtattgtttgtagattgtactgttcgcagggtggatttttgaatatgagtataagaatgtgtaagctgttgaagatagccttaggttttcttccgtgccacttgagggtttgttcgattagctctcaatttatgtggattgagtgagatcggattggtttaaatctcaagcaagttaaattttcttcttaatttttctaatctcatcaaatccatgtgtaacgggaataaccgaacaaggtctgactgaaaatgttaagagggtgtcggatcctctagaccaaagtttagtccag

SEQ ID NO: 62761 - DNA, 8151 bp, Zea Mays
gcgggacccacgtgtcatacaaaggcttctttccctttcttcttcgttcttccgttcaccgttctccgccaccgcggcccaaccgcgccgccgcacagccgcgccgccgccgagccgcgcgttctgcactcttcgcgccatcgctctcctcgcgccgtcgcccggccgcgccgtcgccctcctcggcctgccctgctcgcgtggagcgtccgcgtgagcgagacagggagacggagcaagacggcgtctcggtgggacgagcgcattcggccgatttgagagagcgagctcgtccattcctgcagtgcgcgttcgcatagttaaacccttgacagttcccctgcccccgcctctatccggcgcgccggccttgcagccgccaacatcgccatgaaaccctcgccgcacttcccggagatcggaaagaagcctaaagatttgattgctaaggaccacacatttaacatcgcggcttacatctcgtctggagcggatgttattgctgccgcgctccgtaaacatgttgaggaggaagcccgagatctcagcggtgaagcttttttaaggtttatggatcagctctatgagcagatatctagtttactgcagagcaacgatgttaatgaaaatttactggctctccgtgctatcgatgcattaattgatatgccctttggagaaggcgcttccaaagtttctaagtttgccagcttcttgagaaacgtatttgaagtgaagcgcgaccctgaaatcctagttcccgcaagtgaagtgctgggtcatttagcaaaagcgggaggagcaatgactgcagatgaagtggagcggcagattaaaacggctttggggtggcttactggtgaacgagtggaatatcgccgatttgcagctgtactcattctcaaagagatggcagaaaatgcgtcaacagttttcaatgttcatgttcctgagtttgttgatgctatatgggtagcactgagagaccctaaacaagctgttcgtgaaaaagcagttgaagccttgcgcgcttgtctccatgttattgaaaaacgggagacacgttggcgtgtacaatggtattaccggatgtgtgaagccgcacaagttgggcttggcagaaatgcttctgttcatagtattcatggatcattattggccgttggagaattgctgaggaatacaggggagtttatgatgtctcggtacagagaagtggctgatattgtcctcgattatttaaagcatcgagatcagcttgttcgacgtagtataacatcacttcttcctcgaattgcccacttcctgcgtgacagatttgtgactaattacctgaagatttgtatggatcatatcttgtttgttctacgtacaccagacgagcgcgctagtggttttgttgcccttggagagatggctggggctctgggtgttgaacttgtgccttatttaccagcaattacctcacatttgcaagatgcgattgctcctcgcagaggaaggccatctcttgaggcaatttcttgtgtaggaagctttgcaaaagctatgggtcctgcaatggaacctcatattcgtagcggacttctagatgctatgttttttgctggtctttctgataaacttatagatgcactcgagtctataagcacaagcatcccgtctttactacccacaatacaggagcgtttattggattgtatatctcaagcactaccaaagtcatcaataaggccaggtgcttctgttggtcgagcaagcaggtcaaacaatttgcaacagtttgtggactctaatagtcctgttcttgtgcaacttgcactgtggactctagcaaacttcaactttaagggccatgaacttctggaattcgctagagagagtgtcatactttatttggaagatgaagatagcagtaccagaaaagctgcctctttgtgctgttgcaaattagttgcacactccctttctgcttcttcagcttcacagttcggttcaaataggacaaatcgtattggaggagctaagcgccgccggcttgtagaggagatagtggagaaacttcttatggctgcagttgctgatgctgatgttggtgttagaagttcagtcttcaaggctttgtatcgaaatccagcttttgatgatttcttggcccaagctgacatcttgacttcaatttttgttgccttaaatgatgaggaatatgatgtcagagaattggcaatttctgttgctggtcgattgtctgaaaagaatcctgcatatgtactgcctgcccttcgtcgctatcttatacaattgctcacatatcttgaccagagtatggatagcaagtgtagagaggaaagtgctagattattgggttgtttaattaggagctgcgcgcggctcattcttccttacattgctccagttcacaaggcgctagtgactagattgtgtgaaggaacgggaccaaatgctaataatgctcttgctgcgggagtgcttgccactgttggagaactggccaaagtgggtggctttgctatgaggcaatatcttcctgagctgatgcctgtagttgtggattctcttttagatggaggtgctgttagtaaaagggaagtggcagtgtcaactctgggacagattatccagagcacaggctatgttattgccccctataatgagtacccgccattgcttggcttactcttgaagttgcttaatggtgaattggaatggtcaactagactagaagtgctgaaggttttagggattatgggtgcattggaccctcacgcacacaagcgaaatcagcacaatctacctggtcagcatagagaggtcctacggccaacaatcgagaccgcacaacatattgtttccatggaagagttaccgactgactactggccttctttttcagcatccgaggactactattcaacagttgcaattagctccctcatgcgaattcttcgagatccttctctttcaagttatcaccaaatggtggttggctcccttatctttatttttaagtcaatgggcctcggctgtgttccatacttaccaaaggttcttcctgatttattccgtgctgttcgcatgtgcgaggatggtgctttaaaagagttcataacctggaaacttggaacattgatatctattgtccggcagcacatccgaaaatatttacaagacatactttccctcatctctgagctgtggacttcctcattcagcttggctgcaccaaatcggaccatacagggcccacagggttcaccggttcttcaccttgtcgagcagctatgcttagctttaaatgatgagttcagaatgtatttacttcacattctaccgagttgtatccaagtcttaggtgacgctgaacgttgcaatgattattactatgttcctgacatattacacacacttgaagtttttggcggaaatttggatgagcacatgcacttggttgctccggtgcttgttcgtttatttaaagtggagctggttgatatcaggcggcgtgcaattgttactttgactaatcttatacctaaggttcaggttggtactcatgtttcggctttagtgcatcatctgaagcttgtcttggatggcaacaatgatgatctgcggaaagatgctgcagaagcgctctgctgcctcgcacatgcccttggagaagactttactatcttcataccatcaatacgcaaaattcttgtgaagcaccacttgcggtacagaaaatgggatgagattgaaaatcggctactgaggcgagagctactcatcactgaaaacttgtctgtgcaaaagtacacacaatgtccacctgatgtcattagagacccccttgatgattgtgatggtacaccttctgagatagctgatgatacacagcgacaagcaagaagtcatcaagtcaatgatgtccggttgcggagtgccggtgaggcttctcaaaggagtactagggaagactgggctgaatggatgagacatttcagtattgcgcttctcaaagagtcaccatctccagctttacgcacctgtgcaaggctagctcagcttcagccttctgttggccgcgagttgtttgctgcaggttttgcaagttgctgggcccaaatgagtgaatcctcccaggaacagctagtgagaagtctcaagacagccttctcatctcagacattcctcctgaaattcttgccacgctgctgaacttagcagaatttatggaacatgatgagaagccacttcctattgatacaagactgcttggtgcacttgctgagaagtgtcgagcatttgcaaaggcactccattataaagaaatggaatttgaagctgtgtgcaccaagaagatgggtgcaaatcctgttacagtggttgaatcccttattcatattaacaatcaactacagcagcatgaggcagctattggcatattgacttactcacagcaaaattcggaagttcaattgaaagaatcatggtatgaaaagttgcaccgttgggatgaggctcttaaagcatacaccgtgaaatcatctcaaacatctggtccctttacaaaacttggatgctacattaggtcgaatgaggtgtctagcagctttggctcggtgggaagatttaagtgcattgtgtagagagcaatggacgggtgcagaaccatctgctcgactggaaatggctccaatggctgcaaatgctgcttggcatatgggtgagtgggaccatatggcagactatgtttctcgcctggatgatgcagatgaaaataagctccgtatgttgggtaacgcaacagctagtggtgacggaagcagtaatggtgctttcttccgggcagttcttttagttcgttacaaaaagtatgatgacgctcggatgtatgttgagcgagctcggcggtgtttagctacagaacttgcagcactggtacttgagagttatgagcgagcgtataataacatggtgcgtgttcaacaactttcagaactggaagaggtgattgattactgcactcttcccatggaaagcccgattgctgacggacggagggaacttattcgcaatatgtggaatgaacggattaaaggaacaaaacggaatgtcgaggtgtggcaagccctacttgctgtcagggagttggttcttccccctaacgaagacagagacacctggataaagttcgctgaactttgctggaagaacggtcgtattagtcaggctagatctacgttagtcaaacttttacagtttgatcctgaatcttcccctgaattgacactgtatcatgcacatccacaagtagctctggcttatctaaaataccagtatgcagttggtgatgagcttaaaaggagggatgcattttctaaactgcaagagttgtctgtgcaggttgctaccaccatgggcaatttacctggaacatcagcaaaccatggcaccatgtcaaatgctggagtaccactcattgctcgtgtctacttgacacttggtagctggaagaaggcactatcacctgcattagatgacgattccattcaagaaattttgatttcttaccataatgccacgctaagtgcaaaggactgggggaaggcctggcacatatgggctttgttcaacacagaagtcatgtcacgctatactttccgaggccgaccagatattgctggaaaatatgttgttgcagcagtaactgggtatttttattctattgcttgtgcatctactacgaaaggggtcgatgatagcttgcaggatatccttcgtctgttaactctttggttcaaccatggggatacctcagaagttcaaacagcgttgcagaaaggtttttcccttgtcaagattgagatgtggctggttgtgctgccccagataattgctaggattcattcgaacaatagagtagttagagaactgatacaatctttgctagttcgaattggaaaggggcatccacaggctttgatgtatcctctcttggttgcctgcaaatcaataagtatattgagacaacgtgcagcgcaggaggtcgttgataagatccgccagcacagtggaggtcttgttgaccaggcacaacttgtgtcgaaggaactgatacgggtagcaattttgtggcatgaaatgtggcatgaggcactcgaggaagctagcaggatgtattttggtgagcacaatatcgaaggaatgcttgctgtacttgagccattgcatgcaatgcttgagaggggggatgagacaattaaagaaaatgccttcattcaggcttatgggcatgaattactggaagctcatgaatgctgtttgaaatatcgggctacaggagaggatgctgagctaactaaggcctgggatttgtattaccatgttttcagaagaatcgacaaacagcttccaagtcttacgaccctcgatctgcactctgtttcgcctgagctactcaaatgtcgaaagttggaacttgctgtgccaggaacttatgctgcagattcaccacttgtgacgattgagtattttgttccccaattgatttgttataacgtccaaacaaaggccaagaaagctgacaattcatggaagtgatggcaatgattatgcattcttgcttaaaggccacgaagatttgcggcaagatgaacgagtaatgcagctttttggtttggtgaatactctcctagagaactcaaggaaaacatcagagaaggatttatcaatccaaagatatgctgttatacctttgtcacctaacagtggtttaattggatgggttccaaactgtgacacacttcatgctctgatccgtgaatacagagatgccaggaagattttcttgaatcaggagcacagacttatgttggcttttgcacccgattatgatcacttacccctcattgcaaaggtggaagtgtttcagcatgctttgcaaaatactgagggaaatgaccttgcgaaggttctgtggctgaagagtcgaacttcggaagtatggcttgagcgccgcacaaactacgctagaagcctggctgttatgagcatggttgggtatttgcttggtttaggagatcggcatccaagcaaccttatgttagatcgctatagtggaaaaatattacacatcgacttcggagattgctttgaggcttcaatgaatcgagaaaagttccctgaaaaagtaccattccgtttgactcgaatgcttgtgaaagctatggaagttagcggtattgagggtacattccgaacaacttgtgaaaatgtgatgcaagtccttcgcacaaacagagacagcgttatggccatgatggaggcatttgtacatgacccgttaatcaattggcgtctgttcaatttcaatgaggttcctcaagtgtcgaactatggtaatgttcatgctcacacggttgtcagtagtgaagaagcagtggctaaccgagagctcatgcaacctcagcgaggagcacgtgagagggaactgctacaggctgtcaatcaactcggtgatgccaatgaggttttgaatgagcgtgctgtagctgtgatggcacggatgagtgacaaactaacagggcgtgacttctcttctgggtcagctttggctggagcaggtggtgtccgttctggtgagctctcttggaaacagtagcagtttataacatgtaaatattgtgaataccgtgtgcatagaagtttcgtggtgacagtttgtatgtgcagctttgtaattagcagaacttcaagatgccttggaccatccttttgtcagtttcttagaccgtgtttagcagttcacccttatggccatccaaaacactgtttttgtactgtagattgtattgtttgtagattgtactgttcgcagggtggatttttgaatatgagtataagaatgtgtaagctgttgaagatagccttaggttttcttccgtgccacttgagggtttgttcgattagctctcaatttatgtggattgagtgagatcggattggtttaaatctcaagcaagttaaattttcttcttaatttttctaatctcatcaaatccatgtgtaacgggaataaccgaacaaggtctgactgaaaatgttaagagggtgtcggatcctctagaccaaagtttagtccag

SEQ ID NO: 62762 - DNA, 8294 bp, Zea Mays
gcgggacccacgtgtcatacaaaggcttctttccctttcttcttcgttcttccgttcaccgttctccgccaccgcggcccaaccgcgccgccgcacagccgcgccgccgccgagccgcgcgttctgcactcttcgcgccatcgctctcctcgcgccgtcgcccggccgcgccgtcgccctcctcggcctgccctgctcgcgtggagcgtccgcgtgagcgagacagggagacggagcaagacggcgtctcggtgggacgagcgcattcggccgatttgagagagcgagctcgtccattcctgcagtgcgcgttcgcatagttaaacccttgacagttcccctgcccccgcctctatccggcgcgccggccttgcagccgccaacatcgccatgaaaccctcgccgcacttcccggagatcggaaagaagcctaaagatttgattgctaaggaccacacatttaacatcgcggcttacatctcgtctggagcggatgttattgctgccgcgctccgtaaacatgttgaggaggaagcccgagatctcagcggtgaagcttttttaaggtttatggatcagctctatgagcagatatctagtttactgcagagcaacgatgttaatgaaaatttactggctctccgtgctatcgatgcattaattgatatgccctttggagaaggcgcttccaaagtttctaagtttgccagcttcttgagaaacgtatttgaagtgaagcgcgaccctgaaatcctagttcccgcaagtgaagtgctgggtcatttagcaaaagcgggaggagcaatgactgcagatgaagtggagcggcagattaaaacggctttggggtggcttactggtgaacgagtggaatatcgccgatttgcagctgtactcattctcaaagagatggcagaaaatgcgtcaacagttttcaatgttcatgttcctgagtttgttgatgctatatgggtagcactgagagaccctaaacaagctgttcgtgaaaaagcagttgaagccttgcgcgcttgtctccatgttattgaaaaacgggagacacgttggcgtgtacaatggtattaccggatgtgtgaagccgcacaagttgggcttggcagaaatgcttctgttcatagtattcatggatcattattggccgttggagaattgctgaggaatacaggggagtttatgatgtctcggtacagagaagtggctgatattgtcctcgattatttaaagcatcgagatcagcttgttcgacgtagtataacatcacttcttcctcgaattgcccacttcctgcgtgacagatttgtgactaattacctgaagatttgtatggatcatatcttgtttgttctacgtacaccagacgagcgcgctagtggttttgttgcccttggagagatggctggggctctgggtgttgaacttgtgccttatttaccagcaattacctcacatttgcaagatgcgattgctcctcgcagaggaaggccatctcttgaggcaatttcttgtgtaggaagctttgcaaaagctatgggtcctgcaatggaacctcatattcgtagcggacttctagatgctatgttttttgctggtctttctgataaacttatagatgcactcgagtctataagcacaagcatcccgtctttactacccacaatacaggagcgtttattggattgtatatctcaagcactaccaaagtcatcaataaggccaggtgcttctgttggtcgagcaagcaggtcaaacaatttgcaacagtttgtggactctaatagtcctgttcttgtgcaacttgcactgtggactctagcaaacttcaactttaagggccatgaacttctggaattcgctagagagagtgtcatactttatttggaagatgaagatagcagtaccagaaaagctgcctctttgtgctgttgcaaattagttgcacactccctttctgcttcttcagcttcacagttcggttcaaataggacaaatcgtattggaggagctaagcgccgccggcttgtagaggagatagtggagaaacttcttatggctgcagttgctgatgctgatgttggtgttagaagttcagtcttcaaggctttgtatcgaaatccagcttttgatgatttcttggcccaagctgacatcttgacttcaatttttgttgccttaaatgatgaggaatatgatgtcagagaattggcaatttctgttgctggtcgattgtctgaaaagaatcctgcatatgtactgcctgcccttcgtcgctatcttatacaattgctcacatatcttgaccagagtatggatagcaagtgtagagaggaaagtgctagattattgggttgtttaattaggagctgcgcgcggctcattcttccttacattgctccagttcacaaggcgctagtgactagattgtgtgaaggaacgggaccaaatgctaataatgctcttgctgcgggagtgcttgccactgttggagaactggccaaagtggggtggctttgctatgaggcaatatcttcctgagctgatgcctgtagttgtggattctcttttagatggaggtgctgttagtaaaagggaagtggcagtgtcaactctgggacagattatccagagcacaggctatgttattgccccctataatgagtacccgccattgcttggcttactcttgaagttgcttaatggtgaattggaatggtcaactagactagaagtgctgaaggttttagggattatgggtgcattggaccctcacgcacacaagcgaaatcagcacaatctacctggtcagcatagagaggtcctacggccaacaatcgagaccgcacaacatattgtttccatggaagagttaccgactgactactggccttctttttcagcatccgaggactactattcaacagttgcaattagctccctcatgcgaattcttcgagatccttctctttcaagttatcaccaaatggtggttggctcccttatctttatttttaagtcaatgggcctcggctgtgttccatacttaccaaaggttcttcctgatttattccgtgctgttcgcatgtgcgaggatggtgctttaaaagagttcataacctggaaacttggaacattgatatctattgtccggcagcacatccgaaaatatttacaagacatactttccctcatctctgagctgtggacttcctcattcagcttggctgcaccaaatcggaccatacagggcccacagggttcaccggttcttcaccttgtcgagcagctatgcttagctttaaatgatgagttcagaatgtatttacttcacattctaccgagttgtatccaagtcttaggtgacgctgaacgttgcaatgattattactatgttcctgacatattacacacacttgaagtttttggcggaaatttggatgagcacatgcacttggttgctccggtgcttgttcgtttatttaaagtggagctggttgatatcaggcggcgtgcaattgttactttgactaatcttatacctaaggttcaggttggtactcatgtttcggctttagtgcatcatctgaagcttgtcttggatggcaacaatgatgatctgcggaaagatgctgcagaagcgctctgctgcctcgcacatgcccttggagaagactttactatcttcataccatcaatacgcaaaattcttgtgaagcaccacttgcggtacagaaaatgggatgagattgaaaatcggctactgaggcgagagctactcatcactgaaaacttgtctgtgcaaaagtacacacaatgtccacctgatgtcattagagacccccttgatgattgtgatggtacaccttctgagatagctgatgatacacagcgacaagcaagaagtcatcaagtcaatgatgtccggttgcggagtgccggtgaggcttctcaaaggagtactagggaagactgggctgaatggatgagacatttcagtattgcgcttctcaaagagtcaccatctccagctttacgcacctgtgcaaggctagctcagcttcagccttctgttggccgcgagttgtttgctgcaggttttgcaagttgctgggcccaaatgagtgaatcctcccaggaacagctagtgagaagtctcaagacagccttctcatctcagacattcctcctgaaattcttgccacgctgctgaacttagcagaatttatggaacatgatgagaagccacttcctattgatacaagactgcttggtgcacttgctgagaagtgtcgagcatttgcaaaggcactccattataaagaaatggaatttgaagctgtgtgcaccaagaagatgggtgcaaatcctgttacagtggttgaatcccttattcatattaacaatcaactacagcagcatgaggcagctattggcatattgacttactcacagcaaaattcggaagttcaattgaaagaatcatggtatgaaaagttgcaccgttgggatgaggctcttaaagcatacaccgtgaaatcatctcaaacatctggtccctttacaaaacttggatgctacattaggtcgaatgaggtgtctagcagctttggctcggtgggaagatttaagtgcattgtgtagagagcaatggacgggtgcagaaccatctgctcgactggaaatggctccaatggctgcaaatgctgcttggcatatgggtgagtgggaccatatggcagactatgtttctcgcctggatgatgcagatgaaaataagctccgtatgttgggtaacgcaacagctagtggtgacggaagcagtaatggtgctttcttccgggcagttcttttagttcgttacaaaaagtatgatgacgctcggatgtatgttgagcgagctcggcggtgtttagctacagaacttgcagcactggtacttgagagttatgagcgagcgtataataacatggtgcgtgttcaacaactttcagaactggaagaggtgattgattactgcactcttcccatggaaagcccgattgctgacggacggagggaacttattcgcaatatgtggaatgaacggattaaaggaacaaaacggaatgtcgaggtgtggcaagccctacttgctgtcagggagttggttcttccccctaacgaagacagagacacctggataaagttcgctgaactttgctggaagaacggtcgtattagtcaggctagatctacgttagtcaaacttttacagtttgatcctgaatcttcccctgaattgacactgtatcatgcacatccacaagtagctctggcttatctaaaataccagtatgcagttggtgatgagcttaaaaggagggatgcattttctaaactgcaagagttgtctgtgcaggttgctaccaccatgggcaatttacctggaacatcagcaaaccatggcaccatgtcaaatgctggagtaccactcattgctcgtgtctacttgacacttggtagctggaagaaggcactatcacctgcattagatgacgattccattcaagaaattttgatttcttaccataatgccacgctaagtgcaaaggactgggggaaggcctggcacatatgggctttgttcaacacagaagtcatgtcacgctatactttccgaggccgaccagatattgctggaaaatatgttgttgcagcagtaactgggtatttttattctattgcttgtgcatctactacgaaaggggtcgatgatagcttgcaggatatccttcgtctgttaactctttggttcaaccatggggatacctcagaagttcaaacagcgttgcagaaaggtttttcccttgtcaagattgagatgtggctggttgtgctgccccagataattgctaggattcattcgaacaatagagtagttagagaactgatacaatctttgctagttcgaattggaaaggggcatccacaggctttgatgtatcctctcttggttgcctgcaaatcaataagtatattgagacaacgtgcagcgcaggaggtcgttgataagatccgccagcacagtggaggtcttgttgaccaggcacaacttgtgtcgaaggaactgatacgggtagcaattttgtggcatgaaatgtggcatgaggcactcgaggaagctagcaggatgtattttggtgagcacaatatcgaaggaatgcttgctgtacttgagccattgcatgcaatgcttgagaggggggatgagacaattaaagaaaatgccttcattcaggcttatgggcatgaattactggaagctcatgaatgctgtttgaaatatcgggctacaggagaggatgctgagctaactaaggcctgggatttgtattaccatgttttcagaagaatcgacaaacagcttccaagtcttacgaccctcgatctgcactctgtttcgcctgagctactcaaatgtcgaaagttggaacttgctgtgccaggaacttatgctgcagattcaccacttgtgacgattgagtattttgttccccaattgatttgttataacgtccaaacaaaggccaagaaagctgacaattcatggaagtgatggcaatgattatgcattcttgcttaaaggccacgaagatttgcggcaagatgaacgagtaatgcagctttttggtttggtgaatactctcctagagaactcaaggaaaacatcagagaaggatttatcaatccaaagatatgctgttatacctttgtcacctaacagtggtttaattggatgggttccaaactgtgacacacttcatgctctgatccgtgaatacagagatgccaggaagattttcttgaatcaggagcacagacttatgttggcttttgcacccgattatgatcacttacccctcattgcaaaggtggaagtgtttcagcatgctttgcaaaatactgagggaaatgaccttgcgaaggttctgtggctgaagagtcgaacttcggaagtatggcttgagcgccgcacaaactacgctagaagcctggctgttatgagcatggttgggtatttgcttggtttaggagatcggcatccaagcaaccttatgttagatcgctatagtggaaaaatattacacatcgacttcggagattgctttgaggcttcaatgaatcgagaaaagttccctgaaaaagtaccattccgtttgactcgaatgcttgtgaaagctatggaagttagcggtattgagggtacattccgaacaacttgtgaaaatgtgatgcaagtccttcgcacaaacagagacagcgttatggccatgatggaggcatttgtacatgacccgttaatcaattggcgtctgttcaatttcaatgaggttcctcaagtgtcgaactatggtaatgttcatgctcacacggttgtcagtagtgaagaagcagtggctaaccgagagctcatgcaacctcagcgaggagcacgtgagagggaactgctacaggctgtcaatcaactcggtgatgccaatgaggttttgaatgagcgtgctgtagctgtgatggcacggatgagtgacaaactaacagggcgtgacttctcttctgggtcagctttggctggagcaggtagctctatccaacatggcagtgagcatttggcttcaggagatgcccgggatgcccaacctggtctctcagtgaaggttcaggttcagaagctcatactccaagcgacttcacacgaaaatttgtgccaaaactatgtcgggtggtgtccgttctggtgagctctcttggaaacagtagcagtttataacatgtaaatattgtgaataccgtgtgcatagaagtttcgtggtgacagtttgtatgtgcagctttgtaattagcagaacttcaagatgccttggaccatccttttgtcagtttcttagaccgtgtttagcagttcacccttatggccatccaaaacactgtttttgtactgtagattgtattgtttgtagattgtactgttcgcagggtggatttttgaatatgagtataagaatgtgtaagctgttgaagatagccttaggttttcttccgtgccacttgagggtttgttcgattagctctcaatttatgtggattgagtgagatcggattggtttaaatctcaagcaagttaaattttcttcttaatttttctaatctcatcaaatccatgtgtaacgggaataaccgaacaaggtctgactgaaaatgttaagagggtgtcggatcctctagaccaaagtttagtccag

SEQ ID NO: 62763 - DNA, 8214 bp, Zea Mays
gcgggacccacgtgtcatacaaaggcttctttccctttcttcttcgttcttccgttcaccgttctccgccaccgcggcccaaccgcgccgccgcacagccgcgccgccgccgagccgcgcgttctgcactcttcgcgccatcgctctcctcgcgccgtcgcccggccgcgccgtcgccctcctcggcctgccctgctcgcgtggagcgtccgcgtgagcgagacagggagacggagcaagacggcgtctcggtgggacgagcgcattcggccgatttgagagagcgagctcgtccattcctgcagtgcgcgttcgcatagttaaacccttgacagttcccctgcccccgcctctatccggcgcgccggccttgcagccgccaacatcgccatgaaaccctcgccgcacttcccggagatcggaaagaagcctaaagatttgattgctaaggaccacacatttaacatcgcggcttacatctcgtctggagcggatgttattgctgccgcgctccgtaaacatgttgaggaggaagcccgagatctcagcggtgaagcttttttaaggtttatggatcagctctatgagcagatatctagtttactgcagagcaacgatgttaatgaaaatttactggctctccgtgctatcgatgcattaattgatatgccctttggagaaggcgcttccaaagtttctaagtttgccagcttcttgagaaacgtatttgaagtgaagcgcgaccctgaaatcctagttcccgcaagtgaagtgctgggtcatttagcaaaagcgggaggagcaatgactgcagatgaagtggagcggcagattaaaacggctttggggtggcttactggtgaacgagtggaatatcgccgatttgcagctgtactcattctcaaagagatggcagaaaatgcgtcaacagttttcaatgttcatgttcctgagtttgttgatgctatatgggtagcactgagagaccctaaacaagctgttcgtgaaaaagcagttgaagccttgcgcgcttgtctccatgttattgaaaaacgggagacacgttggcgtgtacaatggtattaccggatgtgtgaagccgcacaagttgggcttggcagaaatgcttctgttcatagtattcatggatcattattggccgttggagaattgctgaggaatacaggggagtttatgatgtctcggtacagagaagtggctgatattgtcctcgattatttaaagcatcgagatcagcttgttcgacgtagtataacatcacttcttcctcgaattgcccacttcctgcgtgacagatttgtgactaattacctgaagatttgtatggatcatatcttgtttgttctacgtacaccagacgagcgcgctagtggttttgttgcccttggagagatggctggggctctgggtgttgaacttgtgccttatttaccagcaattacctcacatttgcaagatgcgattgctcctcgcagaggaaggccatctcttgaggcaatttcttgtgtaggaagctttgcaaaagctatgggtcctgcaatggaacctcatattcgtagcggacttctagatgctatgttttttgctggtctttctgataaacttatagatgcactcgagtctataagcacaagcatcccgtctttactacccacaatacaggagcgtttattggattgtatatctcaagcactaccaaagtcatcaataaggccaggtgcttctgttggtcgagcaagcaggtcaaacaatttgcaacagtttgtggactctaatagtcctgttcttgtgcaacttgcactgtggactctagcaaacttcaactttaagggccatgaacttctggaattcgctagagagagtgtcatactttatttggaagatgaagatagcagtaccagaaaagctgcctctttgtgctgttgcaaattagttgcacactccctttctgcttcttcagcttcacagttcggttcaaataggacaaatcgtattggaggagctaagcgccgccggcttgtagaggagatagtggagaaacttcttatggctgcagttgctgatgctgatgttggtgttagaagttcagtcttcaaggctttgtatcgaaatccagcttttgatgatttcttggcccaagctgacatcttgacttcaatttttgttgccttaaatgatgaggaatatgatgtcagagaattggcaatttctgttgctggtcgattgtctgaaaagaatcctgcatatgtactgcctgcccttcgtcgctatcttatacaattgctcacatatcttgaccagagtatggatagcaagtgtagagaggaaagtgctagattattgggttgtttaattaggagctgcgcgcggctcattcttccttacattgctccagttcacaaggcgctagtgactagattgtgtgaaggaacgggaccaaatgctaataatgctcttgctgcgggagtgcttgccactgttggagaactggccaaagtgggtggctttgctatgaggcaatatcttcctgagctgatgcctgtagttgtggattctcttttagatggaggtgctgttagtaaaagggaagtggcagtgtcaactctgggacagattatccagagcacaggctatgttattgccccctataatgagtacccgccattgcttggcttactcttgaagttgcttaatggtgaattggaatggtcaactagactagaagtgctgaaggttttagggattatgggtgcattggaccctcacgcacacaagcgaaatcagcacaatctacctggtcagcatagagaggtcctacggccaacaatcgagaccgcacaacatattgtttccatggaagagttaccgactgactactggccttctttttcagcatccgaggactactattcaacagttgcaattagctccctcatgcgaattcttcgagatccttctctttcaagttatcaccaaatggtggttggctcccttatctttatttttaagtcaatgggcctcggctgtgttccatacttaccaaaggttcttcctgatttattccgtgctgttcgcatgtgcgaggatggtgctttaaaagagttcataacctggaaacttggaacattgatatctattgtccggcagcacatccgaaaatatttacaagacatactttccctcatctctgagctgtggacttcctcattcagcttggctgcaccaaatcggaccatacagggcccacagggttcaccggttcttcaccttgtcgagcagctatgcttagctttaaatgatgagttcagaatgtatttacttcacattctaccgagttgtatccaagtcttaggtgacgctgaacgttgcaatgattattactatgttcctgacatattacacacacttgaagtttttggcggaaatttggatgagcacatgcacttggttgctccggtgcttgttcgtttatttaaagtggagctggttgatatcaggcggcgtgcaattgttactttgactaatcttatacctaaggttcaggttggtactcatgtttcggctttagtgcatcatctgaagcttgtcttggatggcaacaatgatgatctgcggaaagatgctgcagaagcgctctgctgcctcgcacatgcccttggagaagactttactatcttcataccatcaatacgcaaaattcttgtgaagcaccacttgcggtacagaaaatgggatgagattgaaaatcggctactgaggcgagagctactcatcactgaaaacttgtctgtgcaaaagtacacacaatgtccacctgatgtcattagagacccccttgatgattgtgatggtacaccttctgagatagctgatgatacacagcgacaagcaagaagtcatcaagtcaatgatgtccggttgcggagtgccggtgaggcttctcaaaggagtactagggaagactgggctgaatggatgagacatttcagtattgcgcttctcaaagagtcaccatctccagctttacgcacctgtgcaaggctagctcagcttcagccttctgttggccgcgagttgtttgctgcaggttttgcaagttgctgggcccaaatgagtgaatcctcccaggaacagctagtgagaagtctcaagacagccttctcatctcagacattcctcctgaaattcttgccacgctgctgaacttagcagaatttatggaacatgatgagaagccacttcctattgatacaagactgcttggtgcacttgctgagaagtgtcgagcatttgcaaaggcactccattataaagaaatggaatttgaagctgtgtgcaccaagaagatgggtgcaaatcctgttacagtggttgaatcccttattcatattaacaatcaactacagcagcatgaggcagctattggcatattgacttactcacagcaaaattcggaagttcaattgaaagaatcatggtatgaaaagttgcaccgttgggatgaggctcttaaagcatacaccgtgaaatcatctcaaacatctggtccctttacaaaacttggatgctacattaggtcgaatgaggtgtctagcagctttggctcggctgcaaatgctgcttggcatatgggtgagtgggaccatatggcagactatgtttctcgcctggatgatgcagatgaaaataagctccgtatgttgggtaacgcaacagctagtggtgacggaagcagtaatggtgctttcttccgggcagttcttttagttcgttacaaaaagtatgatgacgctcggatgtatgttgagcgagctcggcggtgtttagctacagaacttgcagcactggtacttgagagttatgagcgagcgtataataacatggtgcgtgttcaacaactttcagaactggaagaggtgattgattactgcactcttcccatggaaagcccgattgctgacggacggagggaacttattcgcaatatgtggaatgaacggattaaaggaacaaaacggaatgtcgaggtgtggcaagccctacttgctgtcagggagttggttcttccccctaacgaagacagagacacctggataaagttcgctgaactttgctggaagaacggtcgtattagtcaggctagatctacgttagtcaaacttttacagtttgatcctgaatcttcccctgaattgacactgtatcatgcacatccacaagtagctctggcttatctaaaataccagtatgcagttggtgatgagcttaaaaggagggatgcattttctaaactgcaagagttgtctgtgcaggttgctaccaccatgggcaatttacctggaacatcagcaaaccatggcaccatgtcaaatgctggagtaccactcattgctcgtgtctacttgacacttggtagctggaagaaggcactatcacctgcattagatgacgattccattcaagaaattttgatttcttaccataatgccacgctaagtgcaaaggactgggggaaggcctggcacatatgggctttgttcaacacagaagtcatgtcacgctatactttccgaggccgaccagatattgctggaaaatatgttgttgcagcagtaactgggtatttttattctattgcttgtgcatctactacgaaaggggtcgatgatagcttgcaggatatccttcgtctgttaactctttggttcaaccatggggatacctcagaagttcaaacagcgttgcagaaaggtttttcccttgtcaagattgagatgtggctggttgtgctgccccagataattgctaggattcattcgaacaatagagtagttagagaactgatacaatctttgctagttcgaattggaaaggggcatccacaggctttgatgtatcctctcttggttgcctgcaaatcaataagtatattgagacaacgtgcagcgcaggaggtcgttgataagatccgccagcacagtggaggtcttgttgaccaggcacaacttgtgtcgaaggaactgatacgggtagcaattttgtggcatgaaatgtggcatgaggcactcgaggaagctagcaggatgtattttggtgagcacaatatcgaaggaatgcttgctgtacttgagccattgcatgcaatgcttgagaggggggatgagacaattaaagaaaatgccttcattcaggcttatgggcatgaattactggaagctcatgaatgctgtttgaaatatcgggctacaggagaggatgctgagctaactaaggcctgggatttgtattaccatgttttcagaagaatcgacaaacagcttccaagtcttacgaccctcgatctgcactctgtttcgcctgagctactcaaatgtcgaaagttggaacttgctgtgccaggaacttatgctgcagattcaccacttgtgacgattgagtattttgttccccaattgatttgttataacgtccaaacaaaggccaagaaagctgacaattcatggaagtgatggcaatgattatgcattcttgcttaaaggccacgaagatttgcggcaagatgaacgagtaatgcagctttttggtttggtgaatactctcctagagaactcaaggaaaacatcagagaaggatttatcaatccaaagatatgctgttatacctttgtcacctaacagtggtttaattggatgggttccaaactgtgacacacttcatgctctgatccgtgaatacagagatgccaggaagattttcttgaatcaggagcacagacttatgttggcttttgcacccgattatgatcacttacccctcattgcaaaggtggaagtgtttcagcatgctttgcaaaatactgagggaaatgaccttgcgaaggttctgtggctgaagagtcgaacttcggaagtatggcttgagcgccgcacaaactacgctagaagcctggctgttatgagcatggttgggtatttgcttggtttaggagatcggcatccaagcaaccttatgttagatcgctatagtggaaaaatattacacatcgacttcggagattgctttgaggcttcaatgaatcgagaaaagttccctgaaaaagtaccattccgtttgactcgaatgcttgtgaaagctatggaagttagcggtattgagggtacattccgaacaacttgtgaaaatgtgatgcaagtccttcgcacaaacagagacagcgttatggccatgatggaggcatttgtacatgacccgttaatcaattggcgtctgttcaatttcaatgaggttcctcaagtgtcgaactatggtaatgttcatgctcacacggttgtcagtagtgaagaagcagtggctaaccgagagctcatgcaacctcagcgaggagcacgtgagagggaactgctacaggctgtcaatcaactcggtgatgccaatgaggttttgaatgagcgtgctgtagctgtgatggcacggatgagtgacaaactaacagggcgtgacttctcttctgggtcagctttggctggagcaggtagctctatccaacatggcagtgagcatttggcttcaggagatgcccgggatgcccaacctggtctctcagtgaaggttcaggttcagaagctcatactccaagcgacttcacacgaaaatttgtgccaaaactatgtcgggtggtgtccgttctggtgagctctcttggaaacagtagcagtttataacatgtaaatattgtgaataccgtgtgcatagaagtttcgtggtgacagtttgtatgtgcagctttgtaattagcagaacttcaagatgccttggaccatccttttgtcagtttcttagaccgtgtttagcagttcacccttatggccatccaaaacactgtttttgtactgtagattgtattgtttgtagattgtactgttcgcagggtggatttttgaatatgagtataagaatgtgtaagctgttgaagatagccttaggttttcttccgtgccacttgagggtttgttcgattagctctcaatttatgtggattgagtgagatcggattggtttaaatctcaagcaagttaaattttcttcttaatttttctaatctcatcaaatccatgtgtaacgggaataaccgaacaaggtctgactgaaaatgttaagagggtgtcggatcctctagaccaaagtttagtccag

SEQ ID NO: 62764 - DNA, 8169 bp, Zea Mays
gcgggacccacgtgtcatacaaaggcttctttccctttcttcttcgttcttccgttcaccgttctccgccaccgcggcccaaccgcgccgccgcacagccgcgccgccgccgagccgcgcgttctgcactcttcgcgccatcgctctcctcgcgccgtcgcccggccgcgccgtcgccctcctcggcctgccctgctcgcgtggagcgtccgcgtgagcgagacagggagacggagcaagacggcgtctcggtgggacgagcgcattcggccgatttgagagagcgagctcgtccattcctgcagtgcgcgttcgcatagttaaacccttgacagttcccctgcccccgcctctatccggcgcgccggccttgcagccgccaacatcgccatgaaaccctcgccgcacttcccggagatcggaaagaagcctaaagatttgattgctaaggaccacacatttaacatcgcggcttacatctcgtctggagcggatgttattgctgccgcgctccgtaaacatgttgaggaggaagcccgagatctcagcggtgaagcttttttaaggtttatggatcagctctatgagcagatatctagtttactgcagagcaacgatgttaatgaaaatttactggctctccgtgctatcgatgcattaattgatatgccctttggagaaggcgcttccaaagtttctaagtttgccagcttcttgagaaacgtatttgaagtgaagcgcgaccctgaaatcctagttcccgcaagtgaagtgctgggtcatttagcaaaagcgggaggagcaatgactgcagatgaagtggagcggcagattaaaacggctttggggtggcttactggtgaacgagtggaatatcgccgatttgcagctgtactcattctcaaagagatggcagaaaatgcgtcaacagttttcaatgttcatgttcctgagtttgttgatgctatatgggtagcactgagagaccctaaacaagctgttcgtgaaaaagcagttgaagccttgcgcgcttgtctccatgttattgaaaaacgggagacacgttggcgtgtacaatggtattaccggatgtgtgaagccgcacaagttgggcttggcagaaatgcttctgttcatagtattcatggatcattattggccgttggagaattgctgaggaatacaggggagtttatgatgtctcggtacagagaagtggctgatattgtcctcgattatttaaagcatcgagatcagcttgttcgacgtagtataacatcacttcttcctcgaattgcccacttcctgcgtgacagatttgtgactaattacctgaagatttgtatggatcatatcttgtttgttctacgtacaccagacgagcgcgctagtggttttgttgcccttggagagatggctggggctctgggtgttgaacttgtgccttatttaccagcaattacctcacatttgcaagatgcgattgctcctcgcagaggaaggccatctcttgaggcaatttcttgtgtaggaagctttgcaaaagctatgggtcctgcaatggaacctcatattcgtagcggacttctagatgctatgttttttgctggtctttctgataaacttatagatgcactcgagtctataagcacaagcatcccgtctttactacccacaatacaggagcgtttattggattgtatatctcaagcactaccaaagtcatcaataaggccaggtgcttctgttggtcgagcaagcaggtcaaacaatttgcaacagtttgtggactctaatagtcctgttcttgtgcaacttgcactgtggactctagcaaacttcaactttaagggccatgaacttctggaattcgctagagagagtgtcatactttatttggaagatgaagatagcagtaccagaaaagctgcctctttgtgctgttgcaaattagttgcacactccctttctgcttcttcagcttcacagttcggttcaaataggacaaatcgtattggaggagctaagcgccgccggcttgtagaggagatagtggagaaacttcttatggctgcagttgctgatgctgatgttggtgttagaagttcagtcttcaaggctttgtatcgaaatccagcttttgatgatttcttggcccaagctgacatcttgacttcaatttttgttgccttaaatgatgaggaatatgatgtcagagaattggcaatttctgttgctggtcgattgtctgaaaagaatcctgcatatgtactgcctgcccttcgtcgctatcttatacaattgctcacatatcttgaccagagtatggatagcaagtgtagagaggaaagtgctagattattgggttgtttaattaggagctgcgcgcggctcattcttccttacattgctccagttcacaaggcgctagtgactagattgtgtgaaggaacgggaccaaatgctaataatgctcttgctgcgggagtgcttgccactgttggagaactggccaaagtgggtggctttgctatgaggcaatatcttcctgagctgatgcctgtagttgtggattctcttttagatggaggtgctgttagtaaaagggaagtggcagtgtcaactctgggacagattatccagagcacaggctatgttattgccccctataatgagtacccgccattgcttggcttactcttgaagttgcttaatggtgaattggaatggtcaactagactagaagtgctgaaggttttagggattatgggtgcattggaccctcacgcacacaagcgaaatcagcacaatctacctggtcagcatagagaggtcctacggccaacaatcgagaccgcacaacatattgtttccatggaagagttaccgactgactactggccttctttttcagcatccgaggactactattcaacagttgcaattagctccctcatgcgaattcttcgagatccttctctttcaagttatcaccaaatggtggttggctcccttatctttatttttaagtcaatgggcctcggctgtgttccatacttaccaaaggttcttcctgatttattccgtgctgttcgcatgtgcgaggatggtgctttaaaagagttcataacctggaaacttggaacattgatatctattgtccggcagcacatccgaaaatatttacaagacatactttccctcatctctgagctgtggacttcctcattcagcttggctgcaccaaatcggaccatacagggcccacagggttcaccggttcttcaccttgtcgagcagctatgcttagctttaaatgatgagttcagaatgtatttacttcacattctaccgagttgtatccaagtcttaggtgacgctgaacgttgcaatgattattactatgttcctgacatattacacacacttgaagtttttggcggaaatttggatgagcacatgcacttggttgctccggtgcttgttcgtttatttaaagtggagctggttgatatcaggcggcgtgcaattgttactttgactaatcttatacctaaggttcaggttggtactcatgtttcggctttagtgcatcatctgaagcttgtcttggatggcaacaatgatgatctgcggaaagatgctgcagaagcgctctgctgcctcgcacatgcccttggagaagactttactatcttcataccatcaatacgcaaaattcttgtgaagcaccacttgcggtacagaaaatgggatgagattgaaaatcggctactgaggcgagagctactcatcactgaaaacttgtctgtgcaaaagtacacacaatgtccacctgatgtcattagagacccccttgatgattgtgatggtacaccttctgagatagctgatgatacacagcgacaagcaagaagtcatcaagtcaatgatgtccggttgcggagtgccggtgaggcttctcaaaggagtactagggaagactgggctgaatggatgagacatttcagtattgcgcttctcaaagagtcaccatctccagctttacgcacctgtgcaaggctagctcagcttcagccttctgttggccgcgagttgtttgctgcaggttttgcaagttgctgggcccaaatgagtgaatcctcccaggaacagctagtgagaagtctcaagacagccttctcatctcagacattcctcctgaaattcttgccacgctgctgaacttagcagaatttatggaacatgatgagaagccacttcctattgatacaagactgcttggtgcacttgctgagaagtgtcgagcatttgcaaaggcactccattataaagaaatggaatttgaagctgtgtgcaccaagaagatgggtgcaaatcctgttacagtggttgaatcccttattcatattaacaatcaactacagcagcatgaggcagctattggcatattgacttactcacagcaaaattcggaagttcaattgaaagaatcatggtatgaaaagttgcaccgttgggatgaggctcttaaagcatacaccgtgaaatcatctcaaacatctggtccctttacaaaacttggatgctacattaggtcgaatgaggtgtctagcagctttggctcggtgggaagatttaagtgcattgtgtagagagcaatggacgggtgcagaaccatctgctcgactggaaatggctccaatggctgcaaatgctgcttggcatatgggtgagtgggaccatatggcagactatgtttctcgcctggatgatgcagatgaaaataagctccgtatgttgggtaacgcaacagctagtggtgacggaagcagtaatggtgctttcttccgggcagttcttttagttcgttacaaaaagtatgatgacgctcggatgtatgttgagcgagctcggcggtgtttagctacagaacttgcagcactggtacttgagagttatgagcgagcgtataataacatggtgcgtgttcaacaactttcagaactggaagaggtgattgattactgcactcttcccatggaaagcccgattgctgacggacggagggaacttattcgcaatatgtggaatgaacggattaaaggaacaaaacggaatgtcgaggtgtggcaagccctacttgctgtcagggagttggttcttccccctaacgaagacagagacacctggataaagttcgctgaactttgctggaagaacggtcgtattagtcaggctagatctacgttagtcaaacttttacagtttgatcctgaatcttcccctgaattgacactgtatcatgcacatccacaagtagctctggcttatctaaaataccagtatgcagttggtgatgagcttaaaaggagggatgcattttctaaactgcaagagttgtctgtgcaggttgctaccaccatgggcaatttacctggaacatcagcaaaccatggcaccatgtcaaatgctggagtaccactcattgctcgtgtctacttgacacttggtagctggaagaaggcactatcacctgcattagatgacgattccattcaagaaattttgatttcttaccataatgccacgctaagtgcaaaggactgggggaaggcctggcacatatgggctttgttcaacacagaagtcatgtcacgctatactttccgaggccgaccagatattgctggaaaatatgttgttgcagcagtaactgggtatttttattctattgcttgtgcatctactacgaaaggggtcgatgatagcttgcaggatatccttcgtctgttaactctttggttcaaccatggggatacctcagaagttcaaacagcgttgcagaaaggtttttcccttgtcaagattgagatgtggctggttgtgctgccccagataattgctaggattcattcgaacaatagagtagttagagaactgatacaatctttgctagttcgaattggaaaggggcatccacaggctttgatgtatcctctcttggttgcctgcaaatcaataagtatattgagacaacgtgcagcgcaggaggtcgttgataagatccgccagcacagtggaggtcttgttgaccaggcacaacttgtgtcgaaggaactgatacgggtagcaattttgtggcatgaaatgtggcatgaggcactcgaggaagctagcaggatgtattttggtgagcacaatatcgaaggaatgcttgctgtacttgagccattgcatgcaatgcttgagaggggggatgagacaattaaagaaaatgccttcattcaggcttatgggcatgaattactggaagctcatgaatgctgtttgaaatatcgggctacaggagaggatgctgagctaactaaggcctgggatttgtattaccatgttttcagaagaatcgacaaacagcttccaagtcttacgaccctcgatctgcactctgtttcgcctgagctactcaaatgtcgaaagttggaacttgctgtgccaggaacttatgctgcaggccacgaagatttgcggcaagatgaacgagtaatgcagctttttggtttggtgaatactctcctagagaactcaaggaaaacatcagagaaggatttatcaatccaaagatatgctgttatacctttgtcacctaacagtggtttaattggatgggttccaaactgtgacacacttcatgctctgatccgtgaatacagagatgccaggaagattttcttgaatcaggagcacagacttatgttggcttttgcacccgattatgatcacttacccctcattgcaaaggtggaagtgtttcagcatgctttgcaaaatactgagggaaatgaccttgcgaaggttctgtggctgaagagtcgaacttcggaagtatggcttgagcgccgcacaaactacgctagaagcctggctgttatgagcatggttgggtatttgcttggtttaggagatcggcatccaagcaaccttatgttagatcgctatagtggaaaaatattacacatcgacttcggagattgctttgaggcttcaatgaatcgagaaaagttccctgaaaaagtaccattccgtttgactcgaatgcttgtgaaagctatggaagttagcggtattgagggtacattccgaacaacttgtgaaaatgtgatgcaagtccttcgcacaaacagagacagcgttatggccatgatggaggcatttgtacatgacccgttaatcaattggcgtctgttcaatttcaatgaggttcctcaagtgtcgaactatggtaatgttcatgctcacacggttgtcagtagtgaagaagcagtggctaaccgagagctcatgcaacctcagcgaggagcacgtgagagggaactgctacaggctgtcaatcaactcggtgatgccaatgaggttttgaatgagcgtgctgtagctgtgatggcacggatgagtgacaaactaacagggcgtgacttctcttctgggtcagctttggctggagcaggtagctctatccaacatggcagtgagcatttggcttcaggagatgcccgggatgcccaacctggtctctcagtgaaggttcaggttcagaagctcatactccaagcgacttcacacgaaaatttgtgccaaaactatgtcgggtggtgtccgttctggtgagctctcttggaaacagtagcagtttataacatgtaaatattgtgaataccgtgtgcatagaagtttcgtggtgacagtttgtatgtgcagctttgtaattagcagaacttcaagatgccttggaccatccttttgtcagtttcttagaccgtgtttagcagttcacccttatggccatccaaaacactgtttttgtactgtagattgtattgtttgtagattgtactgttcgcagggtggatttttgaatatgagtataagaatgtgtaagctgttgaagatagccttaggttttcttccgtgccacttgagggtttgttcgattagctctcaatttatgtggattgagtgagatcggattggtttaaatctcaagcaagttaaattttcttcttaatttttctaatctcatcaaatccatgtgtaacgggaataaccgaacaaggtctgactgaaaatgttaagagggtgtcggatcctctagaccaaagtttagtccag

SEQ ID NO: 62765 - DNA, 1705 bp, Zea Mays
ctggaagctttgggcttaccacccacctcatctttcctcgtcgacgcacgggataagatgccatagcggttgcctgagatctgctccacgcgcatagtggttcgcctggccacgctactccgcctagaagcgcccatgtccgatcgtcgccctcgccccattcgccgatgccgagctccaccccgcccctgttccgcccaggccgagctccgccccagcgtctggccccaagtggtctttgccacgttcttgagctcccccaacaacacgatggggcaggtctttctctttaatccaaaatgcttttttagccggtcctcaaagctcttgttttttaatggcgaaagaatattgttgttctttagagaatctgtgtggcactattctcagagttggccgttttgaatagaggttggtctttgtcatcagcaacaaggattgctgctcactccttcctatgcatttcccgatcggttgtttgggctctgaaggacccagtaaccaaatgtgtaactgaatgaaggtgtcttttttatgaatgcgtcagttcaccttctgcaactcagtattagataaataatctgtccatccaaatttttgtactgaagaggttgtgcctgtgcggttaggcacacgcacaccatctaactgataatatgcacctgagctgtgttcttgctgtgcataatatccataaactgcaagtaattctttactaacctgcttttgtatgtggtttcttgtatttggggtgttattcaggtgttcactattaggtaaacttttgtacaattaggtctttgtcacttcatatttttacttaccgcaagtgtgtgtatggtagtttggtgtcagtatttgttttcataaaaaaaatcttgatgtcgctcatcgacgacgagaagaagccttatgactgctagtttgacctctagaagctgtcctacgtggccgcatgcgccgctgtgtacgacaagctccggcgcagctgccgtttggacgcggtgcagagcggctgcaccacgctatccatcatcaagcagggggaccacatggtcgtcgccaacgtcagcgactctaaggttgttctgggcaccgcatccgacgacgacgccatcacgccgtccaattcatcgtccacctgaagcccaacctgccataggagtagcgcatctggtggtgcaacgaccaggggtactacctcgctgatgagcccggggtgcacttcgtttggcagcccagccaagaatcatcggtactcgccatgtcgcgcgcgttcgacgactattatatcgatgactgtggcgtcatcttagcgccggaggtgacgcagaggaggaccgacaacaatgaccagttcgtcatcctcgtcaccgtcaaggtagcttttgtgtcggtctgcctttaattctcttcacaaacacacacttgtatttttgtttaagcaagagcatatggtggtacgtgtctgatgactaacgatgtacgagggaatttcttccggtgtgtgtggaacatgctcttcaatgatgagtgaaagggaaattgggttaaccatttcctataattaattttagtggttgacgaccaacacaaacatatggactaacaagtttgtctagaattcatgtattacaggtgcataaggttcaacacaaaacaataaataaatcaagatagggactcgataaaaaaccggagcaag

SEQ ID NO: 62766 - DNA, 1167 bp, Zea Mays
cagccagcgtatgcatccacggctcctggaagctttgggcttaccacccacctcatctttcctcgtcgacgcacgggataagatgccatagcggttgcctgagatctgctccacgcgcatagtggttcgcctggccacgctactccgcctagaagcgcccatgtccgatcgtcgccctcgccccattcgccgatgccgagctccaccccgcccctgttccgcccaggccgagctccgccccagcgtctggccccaagtggtctttgccacgttcttgagctcccccaacaacacgatggggcagaagctgtcctacgtggccgcatgcgccgctgtgtacgacaagctccggcgcagctgccgtttggacgcggtgcagagcggctgcaccacgctatccatcatcaagcagggggaccacatggtcgtcgccaacgtcagcgactctaaggttgttctgggcaccgcatccgacgacgacgccatcacgccgtccaattcatcgtccacctgaagcccaacctgccatgtaagtcacaactgaccagccatgaatacttgtgtgctgggacgatggtcgttgctgacgatgtgtgagtgtcttcgaacatgatgtatgtagaggagtagcgcatctggtggtgcaacgaccaggggtactacctcgctgatgagcccggggtgcacttcgtttggcagcccagccaagaatcatcggtactcgccatgtcgcgcgcgttcgacgactattatatcgatgactgtggcgtcatcttagcgccggaggtgacgcagaggaggaccgacaacaatgaccagttcgtcatcctcgtcaccgtcaaggtagcttttgtgtcggtctgcctttaattctcttcacaaacacacacttgtatttttgtttaagcaagagcatatggtggtacgtgtctgatgactaacgatgtacgagggaatttcttccggtgtgtgtggaacatgctcttcaatgatgagtgaaagggaaattgggttaaccatttcctataattaattttagtggttgacgaccaacacaaacatatggactaacaagtttgtctagaattcatgtattacaggtgcataaggttcaacacaaaacaataaataaatcaagatagggactcgataaaaaaccggagcaag

SEQ ID NO: 62767 - DNA, 926 bp, Zea Mays
gcaagatgtactctccaagaatatcgacatcgtcatgtccattcacatccatcctcatggatctgaagcatatgatccagtccttgattatggtggcagctggcacaaatcgtaaagattttggagtcgcttgacagcgaaggtcaccagcctccaagtgtcacactatgagagcgccaaacagcgcacttgaaccattttttcgaactacaccagcagggatgtaactttatgagagcgctattgattgtaggtgtccagttaggctacactgtcatttttgggtggtatgcaacattcttgttaatccgaacagggaatctgttatgtccaattattgctcacgtcttctgtaatatgatgggtttacctgttttctcgtcaccacgaacaaaaggagcggcattggtagcgtttctggctggttcaatagccttcttttggctgcttttccctgcaacaagtcctgaactgtacaacagcagttttgatcgctgcagttgctggcatggcttttgcaattggaaataacatagaactagattggaaagcaatgggtcctaacttgaagctactaacaattgaaacctccaggccctagctgacacttctgacggattttctatttgcagaaactccatatgaatgtcttaaaacgttttgtagaaatgtgtcccttgttttagcttaagactcaagagcttaaactagcaaaagattgtattttgccacttgttaaatacgtgctgatcatgaaatcgctgtcaatcccttctcaaagtggaatttgactttgttgagctgcttttatttatattgtgcttgctactgcagcgcctagagtttgtagattacacatcatggacccgtctgatattgtaaacgagagacatgtttctaagttaatatgctccctccatttattt

SEQ ID NO: 62768 - DNA, 1116 bp, Zea Mays
gcaagatgtactctccaagaatatcgacatcgtcatgtccattcacatccatcctcatggatctgaagcatatgatccagtccttgattatggtggcagctggcacaaatcgtaaagattttggagtcgcttgacagcgaaggtcaccagcctccaagtgtcacactatgagagcgccaaacaggtttgtgcgctgaacctcgcaaaattgtgtctggaactctggatcgcacactgcatggcgacaaggaccctgctcaggatgataggtcgatccgatacgaaggcctcaagttttctgatctttcttgctctaatttgggattagtttattaatcaaattgctgcataccacatttacattgtattgcctatacattctctgttgttgatattcatgtactcttctaattagaactgaacctttctgttaacagcgcacttgaaccattttttcgaactacaccagcagggatgtaactttatgagagcgctattgattgtagggaatctgttatgtccaattattgctcacgtcttctgtaatatgatgggtttacctgttttctcgtcaccacgaacaaaaggagcggcattggtagcgtttctggctggttcaatagccttcttttggctgcttttccctgcaacaagtcctgaactgtacaacagcagttttgatcgctgcagttgctggcatggcttttgcaattggaaataacatagaactagattggaaagcaatgggtcctaacttgaagctactaacaattgaaacctccaggccctagctgacacttctgacggattttctatttgcagaaactccatatgaatgtcttaaaacgttttgtagaaatgtgtcccttgttttagcttaagactcaagagcttaaactagcaaaagattgtattttgccacttgttaaatacgtgctgatcatgaaatcgctgtcaatcccttctcaaagtggaatttgactttgttgagctgcttttatttatattgtgcttgctactgcagcgcctagagtttgtagattacacatcatggacccgtctgatattgtaaacgagagacatgtttctaagttaatatgctccctccatttattt

SEQ ID NO: 62769 - DNA, 1007 bp, Zea Mays
cttgtatgtgccattgttggttcctaagccatggccttggccatgcctgagcacgtcacacgattaaagcctatgcaatattgtctccaatcatccacggccatcacttctggtatttgctttgtctggttccaatcccattttgcaagatgtactctccaagaatatcgacatcgtcatgtccattcacatccatcctcatggatctgaagcatatgatccagtccttgattatggtggcagctggcacaaatcgtaaagattttggagtcgcttgacagcgaaggtcaccagcctccaagtgtcacactatgagagcgccaaacagcgcacttgaaccattttttcgaactacaccagcagggatgtaactttatgagagcgctattgattgtagggaatctgttatgtccaattattgctcacgtcttctgtaatatgatgggtttacctgttttctcgtcaccacgaacaaaaggagcggcattggtagcgtttctggctggttcaatagccttcttttggctgcttttccctgcaacaagtcctgaactgtacaacagcagttttgatcgctgcagttgctggcatggcttttgcaattggaaataacatagaactagattggaaagcaatgggtcctaacttgaagctactaacaattgaaacctccaggccctagctgacacttctgacggattttctatttgcagaaactccatatgaatgtcttaaaacgttttgtagaaatgtgtcccttgttttagcttaagactcaagagcttaaactagcaaaagattgtattttgccacttgttaaatacgtgctgatcatgaaatcgctgtcaatcccttctcaaagtggaatttgactttgttgagctgcttttatttatattgtgcttgctactgcagcgcctagagtttgtagattacacatcatggacccgtctgatattgtaaacgagagacatgtttctaagttaatatgctccctccatttattt

SEQ ID NO: 62770 - DNA, 896 bp, Zea Mays
aaactagcaataaatgaagaattgttgactgaacatctgaatgcaccatttactgaggagctggttttcagggcatgcatgatacctcttctgctctgtgggggattcaaaatgtctacaattatatttctgagtccaatcttcttcagtctagcgcacttgaaccattttttcgaactacaccagcagggatgtaactttatgagagcgctattgattgtaggtgtccagttaggctacactgtcatttttgggtggtatgcaacattcttgttaatccgaacagggaatctgttatgtccaattattgctcacgtcttctgtaatatgatgggtttacctgttttctcgtcaccacgaacaaaaggagcggcattggtagcgtttctggctggttcaatagccttcttttggctgcttttccctgcaacaagtcctgaactgtacaacagcagttttgatcgctgcagttgctggcatggcttttgcaattggaaataacatagaactagattggaaagcaatgggtcctaacttgaagctactaacaattgaaacctccaggccctagctgacacttctgacggattttctatttgcagaaactccatatgaatgtcttaaaacgttttgtagaaatgtgtcccttgttttagcttaagactcaagagcttaaactagcaaaagattgtattttgccacttgttaaatacgtgctgatcatgaaatcgctgtcaatcccttctcaaagtggaatttgactttgttgagctgcttttatttatattgtgcttgctactgcagcgcctagagtttgtagattacacatcatggacccgtctgatattgtaaacgagagacatgtttctaagttaatatgctccctccatttattt

SEQ ID NO: 62771 - DNA, 1127 bp, Zea Mays
aagcgcccctgctctcctccggtctggagcctcagcgacttcgctgatatgtttgctgtgttcggcattaggaaggatcacttgattcaggccgtggctattccacttctcctgacatccctagtgtatgctgggtcattcgtcgctagagtgtggctcctagtgagctcgtggggcggtggcgatgaggtggagataggctgcgcacagaggcttgcacaatggatccaagctgctgttgcggatgttatggtttggcggaactatgtagtggcaccatttactgaggagctggttttcagggcatgcatgatacctcttctgctctgtgggggattcaaaatgtctacaattatatttctgagtccaatcttcttcagtctagcgcacttgaaccattttttcgaactacaccagcagggatgtaactttatgagagcgctattgattgtaggtgtccagttaggctacactgtcatttttgggtggtatgcaacattcttgttaatccgaacagggaatctgttatgtccaattattgctcacgtcttctgtaatatgatgggtttacctgttttctcgtcaccacgaacaaaaggagcggcattggtagcgtttctggctggttcaatagccttcttttggctgcttttccctgcaacaagtcctgaactgtacaacagcagttttgatcgctgcagttgctggcatggcttttgcaattggaaataacatagaactagattggaaagcaatgggtcctaacttgaagctactaacaattgaaacctccaggccctagctgacacttctgacggattttctatttgcagaaactccatatgaatgtcttaaaacgttttgtagaaatgtgtcccttgttttagcttaagactcaagagcttaaactagcaaaagattgtattttgccacttgttaaatacgtgctgatcatgaaatcgctgtcaatcccttctcaaagtggaatttgactttgttgagctgcttttatttatattgtgcttgctactgcagcgcctagagtttgtagattacacatcatggacccgtctgatattgtaaacgagagacatgtttctaagttaatatgctccctccatttattt

SEQ ID NO: 62772 - DNA, 1410 bp, Zea Mays
caaacacccatagtccgaaaacagcgtgttcttcgtgccaagcgaagccacgcgaccgactgtgttacgatcccaaatcttcactcccgacgaaatctagaatccaatgagcaatctcgactgacgcctgcttcaccagattatggcgacgccggcgggcctccttctcgcctcgccgccggtgatatcaggtgtcgcggcgatggcggcgtgcgccgcaatggcagtattctacgtcgctgtcctctatgccccgacggtcatcctccggttcccacccccaacctcactccgcaccttcctccaccgtcgcttcgcctgtgccgccgtcgcatccgccgcctccgtccttgccactgcgtccctcctccgagtctggagcctcagcgacttcgctgatatgtttgctgtgttcggcattaggaaggatcacttgattcaggccgtggctattccacttctcctgacatccctagtgtatgctgggtcattcgtcgctagagtgtggctcctagtgagctcgtggggcggtggcgatgaggtggagataggctgcgcacagaggcttgcacaatggatccaagctgctgttgcggatgttatggtttggcggaactatgtagtggcaccatttactgaggagctggttttcagggcatgcatgatacctcttctgctctgtgggggattcaaaatgtctacaattatatttctgagtccaatcttcttcagtctaggtgtccagttaggctacactgtcatttttgggtggtatgcaacattcttgttaatccgaacagggaatctgttatgtccaattattgctcacgtcttctgtaatatgatgggtttacctgttttctcgtcaccacgaacaaaaggagcggcattggtagcgtttctggctggttcaatagccttcttttggctgcttttccctgcaacaagtcctgaactgtacaacagcagttttgatcgctgcagttgctggcatggcttttgcaattggaaataacatagaactagattggaaagcaatgggtcctaacttgaagctactaacaattgaaacctccaggccctagctgacacttctgacggattttctatttgcagaaactccatatgaatgtcttaaaacgttttgtagaaatgtgtcccttgttttagcttaagactcaagagcttaaactagcaaaagattgtattttgccacttgttaaatacgtgctgatcatgaaatcgctgtcaatcccttctcaaagtggaatttgactttgttgagctgcttttatttatattgtgcttgctactgcagcgcctagagtttgtagattacacatcatggacccgtctgatattgtaaacgagagacatgtttctaagttaatatgctccctccatttattt

SEQ ID NO: 62773 - DNA, 1347 bp, Zea Mays
caaacacccatagtccgaaaacagcgtgttcttcgtgccaagcgaagccacgcgaccgactgtgttacgatcccaaatcttcactcccgacgaaatctagaatccaatgagcaatctcgactgacgcctgcttcaccagattatggcgacgccggcgggcctccttctcgcctcgccgccggtgatatcaggtgtcgcggcgatggcggcgtgcgccgcaatggcagtattctacgtcgctgtcctctatgccccgacggtcatcctccggttcccacccccaacctcactccgcaccttcctccaccgtcgcttcgcctgtgccgccgtcgcatccgccgcctccgtccttgccactgcgtccctcctccgagtctggagcctcagcgacttcgctgatatgtttgctgtgttcggcattaggaaggatcacttgattcaggccgtggctattccacttctcctgacatccctagtgtatgctgggtcattcgtcgctagagtgtggctcctagtgagctcgtggggcggtggcgatgaggtggagataggctgcgcacagaggcttgcacaatggatccaagctgctgttgcggatgttatggtttggcggaactatgtagtggcaccatttactgaggagctggttttcagggcatgcatgatacctcttctgctctgtgggggattcaaaatgtctacaattatatttctgagtccaatcttcttcagtctagggaatctgttatgtccaattattgctcacgtcttctgtaatatgatgggtttacctgttttctcgtcaccacgaacaaaaggagcggcattggtagcgtttctggctggttcaatagccttcttttggctgcttttccctgcaacaagtcctgaactgtacaacagcagttttgatcgctgcagttgctggcatggcttttgcaattggaaataacatagaactagattggaaagcaatgggtcctaacttgaagctactaacaattgaaacctccaggccctagctgacacttctgacggattttctatttgcagaaactccatatgaatgtcttaaaacgttttgtagaaatgtgtcccttgttttagcttaagactcaagagcttaaactagcaaaagattgtattttgccacttgttaaatacgtgctgatcatgaaatcgctgtcaatcccttctcaaagtggaatttgactttgttgagctgcttttatttatattgtgcttgctactgcagcgcctagagtttgtagattacacatcatggacccgtctgatattgtaaacgagagacatgtttctaagttaatatgctccctccatttattt

SEQ ID NO: 62774 - DNA, 1475 bp, Zea Mays
caaacacccatagtccgaaaacagcgtgttcttcgtgccaagcgaagccacgcgaccgactgtgttacgatcccaaatcttcactcccgacgaaatctagaatccaatgagcaatctcgactgacgcctgcttcaccagattatggcgacgccggcgggcctccttctcgcctcgccgccggtgatatcaggtgtcgcggcgatggcggcgtgcgccgcaatggcagtattctacgtcgctgtcctctatgccccgacggtcatcctccggttcccacccccaacctcactccgcaccttcctccaccgtcgcttcgcctgtgccgccgtcgcatccgccgcctccgtccttgccactgcgtccctcctccgagtctggagcctcagcgacttcgctgatatgtttgctgtgttcggcattaggaaggatcacttgattcaggccgtggctattccacttctcctgacatccctagtgtatgctgggtcattcgtcgctagagtgtggctcctagtgagctcgtggggcggtggcgatgaggtggagataggctgcgcacagaggcttgcacaatggatccaagctgctgttgcggatgttatggtttggcggaactatgtagtggcaccatttactgaggagctggttttcagggcatgcatgatacctcttctgctctgtgggggattcaaaatgtctacaattatatttctgagtccaatcttcttcagtctagcgcacttgaaccattttttcgaactacaccagcagggatgtaactttatgagagcgctattgattgtgtccagttaggctacactgtcatttttgggtggtatgcaacattcttgttaatccgaacagggaatctgttatgtccaattattgctcacgtcttctgtaatatgatgggtttacctgttttctcgtcaccacgaacaaaaggagcggcattggtagcgtttctggctggttcaatagccttcttttggctgcttttccctgcaacaagtcctgaactgtacaacagcagttttgatcgctgcagttgctggcatggcttttgcaattggaaataacatagaactagattggaaagcaatgggtcctaacttgaagctactaacaattgaaacctccaggccctagctgacacttctgacggattttctatttgcagaaactccatatgaatgtcttaaaacgttttgtagaaatgtgtcccttgttttagcttaagactcaagagcttaaactagcaaaagattgtattttgccacttgttaaatacgtgctgatcatgaaatcgctgtcaatcccttctcaaagtggaatttgactttgttgagctgcttttatttatattgtgcttgctactgcagcgcctagagtttgtagattacacatcatggacccgtctgatattgtaaacgagagacatgtttctaagttaatatgctccctccatttattt

SEQ ID NO: 62775 - DNA, 1242 bp, Zea Mays
caaacacccatagtccgaaaacagcgtgttcttcgtgccaagcgaagccacgcgaccgactgtgttacgatcccaaatcttcactcccgacgaaatctagaatccaatgagcaatctcgactgacgcctgcttcaccagattatggcgacgccggcgggcctccttctcgcctcgccgccggtgatatcaggtgtcgcggcgatggcggcgtgcgccgcaatggcagtattctacgtcgctgtcctctatgccccgacggtcatcctccggttcccacccccaacctcactccgcaccttcctccaccgtcgcttcgcctgtgccgccgtcgcatccgccgcctccgtccttgccactgcgtccctcctccgagtctggagcctcagcgacttcgctgatatgtttgctgtgttcggcattaggaaggatcacttgattcaggccgtggctattccacttctcctgacatccctagtgtatgctgggtcattcgtcgctagagtgtggctcctagtgagctcgtggggcggtggcgatgaggtggagataggctgcgcacagaggcttgcacaatggatccaagctgctgttgcggatgttatggtttggcggaactatgtagtggcaccatttactgaggagctggttttcagggcatgcatgatacctcttctgctctgtgggggattcaaaatgtctacaattatatttctgagtccaatcttcttcagtctaggaaccaactttgcctgcatcattttatccttctcatgtatgcccgcacgtctgtgaacgggagcgcaatgagtgaggattgtactctggagcaggctgcagcgcaagatagtagctaggtcctgaagaaagttctggtcctgtcagaagtttcaattagtcagagcctcagaggcatttgattagtaatggttgtgagtttggtttgttaggatatctagtttgttacagggtttggatcataagctgttatgatcggcattctatatcaatgtcgtgccaagcgtccctgttgcgaaccagcgacaacaccgatatcgcttcagtcggttcaggggatttgtttgtaatttatttgctcaaagataggagtttgtttggtttgataagttcgttggcttgttagggttcggctatttaaatagccctaacactatcatttgtttgttaagcaagatcagtacataaggtgttgcttctcgcccagaacccatttgacgtgcgcc

SEQ ID NO: 62776 - DNA, 1179 bp, Zea Mays
caaacacccatagtccgaaaacagcgtgttcttcgtgccaagcgaagccacgcgaccgactgtgttacgatcccaaatcttcactcccgacgaaatctagaatccaatgagcaatctcgactgacgcctgcttcaccagattatggcgacgccggcgggcctccttctcgcctcgccgccggtgatatcaggtgtcgcggcgatggcggcgtgcgccgcaatggcagtattctacgtcgctgtcctctatgccccgacggtcatcctccggttcccacccccaacctcactccgcaccttcctccaccgtcgcttcgcctgtgccgccgtcgcatccgccgcctccgtccttgccactgcgtccctcctccgagtctggagcctcagcgacttcgctgatatgtttgctgtgttcggcattaggaaggatcacttgattcaggccgtggctattccacttctcctgacatccctagtgtatgctgggtcattcgtcgctagagtgtggctcctagtgagctcgtggggcggtggcgatgaggtggagataggctgcgcacagaggcttgcacaatggatccaagctgctgttgcggatgttatggtttggcggaactatgtagtggcaccatttactgaggagctggttttcagggcatgcatgatacctcttctgctctgtgggggattcaaaatgtctacaattatatttctgagtccaatcttcttcagtctagcgcaatgagtgaggattgtactctggagcaggctgcagcgcaagatagtagctaggtcctgaagaaagttctggtcctgtcagaagtttcaattagtcagagcctcagaggcatttgattagtaatggttgtgagtttggtttgttaggatatctagtttgttacagggtttggatcataagctgttatgatcggcattctatatcaatgtcgtgccaagcgtccctgttgcgaaccagcgacaacaccgatatcgcttcagtcggttcaggggatttgtttgtaatttatttgctcaaagataggagtttgtttggtttgataagttcgttggcttgttagggttcggctatttaaatagccctaacactatcatttgtttgttaagcaagatcagtacataaggtgttgcttctcgcccagaacccatttgacgtgcgcc

SEQ ID NO: 62777 - DNA, 2941 bp, Zea Mays
tcgccggtccttgatctccatggctctagcgtttagccgcagcagcggccagcacgtgcacgccggcgaggatagcgcggtcccggcggttaccaccacacaggtcactgacactagctctcaatgaaattgcggacccgcaacacagtgggaggttacctcccagctcgggcccactccagtccagcggtccagccccgtgggtacaccatacacggtcccctcgcctccctccgagaaggaagaagctcaggcgaagcgaggcagagggatgtcgtgacgacgaaaccgaagccgagaacggaagcgagccttacatatacccggccccgtcccagtgccctcggcttccgccccagataccaaaccctaaccttagtcggccgttccgcaggcccgccggcggcgacgccttgtgtgccgcgtccgtgattctcttgcacagggaagcgtttggaaggggactccctgcctagtgcactggccgcagcgacgcgcggccgaggcgcggatcggggaggggaggacggctgtggcgagatggcgggtgacgtcgcgacctcgccagccccggcgccgctgtccgtgtcctcatcgtcgcagaaccaccaccaccacggccccacgaccgcccgcggtctcctctgccacgccggcgccggtgcctccgctggtgtggtggcggcgacgttcgtgtgcccactcgatgtcatcaagaccaggttccaggtccacggctggcccaagcttgccacaggtacaattggaggtgatgactccctccaacaattccttgtgaattttgcttcaatttgttgctttttgagttagaaacacgcacaaacctgtttggaacagcgagcttatcctggtgttattgagttgtgctgaggatgtaggaggggtgtatatgctgggaagtatggaatgtttgcatgggaagaggtggcgcattgtagtcaacctatgtgatttttgtgcttggttttgtctgtgatgtcatgtggacaatttgaaattcagagaggttagagaaaacctgcttagtatggggagacttcttaagttttcgcttgtggtgtctcttggtgacctggaccatccaagattcggggaattgtgagagaatctttttagtaactgaggatccacatttaggttttgtaacagttcaaatatttttcttggacggatgtcttatccttaaggtttactattgttgggttgtgtagttgtctaacggtcatttgtatccccctgcatgatttgaagtatcagtgctttcatgggaatgggacaaggggaggtatcacgagtgttgtgttgtcgttgtgaatttacaatgtcatgcaggttcgagagtggaaaaaacatgcaaactctcactagcagggtttgtacttattcgtctatgcacgtgaaaaagtcagagattagacatatattcgaagttccaaacaatgcacacaagattaagtgtctgtgggcatgatgtctattgtcattttccattatgaatgtcttttttgacatatatggagttagttctttggttatacgtgtaaaatagagtatacctaatatttcttaatctggtttttttgagatttgtattgagttttgcttgtattatgttatgtagaaccaatgcacaacatgcataccatgaatacaaaaaagtttaaaactgtcagaatgtcctcacgctggcagatcatcgcatacatgatacatatgccccatgtgttgcttgttagttatcaataccaaattcgtcgaagtttcaaacaatgcacacaaaactgtagtgtaattattgggagcttgcagcagattgctcaacaagaaggtttccggggaatgtatcgcggcctatccccaactattctggcactcttgcctaactgggcggtttactttactgtgtatgagcagcttaaaagttttctttcttccaacgatggaagccatcaactttctttaggggcaaatgttgttgctgcatcatgtgctggagctgcaacaactattgtaacaaatccactttgggttgtgaagacaagatttcagacccaaggaattagagccgggccaatcccgtataaaggtacacttgctgccttgagaagaatagcacatgaagaaggcatccgagggctatacagtggcctggtccctgccttggctggtatcagtcacgttgctattcagttccctgtgtacgagaagataaaagcttatctggctgagcgagataatactactgtagaagcattgagttttggtgatgtcgctgttgcttcgtctctggctaaagtagctgcgtcaacattgacatatcctcatgaggttgttcgatcaaggctgcaagaccagcgagcaaactctgatgccagatacaaaggtgtaatagactgcgtcagaaaggtttatcataaagagggtgtggctggcttctaccgtggatgtgccacaaatctgttgcggacgacccctgctgcagtgataactttcactagcttcgagatgatccataggtcccttcttgatctattccctgctgaacctgaacctcacatccaacctctaaagcattgaccatacaacatctgtaccctatccatgcggcagattaggaccccagtaaccatccagcaacagcaatgttgtttactgtgccagatggctcttgtaaaagagaattgtttttttcccagataatagctgccattcaaaagttgaaacaatagtgtaggcagagcattagcatctgtgtacgtaatagatttgttagcatgcatttggggtggaggtatatgagcgatgttgggtattttttttatgatgatgacgaaaagaaaaatgttacgacatatgaaggaatgattactatattctttttcacacctggtgtgctgtgatcgtgattcgtgaatccgtg

SEQ ID NO: 62778 - DNA, 1906 bp, Zea Mays
tcgccggtccttgatctccatggctctagcgtttagccgcagcagcggccagcacgtgcacgccggcgaggatagcgcggtcccggcggttaccaccacacaggtcactgacactagctctcaatgaaattgcggacccgcaacacagtgggaggttacctcccagctcgggcccactccagtccagcggtccagccccgtgggtacaccatacacggtcccctcgcctccctccgagaaggaagaagctcaggcgaagcgaggcagagggatgtcgtgacgacgaaaccgaagccgagaacggaagcgagccttacatatacccggccccgtcccagtgccctcggcttccgccccagataccaaaccctaaccttagtcggccgttccgcaggcccgccggcggcgacgccttgtgtgccgcgtccgtgattctcttgcacagggaagcgtttggaaggggactccctgcctagtgcactggccgcagcgacgcgcggccgaggcgcggatcggggaggggaggacggctgtggcgagatggcgggtgacgtcgcgacctcgccagccccggcgccgctgtccgtgtcctcatcgtcgcagaaccaccaccaccacggccccacgaccgcccgcggtctcctctgccacgccggcgccggtgcctccgctggtgtggtggcggcgacgttcgtgtgcccactcgatgtcatcaagaccaggttccaggtccacggctggcccaagcttgccacaggtacaattggaggtagtgtaattattgggagcttgcagcagattgctcaacaagaaggtttccggggaatgtatcgcggcctatccccaactattctggcactcttgcctaactgggcggtttactttactgtgtatgagcagcttaaaagttttctttcttccaacgatggaagccatcaactttctttaggggcaaatgttgttgctgcatcatgtgctggagctgcaacaactattgtaacaaatccactttgggttgtgaagacaagatttcagacccaaggaattagagccgggccaatcccgtataaaggtacacttgctgccttgagaagaatagcacatgaagaaggcatccgagggctatacagtggcctggtccctgccttggctggtatcagtcacgttgctattcagttccctgtgtacgagaagataaaagcttatctggctgagcgagataatactactgtagaagcattgagttttggtgatgtcgctgttgcttcgtctctggctaaagtagctgcgtcaacattgacatatcctcatgaggttgttcgatcaaggctgcaagaccagcgagcaaactctgatgccagatacaaaggtgtaatagactgcgtcagaaaggtttatcataaagagggtgtggctggcttctaccgtggatgtgccacaaatctgttgcggacgacccctgctgcagtgataactttcactagcttcgagatgatccataggtcccttcttgatctattccctgctgaacctgaacctcacatccaacctctaaagcattgaccatacaacatctgtaccctatccatgcggcagattaggaccccagtaaccatccagcaacagcaatgttgtttactgtgccagatggctcttgtaaaagagaattgtttttttcccagataatagctgccattcaaaagttgaaacaatagtgtaggcagagcattagcatctgtgtacgtaatagatttgttagcatgcatttggggtggaggtatatgagcgatgttgggtattttttttatgatgatgacgaaaagaaaaatgttacgacatatgaaggaatgattactatattctttttcacacctggtgtgctgtgatcgtgattcgtgaatccgtg

SEQ ID NO: 62779 - DNA, 3922 bp, Zea Mays
tttagagagcacttaaaagaataaagaatttttttacgtaacggaatatagagtaagttggagagagtctcaatgacattgtcgccggtccttgatctccatggctctagcgtttagccgcagcagcggccagcacgtgcacgccggcgaggatagcgcggtcccggcggttaccaccacacaggtcactgacactagctctcaatgaaattgcggacccgcaacacagtgggaggttacctcccagctcgggcccactccagtccagcggtccagccccgtgggtacaccatacacggtcccctcgcctccctccgagaaggaagaagctcaggcgaagcgaggcagagggatgtcgtgacgacgaaaccgaagccgagaacggaagcgagccttacatatacccggccccgtcccagtgccctcggcttccgccccagataccaaaccctaaccttagtcggccgttccgcaggcccgccggcggcgacgccttgtgtgccgcgtccgtgattctcttgcacagggaagcgtttggaaggggactccctgcctagtgcactggccgcagcgacgcgcggccgaggcgcggatcggggaggggaggacggctgtggcgagatggcgggtgacgtcgcgacctcgccagccccggcgccgctgtccgtgtcctcatcgtcgcagaaccaccaccaccacggccccacgaccgcccgcggtctcctctgccacgccggcgccggtgcctccgctggtgtggtggcggcgacgttcgtgtgcccactcgatgtcatcaagaccaggttccaggtccacggctggcccaagcttgccacaggtacaattggaggtgatgactccctccaacaattccttgtgaattttgcttcaatttgttgctttttgagttagaaacacgcacaaacctgtttggaacagcgagcttatcctggtgttattgagttgtgctgaggatgtaggaggggtgtatatgctgggaagtatggaatgtttgcatgggaagaggtggcgcattgtagtcaacctatgtgatttttgtgcttggttttgtctgtgatgtcatgtggacaatttgaaattcagagaggttagagaaaacctgcttagtatggggagacttcttaagttttcgcttgtggtgtctcttggtgacctggaccatccaagattcggggaattgtgagagaatctttttagtaactgaggatccacatttaggttttgtaacagttcaaatatttttcttggacggatgtcttatccttaaggtttactattgttgggttgtgtagttgtctaacggtcatttgtatccccctgcatgatttgaagtatcagtgctttcatgggaatgggacaaggggaggtatcacgagtgttgtgttgtcgttgtgaatttacaatgtcatgcaggttcgagagtggaaaaaacatgcaaactctcactagcagggtttgtacttattcgtctatgcacgtgaaaaagtcagagattagacatatattcgaagttccaaacaatgcacacaagattaagtgtctgtgggcatgatgtctattgtcattttccattatgaatgtcttttttgacatatatggagttagttctttggttatacgtgtaaaatagagtatacctaatatttcttaatctggtttttttgagatttgtattgagttttgcttgtattatgttatgtagaaccaatgcacaacatgcataccatgaatacaaaaaagtttaaaactgtcagaatgtcctcacgctggcagatcatcgcatacatgatacatatgccccatgtgttgcttgttagttatcaataccaaattcgtcgaagtttcaaacaatgcacacaaaactgtaagtgtgtctctgggcatgacatgtctactgtcattttgcgttatgattatgaatgtcttgtttgccatatatggagttagttctttggttatacatgtaaaataatgtattagctgatattccaagcctggtgtttttgaggtacacatcaagttttgctgatattatactacgtctaagtgtctaactgaacaagcatattgtgaatgcaaataaatttaaactgctataatgtaaccatgagtgctatgagtatagatgttctcatgctggcagattatcacatacatatgtgctttgtatttcttgttactaccaaacttgtgatgcttagctcattttttatgctacatctgtgttctgcactagaacagttttttttttgaaaatgtacagcagggcttcccctgctgtggtagatatttattaatataaagaagaaagcggacaaagagcatgagcagtcgctcccaagacataaaccagaaataaactaactagagcacagggaaaagaactatctgctatctataggaatttacaagcgaggagaaaagagttgatttctcttcagaaaagcggttagcttgcagaagggtttcggcgcggaattcttttttccagccaaggaaagatggccgtctttatcatagcagctgcactagaacagttgtattgttgtatcaggaaatgccttgagctattaccagtgttcttaaggcgcctaggcgagcaagtggaccagaaaaccgccttagcgcctaggcgacgcctaggcgggtatggcgagcaaggcggccagttttgcctgggcgcctggacgcctaggcgacgccttaagaacactggctattacatttgaattggctttttatgtgttgtgtgaatcaatactaggtagtgtaattattgggagcttgcagcagattgctcaacaagaaggtttccggggaatgtatcgcggcctatccccaactattctggcactcttgcctaactgggcggtttactttactgtgtatgagcagcttaaaagttttctttcttccaacgatggaagccatcaactttctttaggggcaaatgttgttgctgcatcatgtgctggagctgcaacaactattgtaacaaatccactttgggttgtgaagacaagatttcagacccaaggaattagagccgggccaatcccgtataaaggtacacttgctgccttgagaagaatagcacatgaagaaggcatccgagggctatacagtggcctggtccctgccttggctggtatcagtcacgttgctattcagttccctgtgtacgagaagataaaagcttatctggctgagcgagataatactactgtagaagcattgagttttggtgatgtcgctgttgcttcgtctctggctaaagtagctgcgtcaacattgacatatcctcatgaggttgttcgatcaaggctgcaagaccagcgagcaaactctgatgccagatacaaaggtgtaatagactgcgtcagaaaggtttatcataaagagggtgtggctggcttctaccgtggatgtgccacaaatctgttgcggacgacccctgctgcagtgataactttcactagcttcgagatgatccataggtcccttcttgatctattccctgctgaacctgaacctcacatccaacctctaaagcattgaccatacaacatctgtaccctatccatgcggcagattaggaccccagtaaccatccagcaacagcaatgttgtttactgtgccagatggctcttgtaaaagagaattgtttttttcccagataatagctgccattcaaaagttgaaacaatagtgtaggcagagcattagcatctgtgtacgtaatagatttgttagcatgcatttggggtggaggtatatgagcgatgttgggtattttttttatgatgatgacgaaaagaaaaatgttacgacatatgaaggaatgattactatattctttttcacacctggtgtgctgtgatcgtgattcgtgaatccgtg

SEQ ID NO: 62780 - DNA, 511 bp, Zea Mays
gtacgagatcgccaacgtcccgtatcctgcacacgccatcgcaacgcctccaaggctccttctagatctgcctcggccacggaacggtgccgctggagctgcagccatccagccgaccgccggccaccagccgagccgccgcacgaaggctatgatattcaatgtgatctcatcaacaaagcaatcgtatggagaattggaatgttttcagtcctattaaatgccacttgatttgcagaagctgttcaaaggggttactggtggcctctctggattgtcaaagaatgtcacgtgccatgaaacactgccaagaaatattaggagctggtttgaaaaaggcccaacgtaatagcaactgggagcaacagccactaacccaaaatcagtgtcgccttccatcaatcgtggcatcaccgaagccagaaatatagaagacgcggaaaagtggagcgtcagggaatcttaagaaaggagaggtgtgaagcacagtaagatggtcgatgacgaagat

SEQ ID NO: 62781 - DNA, 622 bp, Zea Mays
tttggtcaggtctcagtcatacagattgcatcagataagatagctagccttcatttaaaaaaaactgtatgaagatgacccaaaagcattggatagctgcttgaggcatattatgtgtccatctaagatactaaagctggcgaaggctatgatattcaatgtgatctcatcaacaaagcaatcgtatggagaattggaatgttttcagtcctattaaatgccacttgatttgcagaagctgttcaaaggggttactggtggcctctctggattgtcaaagaatgtcacgtgccatgaaacactgccaagaaatattaggagctggtttgaaaaaggcccaacgtaatagcaactgggagcaacagccactaacccaaaatcagtgtcgccttccatcaatcgtggcatcaccgaagccagaaatatagaagacgcggaaaagtggagcgtcagggaatcttaagaaaggagaggtcaccgttccttctctcgtgcctttctttttcgttacttctaattttctttccctgtctttgcatgtaagtatcgaaccttttgttgttgcctgttgcaatcttgcatgatcatattcgctcctggttgcaagtatcgagtgttggtc

SEQ ID NO: 62782 - DNA, 723 bp, Zea Mays
ctcgtggttgattttagctatttggtcaggtctcagtcatacagattgcatcagataagatagctagccttcatttaaaaaaaactgtatgaagatgacccaaaagcattggatagctgcttgaggcatattatgtgtccatctaagatactaaagctgggctatgatattcaatgtgatctcatcaacaaagcaatcgtatggagaattggaatgttttcagtcctattaaatgccacttgatttgcagaagctgttcaaaggggttactggtggcctctctggattgtcaaaggtatataaatatacaatcgtcataaaatataaactggttgcagttaactgttgtccatctacttttgacattttcttgttatgtagaatgtcacgtgccatgaaacactgccaagaaatattaggagctggtttgaaaaaggcccaacgtaatagcaactgggagcaacagccactaacccaaaatcagtgtcgccttccatcaatcgtggcatcaccgaagccagaaatatagaagacgcggaaaagtggagcgtcagggaatcttaagaaaggagaggtcaccgttccttctctcgtgcctttctttttcgttacttctaattttctttccctgtctttgcatgtaagtatcgaaccttttgttgttgcctgttgcaatcttgcatgatcatattcgctcctggttgcaagtatcgagtgttggtc

SEQ ID NO: 62783 - DNA, 548 bp, Zea Mays
tttggtcaggtctcagtcatacagattgcatcagataagatagctagccttcatttaaaaaaaactgtatgaagatgacccaaaagcattggatagctgcttgaggcatattatgtgtccatctaagatactaaagctgggctatgatattcaatgtgatctcatcaacaaagcaatcgtatggagaattggaatgttttcagtcctattaaatgccacttgatttgcagaagctgttcaaaggggttactggtggcctctctggattgtcaaaggtatataaatatacaatcgtcataaaatataaactggttgcagttaactgttgtccatctacttttgacattttcttgttatgtagaatgtcacgtgccatgaaacactgccaagaaatattaggagctggtttgaaaaaggcccaacgtaatagcaactgggagcaacagccactaacccaaaatcagcagactgcagtcggtaccagtcggatttgaaaccccttttctgttatgaattagtgacatgggaagtgtcacgttcagtgcagg

SEQ ID NO: 62784 - DNA, 1921 bp, Zea Mays
gaagttcctaaactaatacaggccatcatgggcccaatctgtcgcggagtagcgccgaattcaaacgaggaggcgaaaaccaaagcagcaacgaaatgtatcgcgccggatgtgttgagtcatccgagtcacacgacctcactcctccggtcgtccctccccataataaaacgcgatccattttatcggggcggccgggcgggcggcgcggatcgggggggtcgaatcgaatcgatggaccacaagccatgcgcggccgtccttgagccgttgctcccgtcgccggcggagggcaaggcggcggaggcgaagcggctgatgcggctggcggggccgatcgtcgccagctgcgtgctgcagaacgtggtcagcatggcgtccatcatattcgttggccacctcggcgagctccacctcgccggcgcttccctggccacctccctcgccaacgtcacgggctacagccttctcaccggcatggcgagcgcgctggacacgctgtgcgggcaggcgttcggcgcgcggcagcaccacctcctgggcgtgtacaagcagcgcgcgatggtggtgctcgggctcgcctgcgtcccgatcgcggtcgtgtgggcgtgcgccggccggatcctgctcctcctcggccaggacccgcagatcgcggcggaggccggcgcgtacgcgcggtggctcgtcccgtcgctggccgcctacgtgccgctgcagtgccacgtccgcttcctgcagacgcagagcgtggtcctgcccgtggcggccagctgcggcgccacggcgctctgccacgtgctggtgtgctgggcgctggtgtacaaggccggcatgggcagcaagggcgccgcgctcagcaacggcgtctcctacgccgtcaacctcgtggtactggcgctgtacgtgaggctgtcgggcgcgtgcagggagacatggaaaggcttctcgcgggaggcgtttaaggacctgtggcgattcgccgagcttgcctggccgtccgccatgatgatctgcttggagtggtggtcgtttgaagtccttgtgcttctgtccggtcttctgccaaatcctcagctggaaacgtcagtcctgtcgatttgcctaaatactggtgctctgctctacatgataccattggggcttacttactccataagcacacgcgtttccaacgagcttggcgctgggcagcctcaggccgctaagatggcagcaaaggggtgctcacaggctgcggaaagcagaagatcggcgcggccgttaatctcggggcgttctacttgctaggcatcccagtggctgtactgcttgcattcgtcttccatctcaacggaatgggcctctggcttggcatcgtctgcggcagcgccaccaagctgggttttcttctgtttgtaacgtgttccgtagactgggacaaggaggcagtgaaggcaaggtacagagtgttagggtcatctctcccgttagcatgaaaaaaatgccagtgttacatggaaatcccatttgaaggcagttgaacagaacccagcaaagaaagtgtgggaaaaaaaaactttctatagtttgggacatctcaaagtcatagatagctacggggaaggcaagaagaaccagagccagtatttttggattcatctgtagtgttaaattttgtagcactgcaatggtttttcaggaaatataattagctggattgagtcaaatggcaacgatacatgatagttttccacgttctgggtatattaaccgtacatcactgaccttatggtgtcagatatgatggcagggtttatggcaccagatagatttttttggacatgtaaaaaatccaattcaggagctcaaaaccatttttaataatttcgagaaatgctaggtgttccgggaaacgaggaaaacactagctgcaaaattg

SEQ ID NO: 62785 - DNA, 2042 bp, Zea Mays
gaagttcctaaactaatacaggccatcatgggcccaatctgtcgcggagtagcgccgaattcaaacgaggaggcgaaaaccaaagcagcaacgaaatgtatcgcgccggatgtgttgagtcatccgagtcacacgacctcactcctccggtcgtccctccccataataaaacgcgatccattttatcggggcggccgggcgggcggcgcggatcgggggggtcgaatcgaatcgatggaccacaagccatgcgcggccgtccttgagccgttgctcccgtcgccggcggagggcaaggcggcggaggcgaagcggctgatgcggctggcggggccgatcgtcgccagctgcgtgctgcagaacgtggtcagcatggcgtccatcatattcgttggccacctcggcgagctccacctcgccggcgcttccctggccacctccctcgccaacgtcacgggctacagccttctcaccggcatggcgagcgcgctggacacgctgtgcgggcaggcgttcggcgcgcggcagcaccacctcctgggcgtgtacaagcagcgcgcgatggtggtgctcgggctcgcctgcgtcccgatcgcggtcgtgtgggcgtgcgccggccggatcctgctcctcctcggccaggacccgcagatcgcggcggaggccggcgcgtacgcgcggtggctcgtcccgtcgctggccgcctacgtgccgctgcagtgccacgtccgcttcctgcagacgcagagcgtggtcctgcccgtggcggccagctgcggcgccacggcgctctgccacgtgctggtgtgctgggcgctggtgtacaaggccggcatgggcagcaagggcgccgcgctcagcaacggcgtctcctacgccgtcaacctcgtggtactggcgctgtacgtgaggctgtcgggcgcgtgcagggagacatggaaaggcttctcgcgggaggcgtttaaggacctgtggcgattcgccgagcttgcctggccgtccgccatgatgatctgcttggagtggtggtcgtttgaagtccttgtgcttctgtccggtcttctgccaaatcctcagctggaaacgtcagtcctgtcgatttgcacacgcgtttccaacgagcttggcgctgggcagcctcaggccgctaagatggcagcaaaggtagtcatgtacatggctttgtctgaaggactcgttatatcgttgacgatgaccctgctacgcaacatttgggggtacgtgtacagcgacgaggaggagatcgtgacgtacatctctaagatgttgccgatcctcgggatatctttcttcatagatgggctccatagctctctttcaggggtgctcacaggctgcggaaagcagaagatcggcgcggccgttaatctcggggcgttctacttgctaggcatcccagtggctgtactgcttgcattcgtcttccatctcaacggaatgggcctctggcttggcatcgtctgcggcagcgccaccaagctgggttttcttctgtttgtaacgtgttccgtagactgggacaaggaggcagtgaaggcaaggtacagagtgttagggtcatctctcccgttagcatgaaaaaaatgccagtgttacatggaaatcccatttgaaggcagttgaacagaacccagcaaagaaagtgtgggaaaaaaaaactttctatagtttgggacatctcaaagtcatagatagctacggggaaggcaagaagaaccagagccagtatttttggattcatctgtagtgttaaattttgtagcactgcaatggtttttcaggaaatataattagctggattgagtcaaatggcaacgatacatgatagttttccacgttctgggtatattaaccgtacatcactgaccttatggtgtcagatatgatggcagggtttatggcaccagatagatttttttggacatgtaaaaaatccaattcaggagctcaaaaccatttttaataatttcgagaaatgctaggtgttccgggaaacgaggaaaacactagctgcaaaattg

SEQ ID NO: 62786 - DNA, 785 bp, Zea Mays
gcatcggttggtgttggttctgattcggaggctatactagcccatggcaaagaagccatggagctgttcgagagagcgtgccactgtttcgataatcccaatatatacagccagtgcgcggaggagttcaggctgaacgcggagggcgcgttccacgtgcagaggaacgaggtggacgagtactgcggcgggccgtgcctggaggagacgaatctggcgctggagtgcgtggaggaggtggccgccgagagcttcaggttctccaacggcgcgtcggtgctggcggtgaggcaggcgctcggcacggggtgcagctacggccccgacagagggacctttgagatcagggagcgcaaagactgcgtcggcggcgccgacgagtactactaccgcaagcctcgcgaccacgagcaggagaagccagcagtcggcggccggtactacggcgagggcagccagcagccgtacgagcagcagggcgccggcggatatggcgagggcgaggagtactgctccggggccgctggcaggctaggaggagagcgccgcggctactacctgcagacgatcatcctgctgcttcttgcctctgcaccaccactgatcctcacgctctaaaattcagtttccgctaccggcatgttgtagacccttgtttttatgctgtattccttcggagttttttcccccttcacttttcagtaattttgcacgcgctactgtctacgttctagaacaaacacctcttcgacaaatatatttgtcctctttttcgatgggtcgtc

SEQ ID NO: 62787 - DNA, 3373 bp, Zea Mays
ccgacactccaccatcctccatggccgttaagcccacatccatcatcgccgcctccgccacagcacgccatggagaccagcaagtcgccaccgctctactcggcgccgcgggagccctctgccacgacagtgatgctgtgtccgtgcctggcgttcttcctcctcgctctcatcatcacctccatcgcactcactgtccactttcgcctctactgccacactcctcttgcccacctcatctccccgcaccgctgcccccaccacatctgacctccgtctccgcccgcatcgctggcgtggtcctgcttcccagaggcgtgttccctctgctgccgccgagatcccgatacgttatgggttcccctctcctcgcgacgccggcatgcggggcttacgacgtgctctggggcttcgcagccggaaggttcctctccatcttggctgcctccgacgaagatcagggctcgtcggagcaggaggcggctgcgagcaacccggagggcgtggaccgcgtctgcgcggccatcgcggacgtcgtcgcctccggtgccgacgcgaacctggaggcggcgctatccgcgctctcgccaccgctctgcgaagcggtcgtgctcgctgtgctccaccgcttcaagcacgcacataggccgtcctaccgcttcttcaggtgggccacagtgtccggtggctttacccacaccaccattacctactgcaagatgttacacatcttaggcaagacgaggcagttcgagtcgatggttgcgatgatccaagagatggggaaggcgggggccctgtccatggacgccttcaaggttgccattaagtccttcgctgcggctggtgagatcaagaatgcggttggcgtgttcgagttgatgagaaagaacggtttcgatgatggggtggaatcattcaattgcttgctcgttgctttagccaaagagggattaggtagggaggccaggcaggtgtttgacaaaatgcatggccagtactctccagacctgcgctcttatactgcactgatgctggcatggtgcaatgcgaggaatctggttgaggcggggcgggtttggaatgagatgctggagaagggaatggatccagatgttgttgtccacaacacaatgattgaggggttgctgcgtgggcagaggcgacccgaggccgtgaagatgtttgagctgatgaaggcaaaggggcctccaccaaatgtgtggacttacacaatgttaatccgtgaccattgtaagcaggggaagatggacatggcaatggagtgctttgaggagatgcaggaggctaaatgccaaccagatgttgctacctatacatgtttgctggttggatatgggaatgcaaaacaaatggacagagtgactgctgtgttggaggagatgacacagaagggatgcccccctgatgctcggacttacaatgcactgattaagttgctaacaaataggaatatgccagacgatgctgcaaggatatacaagaagatgatcaagaagggacttgagcccacaatccatacttacaacatgatgatgaagtcatatttcgttggtgatagcaactatgcaatgggttgtgcagtgtgggaggagatgcaccagaggggtatttgccctgatgtgaactcttacacagtgttcattaatgggcatatacgacatggcaggccagaggaggcatataaatatatcgaggagatgattaataaagggatgaaagctccacaaatagactataataagtttgctgcagatttctcaaaggctgggaaaccagatatattgtttgagttggctcagaaagtgaaatttgctgggaaattagatgtatctaatgtgttctatcagtgggcagatagaatgaagagtcgggtgaagagaaatgtaccttcagattggtaatagaatgttctaagattactatgctgccagcaggaatgtggcatgctgtgatggtgcttgaaatttgattactaaggagaactgctacctttttcagtttgccattgtcaactttaatataattgtgacctgacattcaaaaaaaagtgcaagatgcaaggcctaccatgtgcttatttacggttgatgtcttttaacaatcttcaaggcaaacctgtgacatgcaaaatctttcttattatcactcgttttgacttttgtgattgatgcatttatcacatcgtgttaaacatagcttgttattcacatgttgatatgtgtagctccttccttcttgtttacgtttgtttgtttctttgattaaacaagttatctgagctatttctttgtatcttttttgatgccatgacatagaaaacactacattatcaaatattcaaatgcgtagatttggtaaaagtttgactatgatattgatgatctttcgtggtctgagtggtggagtttttgcagctattcacaggctggaaagttcatgcactgccctccttgtggatacactttctgttaacaaaatgctatacagtttctttctacttaccttgtgattttgatggagctctgttcctgtggttctttgacatttgttggtctcttgagcattagttctgcaatatgcattatgctcctctattgaactctatagcccatattgtggagatcactaacatcacctacatagcaagggatattttttttcatgcaacccagaatctgaacgccattgcgaaaagcagggataaaatgctgctgtttcactgcaccaactaaacagagaaagaaaaggagatgagaaaactcagcatgttttgattcgactacagtctgcgcccccaagaaaccagggaacaggagtcaggactaacctccagcagctgcaaccggtactgcctctgcccactttggacgacgccaatcattcgcatgacaaggtagagcggcagcaggataccagcagcacgaaccgtcgccactgcaaccagatgccatgcgagcgtcacaatggtgaactgcacaagtcagaatccaggggacagcatggatcaggactcgtcctaaaggatggctatttttcaattcgctgcatgacttagaaccactacataccgtgatcgccagcgaccggcaccatgtggcgcattgatctgcggcgtaggagcacctggtgtaatctgcaccgtcaaccaagccctccggaggttccaaatgttgcatgtcctcgtgttcactgcacgatcacttgagaaaatttagatggttgccaatttgactggaacccagttacaagcctacttgaaagctttttttattttagattttctttccgaactttatgaaacttttgcaggttaacggttttttttttgaaagaatggttaacattctca

SEQ ID NO: 62788 - DNA, 3601 bp, Zea Mays
ccgacactccaccatcctccatggccgttaagcccacatccatcatcgccgcctccgccacagcacgccatggagaccagcaagtcgccaccgctctactcggcgccgcgggagccctctgccacgacagtgatgctgtgtccgtgcctggcgttcttcctcctcgctctcatcatcacctccatcgcactcactgtccactttcgcctctactgccacactcctcttgcccacctcatctccccgcaccgctgcccccaccacatctgacctccgtctccgcccgcatcgctggcgtggtcctgcttcccagaggcgtgttccctctgctgccgccgagatcccgatacgttatgggttcccctctcctcgcgacgccggcatgcggggcttacgacgtgctctggggcttcgcagccggaaggttcctctccatcttggctgcctccgacgaagatcagggctcgtcggagcaggaggcggctgcgagcaacccggagggcgtggaccgcgtctgcgcggccatcgcggacgtcgtcgcctccggtgccgacgcgaacctggaggcggcgctatccgcgctctcgccaccgctctgcgaagcggtcgtgctcgctgtgctccaccgcttcaagcacgcacataggccgtcctaccgcttcttcaggtgggccacagtgtccggtggctttacccacaccaccattacctactgcaagatgttacacatcttaggcaagacgaggcagttcgagtcgatggttgcgatgatccaagagatggggaaggcgggggccctgtccatggacgccttcaaggttgccattaagtccttcgctgcggctggtgagatcaagaatgcggttggcgtgttcgagttgatgagaaagaacggtttcgatgatggggtggaatcattcaattgcttgctcgttgctttagccaaagagggattaggtagggaggccaggcaggtgtttgacaaaatgcatggccagtactctccagacctgcgctcttatactgcactgatgctggcatggtgcaatgcgaggaatctggttgaggcggggcgggtttggaatgagatgctggagaagggaatggatccagatgttgttgtccacaacacaatgattgaggggttgctgcgtgggcagaggcgacccgaggccgtgaagatgtttgagctgatgaaggcaaaggggcctccaccaaatgtgtggacttacacaatgttaatccgtgaccattgtaagcaggggaagatggacatggcaatggagtgctttgaggagatgcaggaggctaaatgccaaccagatgttgctacctatacatgtttgctggttggatatgggaatgcaaaacaaatggacagagtgactgctgtgttggaggagatgacacagaagggatgcccccctgatgctcggacttacaatgcactgattaagttgctaacaaataggaatatgccagacgatgctgcaaggatatacaagaagatgatcaagaagggacttgagcccacaatccatacttacaacatgatgatgaagtcatatttcgttggtgatagcaactatgcaatgggttgtgcagtgtgggaggagatgcaccagaggggtatttgccctgatgtgaactcttacacagtgttcattaatgggcatatacgacatggcaggccagaggaggcatataaatatatcgaggagatgattaataaagggatgaaagctccacaaatagactataataagtttgctgcagatttctcaaaggctgggaaaccagatatattgtttgagttggctcagaaagtgaaatttgctgggaaattagatgtatctaatgtgttctatcagtgggcagatagaatgaagagtcgggtgaagagaaatgtaccttcagattggtaatagaatgttctaagattactatgctgccagcaggaatgtggcatgctgtgatggtgcttgaaatttgattactaaggagaactgctacctttttcagtttgccattgtacggtcaactttaatataattgtgacctgacattcaaaaaaaagtgcaagatgcaaggcctaccatgtgcttatttacggttgatgtcttttaacaatcttcaaggcaaacctgtgacatgcaaaatctttcttattatcactcgttttgacttttgtgattgatgcatttatcacatcgtgttaaacatagcttgttattcacatgttgatatgtgtagctccttccttcttgtttacgtttgtttgtttctttgattaaacaagttatctgagctatttctttgtatcttttttgatgccatgacatagaaaacactacattatcaaatattcaaatgcgtagatttggtaaaagtttgactatgatattgatgatctttcgtggtctgagtggtggagtttttgcagctattcacaggctggaaagttcatgcactgccctccttgtggatacactttctgttaacaaaatgctatacagtttctttctacttaccttgtgattttgatggagctctgttcctgtggttctttgacatttgttggtctcttgagcattagttctgcaatatgcattatgctcctctattgaactctatagcccatattgtggagatcactaacatgttagtaattttacttcccatcaaactttcagttccatcgaattgtacattattgaaatgctcttctgtcttcttatactcggtattcctgtaactagatttaaacaagggtacaagacaacaaaccttaataaatgtattgcatgcagcacatgcaaatcttttggtctaccatgtgctgggtgtttccagcatggcactctgctgcacctacatagcaagggatattttttttcatgcaacccagaatctgaacgccattgcgaaaagcagggataaaatgctgctgtttcactgcaccaactaaacagagaaagaaaaggagatgagaaaactcagcatgttttgattcgactacagtctgcgcccccaagaaaccagggaacaggagtcaggactaacctccagcagctgcaaccggtactgcctctgcccactttggacgacgccaatcattcgcatgacaaggtagagcggcagcaggataccagcagcacgaatgctctgctgcttcagccgtcgccactgcaaccagatgccatgcgagcgtcacaatggtgaactgcacaagtcagaatccaggggacagcatggatcaggactcgtcctaaaggatggctatttttcaattcgctgcatgacttagaaccactacataccgtgatcgccagcgaccggcaccatgtggcgcattgatctgcggcgtaggagcacctggtgtaatctgcaccgtcaaccaagccctccggaggttccaaatgttgcatgtcctcgtgttcactgcacgatcacttgagaaaatttagatggttgccaatttgactggaacccagttacaagcctacttgaaagctttttttattttagattttctttccgaactttatgaaacttttgcaggttaacggttttttttttgaaagaatggttaacattctca

SEQ ID NO: 62789 - DNA, 3635 bp, Zea Mays
ccgacactccaccatcctccatggccgttaagcccacatccatcatcgccgcctccgccacagcacgccatggagaccagcaagtcgccaccgctctactcggcgccgcgggagccctctgccacgacagtgatgctgtgtccgtgcctggcgttcttcctcctcgctctcatcatcacctccatcgcactcactgtccactttcgcctctactgccacactcctcttgcccacctcatctccccgcaccgctgcccccaccacatctgacctccgtctccgcccgcatcgctggcgtggtcctgcttcccagaggcgtgttccctctgctgccgccgagatcccgatacgttatgggttcccctctcctcgcgacgccggcatgcggggcttacgacgtgctctggggcttcgcagccggaaggttcctctccatcttggctgcctccgacgaagatcagggctcgtcggagcaggaggcggctgcgagcaacccggagggcgtggaccgcgtctgcgcggccatcgcggacgtcgtcgcctccggtgccgacgcgaacctggaggcggcgctatccgcgctctcgccaccgctctgcgaagcggtcgtgctcgctgtgctccaccgcttcaagcacgcacataggccgtcctaccgcttcttcaggtgggccacagtgtccggtggctttacccacaccaccattacctactgcaagatgttacacatcttaggcaagacgaggcagttcgagtcgatggttgcgatgatccaagagatggggaaggcgggggccctgtccatggacgccttcaaggttgccattaagtccttcgctgcggctggtgagatcaagaatgcggttggcgtgttcgagttgatgagaaagaacggtttcgatgatggggtggaatcattcaattgcttgctcgttgctttagccaaagagggattaggtagggaggccaggcaggtgtttgacaaaatgcatggccagtactctccagacctgcgctcttatactgcactgatgctggcatggtgcaatgcgaggaatctggttgaggcggggcgggtttggaatgagatgctggagaagggaatggatccagatgttgttgtccacaacacaatgattgaggggttgctgcgtgggcagaggcgacccgaggccgtgaagatgtttgagctgatgaaggcaaaggggcctccaccaaatgtgtggacttacacaatgttaatccgtgaccattgtaagcaggggaagatggacatggcaatggagtgctttgaggagatgcaggaggctaaatgccaaccagatgttgctacctatacatgtttgctggttggatatgggaatgcaaaacaaatggacagagtgactgctgtgttggaggagatgacacagaagggatgcccccctgatgctcggacttacaatgcactgattaagttgctaacaaataggaatatgccagacgatgctgcaaggatatacaagaagatgatcaagaagggacttgagcccacaatccatacttacaacatgatgatgaagtcatatttcgttggtgatagcaactatgcaatgggttgtgcagtgtgggaggagatgcaccagaggggtatttgccctgatgtgaactcttacacagtgttcattaatgggcatatacgacatggcaggccagaggaggcatataaatatatcgaggagatgattaataaagggatgaaagctccacaaatagactataataagtttgctgcagatttctcaaaggctgggaaaccagatatattgtttgagttggctcagaaagtgaaatttgctgggaaattagatgtatctaatgtgttctatcagtgggcagatagaatgaagagtcgggtgaagagaaatgtaccttcagattggtaatagaatgttctaagattactatgctgccagcaggaatgtggcatgctgtgatggtgcttgaaatttgattactaaggagaactgctacctttttcagtttgccattgtacggtcaactttaatataattgtgacctgacattcaaaaaaaagtgcaagatgcaaggcctaccatgtgcttatttacggttgatgtcttttaacaatcttcaaggcaaacctgtgacatgcaaaatctttcttattatcactcgttttgacttttgtgattgatgcatttatcacatcgtgttaaacatagcttgttattcacatgttgatatgtgtagctccttccttcttgtttacgtttgtttgtttctttgattaaacaagttatctgagctatttctttgtatcttttttgatgccatgacatagaaaacactacattatcaaatattcaaatgcgtagatttggtaaaagtttgactatgatattgatgatctttcgtggtctgagtggtggagtttttgcagctattcacaggctggaaagttcatgcactgccctccttgtggatacactttctgttaacaaaatgctatacagtttctttctacttaccttgtgattttgatggagctctgttcctgtggttctttgacatttgttggtctcttgagcattagttctgcaatatgcattatgctcctctattgaactctatagcccatattgtggagatcactaacatatttaaacaagggtacaagacaacaaaccttaataaatgtattgcatgcagcacatgcaaatcttttggtctaccatgtgctgggtgtttccagcatggcactctgctggtatgaggctaacaaatatctactattgagtttgttagctcccgtgactctgggcactgcttcaccattttgtgactttgcacctacatagcaagggatattttttttcatgcaacccagaatctgaacgccattgcgaaaagcagggataaaatgctgctgtttcactgcaccaactaaacagagaaagaaaaggagatgagaaaactcagcatgttttgattcgactacagtctgcgcccccaagaaaccagggaacaggagtcaggactaacctccagcagctgcaaccggtactgcctctgcccactttggacgacgccaatcattcgcatgacaaggtagagcggcagcaggataccagcagcacgaagtaagtacatctgcaaagaaacataacctcggcttttagttcatcgaatcagtgctctgctgcttcagccgtcgccactgcaaccagatgccatgcgagcgtcacaatggtgaactgcacaagtcagaatccaggggacagcatggatcaggactcgtcctaaaggatggctatttttcaattcgctgcatgacttagaaccactacataccgtgatcgccagcgaccggcaccatgtggcgcattgatctgcggcgtaggagcacctggtgtaatctgcaccgtcaaccaagccctccggaggttccaaatgttgcatgtcctcgtgttcactgcacgatcacttgagaaaatttagatggttgccaatttgactggaacccagttacaagcctacttgaaagctttttttattttagattttctttccgaactttatgaaacttttgcaggttaacggttttttttttgaaagaatggttaacattctca

SEQ ID NO: 62790 - DNA, 3665 bp, Zea Mays
ccgacactccaccatcctccatggccgttaagcccacatccatcatcgccgcctccgccacagcacgccatggagaccagcaagtcgccaccgctctactcggcgccgcgggagccctctgccacgacagtgatgctgtgtccgtgcctggcgttcttcctcctcgctctcatcatcacctccatcgcactcactgtccactttcgcctctactgccacactcctcttgcccacctcatctccccgcaccgctgcccccaccacatctgacctccgtctccgcccgcatcgctggcgtggtcctgcttcccagaggcgtgttccctctgctgccgccgagatcccgatacgttatgggttcccctctcctcgcgacgccggcatgcggggcttacgacgtgctctggggcttcgcagccggaaggttcctctccatcttggctgcctccgacgaagatcagggctcgtcggagcaggaggcggctgcgagcaacccggagggcgtggaccgcgtctgcgcggccatcgcggacgtcgtcgcctccggtgccgacgcgaacctggaggcggcgctatccgcgctctcgccaccgctctgcgaagcggtcgtgctcgctgtgctccaccgcttcaagcacgcacataggccgtcctaccgcttcttcaggtgggccacagtgtccggtggctttacccacaccaccattacctactgcaagatgttacacatcttaggcaagacgaggcagttcgagtcgatggttgcgatgatccaagagatggggaaggcgggggccctgtccatggacgccttcaaggttgccattaagtccttcgctgcggctggtgagatcaagaatgcggttggcgtgttcgagttgatgagaaagaacggtttcgatgatggggtggaatcattcaattgcttgctcgttgctttagccaaagagggattaggtagggaggccaggcaggtgtttgacaaaatgcatggccagtactctccagacctgcgctcttatactgcactgatgctggcatggtgcaatgcgaggaatctggttgaggcggggcgggtttggaatgagatgctggagaagggaatggatccagatgttgttgtccacaacacaatgattgaggggttgctgcgtgggcagaggcgacccgaggccgtgaagatgtttgagctgatgaaggcaaaggggcctccaccaaatgtgtggacttacacaatgttaatccgtgaccattgtaagcaggggaagatggacatggcaatggagtgctttgaggagatgcaggaggctaaatgccaaccagatgttgctacctatacatgtttgctggttggatatgggaatgcaaaacaaatggacagagtgactgctgtgttggaggagatgacacagaagggatgcccccctgatgctcggacttacaatgcactgattaagttgctaacaaataggaatatgccagacgatgctgcaaggatatacaagaagatgatcaagaagggacttgagcccacaatccatacttacaacatgatgatgaagtcatatttcgttggtgatagcaactatgcaatgggttgtgcagtgtgggaggagatgcaccagaggggtatttgccctgatgtgaactcttacacagtgttcattaatgggcatatacgacatggcaggccagaggaggcatataaatatatcgaggagatgattaataaagggatgaaagctccacaaatagactataataagtttgctgcagatttctcaaaggctgggaaaccagatatattgtttgagttggctcagaaagtgaaatttgctgggaaattagatgtatctaatgtgttctatcagtgggcagatagaatgaagagtcgggtgaagagaaatgtaccttcagattggtaatagaatgttctaagattactatgctgccagcaggaatgtggcatgctgtgatggtgcttgaaatttgattactaaggagaactgctacctttttcagtttgccattgtacggtcaactttaatataattgtgacctgacattcaaaaaaaagtgcaagatgcaaggcctaccatgtgcttatttacggttgatgtcttttaacaatcttcaaggcaaacctgtgacatgcaaaatctttcttattatcactcgttttgacttttgtgattgatgcatttatcacatcgtgttaaacatagcttgttattcacatgttgatatgtgtagctccttccttcttgtttacgtttgtttgtttctttgattaaacaagttatctgagctatttctttgtatcttttttgatgccatgacatagaaaacactacattatcaaatattcaaatgcgtagatttggtaaaagtttgactatgatattgatgatctttcgtggtctgagtggtggagtttttgcagctattcacaggctggaaagttcatgcactgccctccttgtggatacactttctgttaacaaaatgctatacagtttctttctacttaccttgtgattttgatggagctctgttcctgtggttctttgacatttgttggtctcttgagcattagttctgcaatatgcattatgctcctctattgaactctatagcccatattgtggagatcactaacatgttagtaattttacttcccatcaaactttcagttccatcgaattgtacattattgaaatgctcttctgtcttcttatactcggtattcctgtaactagatttaaacaagggtacaagacaacaaaccttaataaatgtattgcatgcagcacatgcaaatcttttggtctaccatgtgctgggtgtttccagcatggcactctgctggtatgaggctaacaaatatctactattgagtttgttagctcccgtgactctgggcactgcttcaccattttgtgactttgcacctacatagcaagggatattttttttcatgcaacccagaatctgaacgccattgcgaaaagcagggataaaatgctgctgtttcactgcaccaactaaacagagaaagaaaaggagatgagaaaactcagcatgttttgattcgactacagtctgcgcccccaagaaaccagggaacaggagtcaggactaacctccagcagctgcaaccggtactgcctctgcccactttggacgacgccaatcattcgcatgacaaggtagagcggcagcaggataccagcagcacgaaccgtcgccactgcaaccagatgccatgcgagcgtcacaatggtgaactgcacaagtcagaatccaggggacagcatggatcaggactcgtcctaaaggatggctatttttcaattcgctgcatgacttagaaccactacataccgtgatcgccagcgaccggcaccatgtggcgcattgatctgcggcgtaggagcacctggtgtaatctgcaccgtcaaccaagccctccggaggttccaaatgttgcatgtcctcgtgttcactgcacgatcacttgagaaaatttagatggttgccaatttgactggaacccagttacaagcctacttgaaagctttttttattttagattttctttccgaactttatgaaacttttgcaggttaacggttttttttttgaaagaatggttaacattctca

SEQ ID NO: 62791 - DNA, 4516 bp, Zea Mays
ccgacactccaccatcctccatggccgttaagcccacatccatcatcgccgcctccgccacagcacgccatggagaccagcaagtcgccaccgctctactcggcgccgcgggagccctctgccacgacagtgatgctgtgtccgtgcctggcgttcttcctcctcgctctcatcatcacctccatcgcactcactgtccactttcgcctctactgccacactcctcttgcccacctcatctccccgcaccgctgcccccaccacatctgacctccgtctccgcccgcatcgctggcgtggtcctgcttcccagaggcgtgttccctctgctgccgccgagatcccgatacgttatgggttcccctctcctcgcgacgccggcatgcggggcttacgacgtgctctggggcttcgcagccggaaggttcctctccatcttggctgcctccgacgaagatcagggctcgtcggagcaggaggcggctgcgagcaacccggagggcgtggaccgcgtctgcgcggccatcgcggacgtcgtcgcctccggtgccgacgcgaacctggaggcggcgctatccgcgctctcgccaccgctctgcgaagcggtcgtgctcgctgtgctccaccgcttcaagcacgcacataggccgtcctaccgcttcttcaggtgggccacagtgtccggtggctttacccacaccaccattacctactgcaagatgttacacatcttaggcaagacgaggcagttcgagtcgatggttgcgatgatccaagagatggggaaggcgggggccctgtccatggacgccttcaaggttgccattaagtccttcgctgcggctggtgagatcaagaatgcggttggcgtgttcgagttgatgagaaagaacggtttcgatgatggggtggaatcattcaattgcttgctcgttgctttagccaaagagggattaggtagggaggccaggcaggtgtttgacaaaatgcatggccagtactctccagacctgcgctcttatactgcactgatgctggcatggtgcaatgcgaggaatctggttgaggcggggcgggtttggaatgagatgctggagaagggaatggatccagatgttgttgtccacaacacaatgattgaggggttgctgcgtgggcagaggcgacccgaggccgtgaagatgtttgagctgatgaaggcaaaggggcctccaccaaatgtgtggacttacacaatgttaatccgtgaccattgtaagcaggggaagatggacatggcaatggagtgctttgaggagatgcaggaggctaaatgccaaccagatgttgctacctatacatgtttgctggttggatatgggaatgcaaaacaaatggacagagtgactgctgtgttggaggagatgacacagaagggatgcccccctgatgctcggacttacaatgcactgattaagttgctaacaaataggaatatgccagacgatgctgcaaggatatacaagaagatgatcaagaagggacttgagcccacaatccatacttacaacatgatgatgaagtcatatttcgttggtgatagcaactatgcaatgggttgtgcagtgtgggaggagatgcaccagaggggtatttgccctgatgtgaactcttacacagtgttcattaatgggcatatacgacatggcaggccagaggaggcatataaatatatcgaggagatgattaataaagggatgaaagctccacaaatagactataataagtttgctgcagatttctcaaaggctgggaaaccagatatattgtttgagttggctcagaaagtgaaatttgctgggaaattagatgtatctaatgtgttctatcagtgggcagatagaatgaagagtcgggtgaagagaaatgtaccttcagattggtaatagaatgttctaagattactatgctgccagcaggaatgtggcatgctgtgatggtgcttgaaatttgattactaaggagaactgctacctttttcagtttgccattgtcaactttaatataattgtgacctgacattcaaaaaaaagtgcaagatgcaaggcctaccatgtgcttatttacggttgatgtcttttaacaatcttcaaggcaaacctgtgacatgcaaaatctttcttattatcactcgttttgacttttgtgattgatgcatttatcacatcgtgttaaacatagcttgttattcacatgttgatatgtgtagctccttccttcttgtttacgtttgtttgtttctttgattaaacaagttatctgagctatttctttgtatcttttttgatgccatgacatagaaaacactacattatcaaatattcaaatgcgtagatttggtaaaagtttgactatgatattgatgatctttcgtggtctgagtggtggagtttttgcagctattcacaggctggaaagttcatgcactgccctccttgtggatacactttctgttaacaaaatgctatacagtttctttctacttaccttgtgattttgatggagctctgttcctgtggttctttgacatttgttggtctcttgagcattagttctgcaatatgcattatgctcctctattgaactctatagcccatattgtggagatcactaacatgttagtaattttacttcccatcaaactttcagttccatcgaattgtacattattgaaatgctcttctgtcttcttatactcggtattcctgtaactagatttaaacaagggtacaagacaacaaaccttaataaatgtattgcatgcagcacatgcaaatcttttggtctaccatgtgctgggtgtttccagcatggcactctgctggtatgaggctaacaaatatctactattgagtttgttagctcccgtgactctgggcactgcttcaccattttgtgactttggtatggttattatgtttggtgaactcaattttctatgttccaatccctgctcttagttaattcttatatctgcagtctgcaaatcttgttttctattgcttcgctcataattaatctgtttggatcactagattagtaggataaaactgaaagaaatgagaatgacatgactctgggcctgaattttgcacaagatccgactgttcatttggttcgaatctttgcgtctgaactgcatctgctggtcattgagttctttacttcttttagtactcccgtggtccttcgacagactgcacttgtgtatttcacgtgaataaatacataagcatgtgaaacctgacctggattaatgtattatcctaatttatgtcaaaaaatatctgacatcctggacgcatgatttttctaacacacagaaactgtgtgtccagagtacaagcgagatagcagtaaattgtttcttccctgtataattgactgacatcattttattatttgaggttgtcatcttgcttagtttctccacttgccactggaatggagatgaagcacggtgctctattagttatgtttttcttttcttcgttccttgaggttatattaggattttccctctaaattattgacttgctagattaaaatcatctccttgataccaccaatatcatctgtgaaaaattgataaatatgaatgtgttaacttgactccattttatcttctccttatttgagcctatattcttctttttctactgagaaaaaccaaaagcaaataagtgtaactttacattcttattgaagatatgcgataatgttctgtttgaacattccctgcagcacctacatagcaagggatattttttttcatgcaacccagaatctgaacgccattgcgaaaagcagggataaaatgctgctgtttcactgcaccaactaaacagagaaagaaaaggagatgagaaaactcagcatgttttgattcgactacagtctgcgcccccaagaaaccagggaacaggagtcaggactaacctccagcagctgcaaccggtactgcctctgcccactttggacgacgccaatcattcgcatgacaaggtagagcggcagcaggataccagcagcacgaatgctctgctgcttcagccgtcgccactgcaaccagatgccatgcgagcgtcacaatggtgaactgcacaagtcagaatccaggggacagcatggatcaggactcgtcctaaaggatggctatttttcaattcgctgcatgacttagaaccactacataccgtgatcgccagcgaccggcaccatgtggcgcattgatctgcggcgtaggagcacctggtgtaatctgcaccgtcaaccaagccctccggaggttccaaatgttgcatgtcctcgtgttcactgcacgatcacttgagaaaatttagatggttgccaatttgactggaacccagttacaagcctacttgaaagctttttttattttagattttctttccgaactttatgaaacttttgcaggttaacggttttttttttgaaagaatggttaacattctca

SEQ ID NO: 62792 - DNA, 3527 bp, Zea Mays
ccgacactccaccatcctccatggccgttaagcccacatccatcatcgccgcctccgccacagcacgccatggagaccagcaagtcgccaccgctctactcggcgccgcgggagccctctgccacgacagtgatgctgtgtccgtgcctggcgttcttcctcctcgctctcatcatcacctccatcgcactcactgtccactttcgcctctactgccacactcctcttgcccacctcatctccccgcaccgctgcccccaccacatctgacctccgtctccgcccgcatcgctggcgtggtcctgcttcccagaggcgtgttccctctgctgccgccgagatcccgatacgttatgggttcccctctcctcgcgacgccggcatgcggggcttacgacgtgctctggggcttcgcagccggaaggttcctctccatcttggctgcctccgacgaagatcagggctcgtcggagcaggaggcggctgcgagcaacccggagggcgtggaccgcgtctgcgcggccatcgcggacgtcgtcgcctccggtgccgacgcgaacctggaggcggcgctatccgcgctctcgccaccgctctgcgaagcggtcgtgctcgctgtgctccaccgcttcaagcacgcacataggccgtcctaccgcttcttcaggtgggccacagtgtccggtggctttacccacaccaccattacctactgcaagatgttacacatcttaggcaagacgaggcagttcgagtcgatggttgcgatgatccaagagatggggaaggcgggggccctgtccatggacgccttcaaggttgccattaagtccttcgctgcggctggtgagatcaagaatgcggttggcgtgttcgagttgatgagaaagaacggtttcgatgatggggtggaatcattcaattgcttgctcgttgctttagccaaagagggattaggtagggaggccaggcaggtgtttgacaaaatgcatggccagtactctccagacctgcgctcttatactgcactgatgctggcatggtgcaatgcgaggaatctggttgaggcggggcgggtttggaatgagatgctggagaagggaatggatccagatgttgttgtccacaacacaatgattgaggggttgctgcgtgggcagaggcgacccgaggccgtgaagatgtttgagctgatgaaggcaaaggggcctccaccaaatgtgtggacttacacaatgttaatccgtgaccattgtaagcaggggaagatggacatggcaatggagtgctttgaggagatgcaggaggctaaatgccaaccagatgttgctacctatacatgtttgctggttggatatgggaatgcaaaacaaatggacagagtgactgctgtgttggaggagatgacacagaagggatgcccccctgatgctcggacttacaatgcactgattaagttgctaacaaataggaatatgccagacgatgctgcaaggatatacaagaagatgatcaagaagggacttgagcccacaatccatacttacaacatgatgatgaagtcatatttcgttggtgatagcaactatgcaatgggttgtgcagtgtgggaggagatgcaccagaggggtatttgccctgatgtgaactcttacacagtgttcattaatgggcatatacgacatggcaggccagaggaggcatataaatatatcgaggagatgattaataaagggatgaaagctccacaaatagactataataagtttgctgcagatttctcaaaggctgggaaaccagatatattgtttgagttggctcagaaagtgaaatttgctgggaaattagatgtatctaatgtgttctatcagtgggcagatagaatgaagagtcgggtgaagagaaatgtaccttcagattggtaatagaatgttctaagattactatgctgccagcaggaatgtggcatgctgtgatggtgcttgaaatttgattactaaggagaactgctacctttttcagtttgccattgtcaactttaatataattgtgacctgacattcaaaaaaaagtgcaagatgcaaggcctaccatgtgcttatttacggttgatgtcttttaacaatcttcaaggcaaacctgtgacatgcaaaatctttcttattatcactcgttttgacttttgtgattgatgcatttatcacatcgtgttaaacatagcttgttattcacatgttgatatgtgtagctccttccttcttgtttacgtttgtttgtttctttgattaaacaagttatctgagctatttctttgtatcttttttgatgccatgacatagaaaacactacattatcaaatattcaaatgcgtagatttggtaaaagtttgactatgatattgatgatctttcgtggtctgagtggtggagtttttgcagctattcacaggctggaaagttcatgcactgccctccttgtggatacactttctgttaacaaaatgctatacagtttctttctacttaccttgtgattttgatggagctctgttcctgtggttctttgacatttgttggtctcttgagcattagttctgcaatatgcattatgctcctctattgaactctatagcccatattgtggagatcactaacatcacatgcaaatcttttggtctaccatgtgctgggtgtttccagcatggcactctgctggtatgaggctaacaaatatctactattgagtttgttagctcccgtgactctgggcactgcttcaccattttgtgactttgcacctacatagcaagggatattttttttcatgcaacccagaatctgaacgccattgcgaaaagcagggataaaatgctgctgtttcactgcaccaactaaacagagaaagaaaaggagatgagaaaactcagcatgttttgattcgactacagtctgcgcccccaagaaaccagggaacaggagtcaggactaacctccagcagctgcaaccggtactgcctctgcccactttggacgacgccaatcattcgcatgacaaggtagagcggcagcaggataccagcagcacgaatgctctgctgcttcagccgtcgccactgcaaccagatgccatgcgagcgtcacaatggtgaactgcacaagtcagaatccaggggacagcatggatcaggactcgtcctaaaggatggctatttttcaattcgctgcatgacttagaaccactacataccgtgatcgccagcgaccggcaccatgtggcgcattgatctgcggcgtaggagcacctggtgtaatctgcaccgtcaaccaagccctccggaggttccaaatgttgcatgtcctcgtgttcactgcacgatcacttgagaaaatttagatggttgccaatttgactggaacccagttacaagcctacttgaaagctttttttattttagattttctttccgaactttatgaaacttttgcaggttaacggttttttttttgaaagaatggttaacattctca

SEQ ID NO: 62793 - DNA, 4300 bp, Zea Mays
ccgacactccaccatcctccatggccgttaagcccacatccatcatcgccgcctccgccacagcacgccatggagaccagcaagtcgccaccgctctactcggcgccgcgggagccctctgccacgacagtgatgctgtgtccgtgcctggcgttcttcctcctcgctctcatcatcacctccatcgcactcactgtccactttcgcctctactgccacactcctcttgcccacctcatctccccgcaccgctgcccccaccacatctgacctccgtctccgcccgcatcgctggcgtggtcctgcttcccagaggcgtgttccctctgctgccgccgagatcccgatacgttatgggttcccctctcctcgcgacgccggcatgcggggcttacgacgtgctctggggcttcgcagccggaaggttcctctccatcttggctgcctccgacgaagatcagggctcgtcggagcaggaggcggctgcgagcaacccggagggcgtggaccgcgtctgcgcggccatcgcggacgtcgtcgcctccggtgccgacgcgaacctggaggcggcgctatccgcgctctcgccaccgctctgcgaagcggtcgtgctcgctgtgctccaccgcttcaagcacgcacataggccgtcctaccgcttcttcaggtgggccacagtgtccggtggctttacccacaccaccattacctactgcaagatgttacacatcttaggcaagacgaggcagttcgagtcgatggttgcgatgatccaagagatggggaaggcgggggccctgtccatggacgccttcaaggttgccattaagtccttcgctgcggctggtgagatcaagaatgcggttggcgtgttcgagttgatgagaaagaacggtttcgatgatggggtggaatcattcaattgcttgctcgttgctttagccaaagagggattaggtagggaggccaggcaggtgtttgacaaaatgcatggccagtactctccagacctgcgctcttatactgcactgatgctggcatggtgcaatgcgaggaatctggttgaggcggggcgggtttggaatgagatgctggagaagggaatggatccagatgttgttgtccacaacacaatgattgaggggttgctgcgtgggcagaggcgacccgaggccgtgaagatgtttgagctgatgaaggcaaaggggcctccaccaaatgtgtggacttacacaatgttaatccgtgaccattgtaagcaggggaagatggacatggcaatggagtgctttgaggagatgcaggaggctaaatgccaaccagatgttgctacctatacatgtttgctggttggatatgggaatgcaaaacaaatggacagagtgactgctgtgttggaggagatgacacagaagggatgcccccctgatgctcggacttacaatgcactgattaagttgctaacaaataggaatatgccagacgatgctgcaaggatatacaagaagatgatcaagaagggacttgagcccacaatccatacttacaacatgatgatgaagtcatatttcgttggtgatagcaactatgcaatgggttgtgcagtgtgggaggagatgcaccagaggggtatttgccctgatgtgaactcttacacagtgttcattaatgggcatatacgacatggcaggccagaggaggcatataaatatatcgaggagatgattaataaagggatgaaagctccacaaatagactataataagtttgctgcagatttctcaaaggctgggaaaccagatatattgtttgagttggctcagaaagtgaaatttgctgggaaattagatgtatctaatgtgttctatcagtgggcagatagaatgaagagtcgggtgaagagaaatgtaccttcagattggtaatagaatgttctaagattactatgctgccagcaggaatgtggcatgctgtgatggtgcttgaaatttgattactaaggagaactgctacctttttcagtttgccattgtacggtcaactttaatataattgtgacctgacattcaaaaaaaagtgcaagatgcaaggcctaccatgtgcttatttacggttgatgtcttttaacaatcttcaaggcaaacctgtgacatgcaaaatctttcttattatcactcgttttgacttttgtgattgatgcatttatcacatcgtgttaaacatagcttgttattcacatgttgatatgtgtagctccttccttcttgtttacgtttgtttgtttctttgattaaacaagttatctgagctatttctttgtatcttttttgatgccatgacatagaaaacactacattatcaaatattcaaatgcgtagatttggtaaaagtttgactatgatattgatgatctttcgtggtctgagtggtggagtttttgcagctattcacaggctggaaagttcatgcactgccctccttgtggatacactttctgttaacaaaatgctatacagtttctttctacttaccttgtgattttgatggagctctgttcctgtggttctttgacatttgttggtctcttgagcattagttctgcaatatgcattatgctcctctattgaactctatagcccatattgtggagatcactaacatgttagtaattttacttcccatcaaactttcagttccatcgaattgtacattattgaaatgctcttctgtcttcttatactcggtattcctgtaactagatttaaacaagggtacaagacaacaaaccttaataaatgtattgcatgcagcacatgcaaatcttttggtctaccatgtgctgggtgtttccagcatggcactctgctggtatgaggctaacaaatatctactattgagtttgttagctcccgtgactctgggcactgcttcaccattttgtgactttggtatggttattatgtttggtgaactcaattttctatgttccaatccctgctcttagttaattcttatatctgcagtctgcaaatcttgttttctattgcttcgctcataattaatctgtttggatcactagattagtaggataaaactgaaagaaatgagaatgacatgactctgggcctgaattttgcacaagatccgactgttcatttggttcgaatctttgcgtctgaactgcatctgctggtcattgagttctttacttcttttagtactcccgtggtccttcgacagactgcacttgtgtatttcacgtgaataaatacataagcatgtgaaacctgacctggattaatgtattatcctaatttatgtcaaaaaatatctgacatcctggacgcatgatttttctaacacacagaaactgtgtgtccagagtacaagcgagatagcagtaaattgtttcttccctgtataattgactgacatcattttattatttgaggttgtcatcttgcttagtttctccacttgccactggaatggagatgaagcacggtgctctattacacctacatagcaagggatattttttttcatgcaacccagaatctgaacgccattgcgaaaagcagggataaaatgctgctgtttcactgcaccaactaaacagagaaagaaaaggagatgagaaaactcagcatgttttgattcgactacagtctgcgcccccaagaaaccagggaacaggagtcaggactaacctccagcagctgcaaccggtactgcctctgcccactttggacgacgccaatcattcgcatgacaaggtagagcggcagcaggataccagcagcacgaagtaagtacatctgcaaagaaacataacctcggcttttagttcatcgaatcagtgctctgctgcttcagccgtcgccactgcaaccagatgccatgcgagcgtcacaatggtgaactgcacaagtcagaatccaggggacagcatggatcaggactcgtcctaaaggatggctatttttcaattcgctgcatgacttagaaccactacataccgtgatcgccagcgaccggcaccatgtggcgcattgatctgcggcgtaggagcacctggtgtaatctgcaccgtcaaccaagccctccggaggttccaaatgttgcatgtcctcgtgttcactgcacgatcacttgagaaaatttagatggttgccaatttgactggaacccagttacaagcctacttgaaagctttttttattttagattttctttccgaactttatgaaacttttgcaggttaacggttttttttttgaaagaatggttaacattctca

SEQ ID NO: 62794 - DNA, 3430 bp, Zea Mays
ccgacactccaccatcctccatggccgttaagcccacatccatcatcgccgcctccgccacagcacgccatggagaccagcaagtcgccaccgctctactcggcgccgcgggagccctctgccacgacagtgatgctgtgtccgtgcctggcgttcttcctcctcgctctcatcatcacctccatcgcactcactgtccactttcgcctctactgccacactcctcttgcccacctcatctccccgcaccgctgcccccaccacatctgacctccgtctccgcccgcatcgctggcgtggtcctgcttcccagaggcgtgttccctctgctgccgccgagatcccgatacgttatgggttcccctctcctcgcgacgccggcatgcggggcttacgacgtgctctggggcttcgcagccggaaggttcctctccatcttggctgcctccgacgaagatcagggctcgtcggagcaggaggcggctgcgagcaacccggagggcgtggaccgcgtctgcgcggccatcgcggacgtcgtcgcctccggtgccgacgcgaacctggaggcggcgctatccgcgctctcgccaccgctctgcgaagcggtcgtgctcgctgtgctccaccgcttcaagcacgcacataggccgtcctaccgcttcttcaggtgggccacagtgtccggtggctttacccacaccaccattacctactgcaagatgttacacatcttaggcaagacgaggcagttcgagtcgatggttgcgatgatccaagagatggggaaggcgggggccctgtccatggacgccttcaaggttgccattaagtccttcgctgcggctggtgagatcaagaatgcggttggcgtgttcgagttgatgagaaagaacggtttcgatgatggggtggaatcattcaattgcttgctcgttgctttagccaaagagggattaggtagggaggccaggcaggtgtttgacaaaatgcatggccagtactctccagacctgcgctcttatactgcactgatgctggcatggtgcaatgcgaggaatctggttgaggcggggcgggtttggaatgagatgctggagaagggaatggatccagatgttgttgtccacaacacaatgattgaggggttgctgcgtgggcagaggcgacccgaggccgtgaagatgtttgagctgatgaaggcaaaggggcctccaccaaatgtgtggacttacacaatgttaatccgtgaccattgtaagcaggggaagatggacatggcaatggagtgctttgaggagatgcaggaggctaaatgccaaccagatgttgctacctatacatgtttgctggttggatatgggaatgcaaaacaaatggacagagtgactgctgtgttggaggagatgacacagaagggatgcccccctgatgctcggacttacaatgcactgattaagttgctaacaaataggaatatgccagacgatgctgcaaggatatacaagaagatgatcaagaagggacttgagcccacaatccatacttacaacatgatgatgaagtcatatttcgttggtgatagcaactatgcaatgggttgtgcagtgtgggaggagatgcaccagaggggtatttgccctgatgtgaactcttacacagtgttcattaatgggcatatacgacatggcaggccagaggaggcatataaatatatcgaggagatgattaataaagggatgaaagctccacaaatagactataataagtttgctgcagatttctcaaaggctgggaaaccagatatattgtttgagttggctcagaaagtgaaatttgctgggaaattagatgtatctaatgtgttctatcagtgggcagatagaatgaagagtcgggtgaagagaaatgtaccttcagattggtaatagaatgttctaagattactatgctgccagcaggaatgtggcatgctgtgatggtgcttgaaatttgattactaaggagaactgctacctttttcagtttgccattgtacggtcaactttaatataattgtgacctgacattcaaaaaaaagtgcaagatgcaaggcctaccatgtgcttatttacggttgatgtcttttaacaatcttcaaggcaaacctgtgacatgcaaaatctttcttattatcactcgttttgacttttgtgattgatgcatttatcacatcgtgttaaacatagcttgttattcacatgttgatatgtgtagctccttccttcttgtttacgtttgtttgtttctttgattaaacaagttatctgagctatttctttgtatcttttttgatgccatgacatagaaaacactacattatcaaatattcaaatgcgtagatttggtaaaagtttgactatgatattgatgatctttcgtggtctgagtggtggagtttttgcagctattcacaggctggaaagttcatgcactgccctccttgtggatacactttctgttaacaaaatgctatacagtttctttctacttaccttgtgattttgatggagctctgttcctgtggttctttgacatttgttggtctcttgagcattagttctgcaatatgcattatgctcctctattgaactctatagcccatattgtggagatcactaacatcacctacatagcaagggatattttttttcatgcaacccagaatctgaacgccattgcgaaaagcagggataaaatgctgctgtttcactgcaccaactaaacagagaaagaaaaggagatgagaaaactcagcatgttttgattcgactacagtctgcgcccccaagaaaccagggaacaggagtcaggactaacctccagcagctgcaaccggtactgcctctgcccactttggacgacgccaatcattcgcatgacaaggtagagcggcagcaggataccagcagcacgaagtaagtacatctgcaaagaaacataacctcggcttttagttcatcgaatcagccgtcgccactgcaaccagatgccatgcgagcgtcacaatggtgaactgcacaagtcagaatccaggggacagcatggatcaggactcgtcctaaaggatggctatttttcaattcgctgcatgacttagaaccactacataccgtgatcgccagcgaccggcaccatgtggcgcattgatctgcggcgtaggagcacctggtgtaatctgcaccgtcaaccaagccctccggaggttccaaatgttgcatgtcctcgtgttcactgcacgatcacttgagaaaatttagatggttgccaatttgactggaacccagttacaagcctacttgaaagctttttttattttagattttctttccgaactttatgaaacttttgcaggttaacggttttttttttgaaagaatggttaacattctca

SEQ ID NO: 62795 - DNA, 3394 bp, Zea Mays
ccgacactccaccatcctccatggccgttaagcccacatccatcatcgccgcctccgccacagcacgccatggagaccagcaagtcgccaccgctctactcggcgccgcgggagccctctgccacgacagtgatgctgtgtccgtgcctggcgttcttcctcctcgctctcatcatcacctccatcgcactcactgtccactttcgcctctactgccacactcctcttgcccacctcatctccccgcaccgctgcccccaccacatctgacctccgtctccgcccgcatcgctggcgtggtcctgcttcccagaggcgtgttccctctgctgccgccgagatcccgatacgttatgggttcccctctcctcgcgacgccggcatgcggggcttacgacgtgctctggggcttcgcagccggaaggttcctctccatcttggctgcctccgacgaagatcagggctcgtcggagcaggaggcggctgcgagcaacccggagggcgtggaccgcgtctgcgcggccatcgcggacgtcgtcgcctccggtgccgacgcgaacctggaggcggcgctatccgcgctctcgccaccgctctgcgaagcggtcgtgctcgctgtgctccaccgcttcaagcacgcacataggccgtcctaccgcttcttcaggtgggccacagtgtccggtggctttacccacaccaccattacctactgcaagatgttacacatcttaggcaagacgaggcagttcgagtcgatggttgcgatgatccaagagatggggaaggcgggggccctgtccatggacgccttcaaggttgccattaagtccttcgctgcggctggtgagatcaagaatgcggttggcgtgttcgagttgatgagaaagaacggtttcgatgatggggtggaatcattcaattgcttgctcgttgctttagccaaagagggattaggtagggaggccaggcaggtgtttgacaaaatgcatggccagtactctccagacctgcgctcttatactgcactgatgctggcatggtgcaatgcgaggaatctggttgaggcggggcgggtttggaatgagatgctggagaagggaatggatccagatgttgttgtccacaacacaatgattgaggggttgctgcgtgggcagaggcgacccgaggccgtgaagatgtttgagctgatgaaggcaaaggggcctccaccaaatgtgtggacttacacaatgttaatccgtgaccattgtaagcaggggaagatggacatggcaatggagtgctttgaggagatgcaggaggctaaatgccaaccagatgttgctacctatacatgtttgctggttggatatgggaatgcaaaacaaatggacagagtgactgctgtgttggaggagatgacacagaagggatgcccccctgatgctcggacttacaatgcactgattaagttgctaacaaataggaatatgccagacgatgctgcaaggatatacaagaagatgatcaagaagggacttgagcccacaatccatacttacaacatgatgatgaagtcatatttcgttggtgatagcaactatgcaatgggttgtgcagtgtgggaggagatgcaccagaggggtatttgccctgatgtgaactcttacacagtgttcattaatgggcatatacgacatggcaggccagaggaggcatataaatatatcgaggagatgattaataaagggatgaaagctccacaaatagactataataagtttgctgcagatttctcaaaggctgggaaaccagatatattgtttgagttggctcagaaagtgaaatttgctgggaaattagatgtatctaatgtgttctatcagtgggcagatagaatgaagagtcgggtgaagagaaatgtaccttcagattggtaatagaatgttctaagattactatgctgccagcaggaatgtggcatgctgtgatggtgcttgaaatttgattactaaggagaactgctacctttttcagtttgccattgtacggtcaactttaatataattgtgacctgacattcaaaaaaaagtgcaagatgcaaggcctaccatgtgcttatttacggttgatgtcttttaacaatcttcaaggcaaacctgtgacatgcaaaatctttcttattatcactcgttttgacttttgtgattgatgcatttatcacatcgtgttaaacatagcttgttattcacatgttgatatgtgtagctccttccttcttgtttacgtttgtttgtttctttgattaaacaagttatctgagctatttctttgtatcttttttgatgccatgacatagaaaacactacattatcaaatattcaaatgcgtagatttggtaaaagtttgactatgatattgatgatctttcgtggtctgagtggtggagtttttgcagctattcacaggctggaaagttcatgcactgccctccttgtggatacactttctgttaacaaaatgctatacagtttctttctacttaccttgtgattttgatggagctctgttcctgtggttctttgacatttgttggtctcttgagcattagttctgcaatatgcattatgctcctctattgaactctatagcccatattgtggagatcactaacatcacctacatagcaagggatattttttttcatgcaacccagaatctgaacgccattgcgaaaagcagggataaaatgctgctgtttcactgcaccaactaaacagagaaagaaaaggagatgagaaaactcagcatgttttgattcgactacagtctgcgcccccaagaaaccagggaacaggagtcaggactaacctccagcagctgcaaccggtactgcctctgcccactttggacgacgccaatcattcgcatgacaaggtagagcggcagcaggataccagcagcacgaatgctctgctgcttcagccgtcgccactgcaaccagatgccatgcgagcgtcacaatggtgaactgcacaagtcagaatccaggggacagcatggatcaggactcgtcctaaaggatggctatttttcaattcgctgcatgacttagaaccactacataccgtgatcgccagcgaccggcaccatgtggcgcattgatctgcggcgtaggagcacctggtgtaatctgcaccgtcaaccaagccctccggaggttccaaatgttgcatgtcctcgtgttcactgcacgatcacttgagaaaatttagatggttgccaatttgactggaacccagttacaagcctacttgaaagctttttttattttagattttctttccgaactttatgaaacttttgcaggttaacggttttttttttgaaagaatggttaacattctca

SEQ ID NO: 62796 - DNA, 3583 bp, Zea Mays
ccgacactccaccatcctccatggccgttaagcccacatccatcatcgccgcctccgccacagcacgccatggagaccagcaagtcgccaccgctctactcggcgccgcgggagccctctgccacgacagtgatgctgtgtccgtgcctggcgttcttcctcctcgctctcatcatcacctccatcgcactcactgtccactttcgcctctactgccacactcctcttgcccacctcatctccccgcaccgctgcccccaccacatctgacctccgtctccgcccgcatcgctggcgtggtcctgcttcccagaggcgtgttccctctgctgccgccgagatcccgatacgttatgggttcccctctcctcgcgacgccggcatgcggggcttacgacgtgctctggggcttcgcagccggaaggttcctctccatcttggctgcctccgacgaagatcagggctcgtcggagcaggaggcggctgcgagcaacccggagggcgtggaccgcgtctgcgcggccatcgcggacgtcgtcgcctccggtgccgacgcgaacctggaggcggcgctatccgcgctctcgccaccgctctgcgaagcggtcgtgctcgctgtgctccaccgcttcaagcacgcacataggccgtcctaccgcttcttcaggtgggccacagtgtccggtggctttacccacaccaccattacctactgcaagatgttacacatcttaggcaagacgaggcagttcgagtcgatggttgcgatgatccaagagatggggaaggcgggggccctgtccatggacgccttcaaggttgccattaagtccttcgctgcggctggtgagatcaagaatgcggttggcgtgttcgagttgatgagaaagaacggtttcgatgatggggtggaatcattcaattgcttgctcgttgctttagccaaagagggattaggtagggaggccaggcaggtgtttgacaaaatgcatggccagtactctccagacctgcgctcttatactgcactgatgctggcatggtgcaatgcgaggaatctggttgaggcggggcgggtttggaatgagatgctggagaagggaatggatccagatgttgttgtccacaacacaatgattgaggggttgctgcgtgggcagaggcgacccgaggccgtgaagatgtttgagctgatgaaggcaaaggggcctccaccaaatgtgtggacttacacaatgttaatccgtgaccattgtaagcaggggaagatggacatggcaatggagtgctttgaggagatgcaggaggctaaatgccaaccagatgttgctacctatacatgtttgctggttggatatgggaatgcaaaacaaatggacagagtgactgctgtgttggaggagatgacacagaagggatgcccccctgatgctcggacttacaatgcactgattaagttgctaacaaataggaatatgccagacgatgctgcaaggatatacaagaagatgatcaagaagggacttgagcccacaatccatacttacaacatgatgatgaagtcatatttcgttggtgatagcaactatgcaatgggttgtgcagtgtgggaggagatgcaccagaggggtatttgccctgatgtgaactcttacacagtgttcattaatgggcatatacgacatggcaggccagaggaggcatataaatatatcgaggagatgattaataaagggatgaaagctccacaaatagactataataagtttgctgcagatttctcaaaggctgggaaaccagatatattgtttgagttggctcagaaagtgaaatttgctgggaaattagatgtatctaatgtgttctatcagtgggcagatagaatgaagagtcgggtgaagagaaatgtaccttcagattggtaatagaatgttctaagattactatgctgccagcaggaatgtggcatgctgtgatggtgcttgaaatttgattactaaggagaactgctacctttttcagtttgccattgtacggtcaactttaatataattgtgacctgacattcaaaaaaaagtgcaagatgcaaggcctaccatgtgcttatttacggttgatgtcttttaacaatcttcaaggcaaacctgtgacatgcaaaatctttcttattatcactcgttttgacttttgtgattgatgcatttatcacatcgtgttaaacatagcttgttattcacatgttgatatgtgtagctccttccttcttgtttacgtttgtttgtttctttgattaaacaagttatctgagctatttctttgtatcttttttgatgccatgacatagaaaacactacattatcaaatattcaaatgcgtagatttggtaaaagtttgactatgatattgatgatctttcgtggtctgagtggtggagtttttgcagctattcacaggctggaaagttcatgcactgccctccttgtggatacactttctgttaacaaaatgctatacagtttctttctacttaccttgtgattttgatggagctctgttcctgtggttctttgacatttgttggtctcttgagcattagttctgcaatatgcattatgctcctctattgaactctatagcccatattgtggagatcactaacatatttaaacaagggtacaagacaacaaaccttaataaatgtattgcatgcagcacatgcaaatcttttggtctaccatgtgctgggtgtttccagcatggcactctgctggtatgaggctaacaaatatctactattgagtttgttagctcccgtgactctgggcactgcttcaccattttgtgactttgcacctacatagcaagggatattttttttcatgcaacccagaatctgaacgccattgcgaaaagcagggataaaatgctgctgtttcactgcaccaactaaacagagaaagaaaaggagatgagaaaactcagcatgttttgattcgactacagtctgcgcccccaagaaaccagggaacaggagtcaggactaacctccagcagctgcaaccggtactgcctctgcccactttggacgacgccaatcattcgcatgacaaggtagagcggcagcaggataccagcagcacgaatgctctgctgcttcagccgtcgccactgcaaccagatgccatgcgagcgtcacaatggtgaactgcacaagtcagaatccaggggacagcatggatcaggactcgtcctaaaggatggctatttttcaattcgctgcatgacttagaaccactacataccgtgatcgccagcgaccggcaccatgtggcgcattgatctgcggcgtaggagcacctggtgtaatctgcaccgtcaaccaagccctccggaggttccaaatgttgcatgtcctcgtgttcactgcacgatcacttgagaaaatttagatggttgccaatttgactggaacccagttacaagcctacttgaaagctttttttattttagattttctttccgaactttatgaaacttttgcaggttaacggttttttttttgaaagaatggttaacattctca

SEQ ID NO: 62797 - DNA, 4407 bp, Zea Mays
ccgacactccaccatcctccatggccgttaagcccacatccatcatcgccgcctccgccacagcacgccatggagaccagcaagtcgccaccgctctactcggcgccgcgggagccctctgccacgacagtgatgctgtgtccgtgcctggcgttcttcctcctcgctctcatcatcacctccatcgcactcactgtccactttcgcctctactgccacactcctcttgcccacctcatctccccgcaccgctgcccccaccacatctgacctccgtctccgcccgcatcgctggcgtggtcctgcttcccagaggcgtgttccctctgctgccgccgagatcccgatacgttatgggttcccctctcctcgcgacgccggcatgcggggcttacgacgtgctctggggcttcgcagccggaaggttcctctccatcttggctgcctccgacgaagatcagggctcgtcggagcaggaggcggctgcgagcaacccggagggcgtggaccgcgtctgcgcggccatcgcggacgtcgtcgcctccggtgccgacgcgaacctggaggcggcgctatccgcgctctcgccaccgctctgcgaagcggtcgtgctcgctgtgctccaccgcttcaagcacgcacataggccgtcctaccgcttcttcaggtgggccacagtgtccggtggctttacccacaccaccattacctactgcaagatgttacacatcttaggcaagacgaggcagttcgagtcgatggttgcgatgatccaagagatggggaaggcgggggccctgtccatggacgccttcaaggttgccattaagtccttcgctgcggctggtgagatcaagaatgcggttggcgtgttcgagttgatgagaaagaacggtttcgatgatggggtggaatcattcaattgcttgctcgttgctttagccaaagagggattaggtagggaggccaggcaggtgtttgacaaaatgcatggccagtactctccagacctgcgctcttatactgcactgatgctggcatggtgcaatgcgaggaatctggttgaggcggggcgggtttggaatgagatgctggagaagggaatggatccagatgttgttgtccacaacacaatgattgaggggttgctgcgtgggcagaggcgacccgaggccgtgaagatgtttgagctgatgaaggcaaaggggcctccaccaaatgtgtggacttacacaatgttaatccgtgaccattgtaagcaggggaagatggacatggcaatggagtgctttgaggagatgcaggaggctaaatgccaaccagatgttgctacctatacatgtttgctggttggatatgggaatgcaaaacaaatggacagagtgactgctgtgttggaggagatgacacagaagggatgcccccctgatgctcggacttacaatgcactgattaagttgctaacaaataggaatatgccagacgatgctgcaaggatatacaagaagatgatcaagaagggacttgagcccacaatccatacttacaacatgatgatgaagtcatatttcgttggtgatagcaactatgcaatgggttgtgcagtgtgggaggagatgcaccagaggggtatttgccctgatgtgaactcttacacagtgttcattaatgggcatatacgacatggcaggccagaggaggcatataaatatatcgaggagatgattaataaagggatgaaagctccacaaatagactataataagtttgctgcagatttctcaaaggctgggaaaccagatatattgtttgagttggctcagaaagtgaaatttgctgggaaattagatgtatctaatgtgttctatcagtgggcagatagaatgaagagtcgggtgaagagaaatgtaccttcagattggtaatagaatgttctaagattactatgctgccagcaggaatgtggcatgctgtgatggtgcttgaaatttgattactaaggagaactgctacctttttcagtttgccattgtacggtcaactttaatataattgtgacctgacattcaaaaaaaagtgcaagatgcaaggcctaccatgtgcttatttacggttgatgtcttttaacaatcttcaaggcaaacctgtgacatgcaaaatctttcttattatcactcgttttgacttttgtgattgatgcatttatcacatcgtgttaaacatagcttgttattcacatgttgatatgtgtagctccttccttcttgtttacgtttgtttgtttctttgattaaacaagttatctgagctatttctttgtatcttttttgatgccatgacatagaaaacactacattatcaaatattcaaatgcgtagatttggtaaaagtttgactatgatattgatgatctttcgtggtctgagtggtggagtttttgcagctattcacaggctggaaagttcatgcactgccctccttgtggatacactttctgttaacaaaatgctatacagtttctttctacttaccttgtgattttgatggagctctgttcctgtggttctttgacatttgttggtctcttgagcattagttctgcaatatgcattatgctcctctattgaactctatagcccatattgtggagatcactaacatatttaaacaagggtacaagacaacaaaccttaataaatgtattgcatgcagcacatgcaaatcttttggtctaccatgtgctgggtgtttccagcatggcactctgctggtatgaggctaacaaatatctactattgagtttgttagctcccgtgactctgggcactgcttcaccattttgtgactttggtatggttattatgtttggtgaactcaattttctatgttccaatccctgctcttagttaattcttatatctgcagtctgcaaatcttgttttctattgcttcgctcataattaatctgtttggatcactagattagtaggataaaactgaaagaaatgagaatgacatgactctgggcctgaattttgcacaagatccgactgttcatttggttcgaatctttgcgtctgaactgcatctgctggtcattgagttctttacttcttttagtactcccgtggtccttcgacagactgcacttgtgtatttcacgtgaataaatacataagcatgtgaaacctgacctggattaatgtattatcctaatttatgtcaaaaaatatctgacatcctggacgcatgatttttctaacacacagaaactgtgtgtccagagtacaagcgagatagcagtaaattgtttcttccctgtataattgactgacatcattttattatttgaggttgtcatcttgcttagtttctccacttgccactggaatggagatgaagcacggtgctctattagttatgtttttcttttcttcgttccttgaggttatattaggattttccctctaaattattgacttgctagattaaaatcatctccttgataccaccaatatcatctgtgaaaaattgataaatatgaatgtgttaacttgactccattttatcttctccttatttgagcctatattcttctttttctactgagaaaaaccaaaagcaaataagtgtaactttacattcttattgaagatatgcgataatgttctgtttgaacattccctgcagcacctacatagcaagggatattttttttcatgcaacccagaatctgaacgccattgcgaaaagcagggataaaatgctgctgtttcactgcaccaactaaacagagaaagaaaaggagatgagaaaactcagcatgttttgattcgactacagtctgcgcccccaagaaaccagggaacaggagtcaggactaacctccagcagctgcaaccggtactgcctctgcccactttggacgacgccaatcattcgcatgacaaggtagagcggcagcaggataccagcagcacgaaccgtcgccactgcaaccagatgccatgcgagcgtcacaatggtgaactgcacaagtcagaatccaggggacagcatggatcaggactcgtcctaaaggatggctatttttcaattcgctgcatgacttagaaccactacataccgtgatcgccagcgaccggcaccatgtggcgcattgatctgcggcgtaggagcacctggtgtaatctgcaccgtcaaccaagccctccggaggttccaaatgttgcatgtcctcgtgttcactgcacgatcacttgagaaaatttagatggttgccaatttgactggaacccagttacaagcctacttgaaagctttttttattttagattttctttccgaactttatgaaacttttgcaggttaacggttttttttttgaaagaatggttaacattctca

SEQ ID NO: 62798 - DNA, 3107 bp, Zea Mays
gccgacactccaccatcctccatggccgttaagcccacatccatcatcgccgcctccgccacagcacgccatggagaccagcaagtcgccaccgctctactcggcgccgcgggagccctctgccacgacagtgatgctgtgtccgtgcctggcgttcttcctcctcgctctcatcatcacctccatcgcactcactgtccactttcgcctctactgccacactcctcttgcccacctcatctccccgcaccgctgcccccaccacatctgacctccgtctccgcccgcatcgctggcgtggtcctgcttcccagaggcgtgttccctctgctgccgccgagatcccgatacgttatgggttcccctctcctcgcgacgccggcatgcggggcttacgacgtgctctggggcttcgcagccggaaggttcctctccatcttggctgcctccgacgaagatcagggctcgtcggagcaggaggcggctgcgagcaacccggagggcgtggaccgcgtctgcgcggccatcgcggacgtcgtcgcctccggtgccgacgcgaacctggaggcggcgctatccgcgctctcgccaccgctctgcgaagcggtcgtgctcgctgtgctccaccgcttcaagcacgcacataggccgtcctaccgcttcttcaggtcaactttaatataattgtgacctgacattcaaaaaaaagtgcaagatgcaaggcctaccatgtgcttatttacggttgatgtcttttaacaatcttcaaggcaaacctgtgacatgcaaaatctttcttattatcactcgttttgacttttgtgattgatgcatttatcacatcgtgttaaacatagcttgttattcacatgttgatatgtgtagctccttccttcttgtttacgtttgtttgtttctttgattaaacaagttatctgagctatttctttgtatcttttttgatgccatgacatagaaaacactacattatcaaatattcaaatgcgtagatttggtaaaagtttgactatgatattgatgatctttcgtggtctgagtggtggagtttttgcagctattcacaggctggaaagttcatgcactgccctccttgtggatacactttctgttaacaaaatgctatacagtttctttctacttaccttgtgattttgatggagctctgttcctgtggttctttgacatttgttggtctcttgagcattagttctgcaatatgcattatgctcctctattgaactctatagcccatattgtggagatcactaacatatttaaacaagggtacaagacaacaaaccttaataaatgtattgcatgcagcacatgcaaatcttttggtctaccatgtgctgggtgtttccagcatggcactctgctggtatgaggctaacaaatatctactattgagtttgttagctcccgtgactctgggcactgcttcaccattttgtgactttggtatggttattatgtttggtgaactcaattttctatgttccaatccctgctcttagttaattcttatatctgcagtctgcaaatcttgttttctattgcttcgctcataattaatctgtttggatcactagattagtaggataaaactgaaagaaatgagaatgacatgactctgggcctgaattttgcacaagatccgactgttcatttggttcgaatctttgcgtctgaactgcatctgctggtcattgagttctttacttcttttagtactcccgtggtccttcgacagactgcacttgtgtatttcacgtgaataaatacataagcatgtgaaacctgacctggattaatgtattatcctaatttatgtcaaaaaatatctgacatcctggacgcatgatttttctaacacacagaaactgtgtgtccagagtacaagcgagatagcagtaaattgtttcttccctgtataattgactgacatcattttattatttgaggttgtcatcttgcttagtttctccacttgccactggaatggagatgaagcacggtgctctattagttatgtttttcttttcttcgttccttgaggttatattaggattttccctctaaattattgacttgctagattaaaatcatctccttgataccaccaatatcatctgtgaaaaattgataaatatgaatgtgttaacttgactccattttatcttctccttatttgagcctatattcttctttttctactgagaaaaaccaaaagcaaataagtgtaactttacattcttattgaagatatgcgataatgttctgtttgaacattccctgcagcacctacatagcaagggatattttttttcatgcaacccagaatctgaacgccattgcgaaaagcagggataaaatgctgctgtttcactgcaccaactaaacagagaaagaaaaggagatgagaaaactcagcatgttttgattcgactacagtctgcgcccccaagaaaccagggaacaggagtcaggactaacctccagcagctgcaaccggtactgcctctgcccactttggacgacgccaatcattcgcatgacaaggtagagcggcagcaggataccagcagcacgaagtaagtacatctgcaaagaaacataacctcggcttttagttcatcgaatcagtgctctgctgcttcagccgtcgccactgcaaccagatgccatgcgagcgtcacaatggtgaactgcacaagtcagaatccaggggacagcatggatcaggactcgtcctaaaggatggctatttttcaattcgctgcatgacttagaaccactacataccgtgatcgccagcgaccggcaccatgtggcgcattgatctgcggcgtaggagcacctggtgtaatctgcaccgtcaaccaagccctccggaggttccaaatgttgcatgtcctcgtgttcactgcacgatcacttgagaaaatttagatggttgccaatttgactggaacccagttacaagcctacttgaaagctttttttattttagattttctttccgaactttatgaaacttttgcaggttaacggttttttttttgaaagaatggttaacattctca

SEQ ID NO: 62799 - DNA, 4522 bp, Zea Mays
gccgacactccaccatcctccatggccgttaagcccacatccatcatcgccgcctccgccacagcacgccatggagaccagcaagtcgccaccgctctactcggcgccgcgggagccctctgccacgacagtgatgctgtgtccgtgcctggcgttcttcctcctcgctctcatcatcacctccatcgcactcactgtccactttcgcctctactgccacactcctcttgcccacctcatctccccgcaccgctgcccccaccacatctgacctccgtctccgcccgcatcgctggcgtggtcctgcttcccagaggcgtgttccctctgctgccgccgagatcccgatacgttatgggttcccctctcctcgcgacgccggcatgcggggcttacgacgtgctctggggcttcgcagccggaaggttcctctccatcttggctgcctccgacgaagatcagggctcgtcggagcaggaggcggctgcgagcaacccggagggcgtggaccgcgtctgcgcggccatcgcggacgtcgtcgcctccggtgccgacgcgaacctggaggcggcgctatccgcgctctcgccaccgctctgcgaagcggtcgtgctcgctgtgctccaccgcttcaagcacgcacataggccgtcctaccgcttcttcaggtgggccacagtgtccggtggctttacccacaccaccattacctactgcaagatgttacacatcttaggcaagacgaggcagttcgagtcgatggttgcgatgatccaagagatggggaaggcgggggccctgtccatggacgccttcaaggttgccattaagtccttcgctgcggctggtgagatcaagaatgcggttggcgtgttcgagttgatgagaaagaacggtttcgatgatggggtggaatcattcaattgcttgctcgttgctttagccaaagagggattaggtagggaggccaggcaggtgtttgacaaaatgcatggccagtactctccagacctgcgctcttatactgcactgatgctggcatggtgcaatgcgaggaatctggttgaggcggggcgggtttggaatgagatgctggagaagggaatggatccagatgttgttgtccacaacacaatgattgaggggttgctgcgtgggcagaggcgacccgaggccgtgaagatgtttgagctgatgaaggcaaaggggcctccaccaaatgtgtggacttacacaatgttaatccgtgaccattgtaagcaggggaagatggacatggcaatggagtgctttgaggagatgcaggaggctaaatgccaaccagatgttgctacctatacatgtttgctggttggatatgggaatgcaaaacaaatggacagagtgactgctgtgttggaggagatgacacagaagggatgcccccctgatgctcggacttacaatgcactgattaagttgctaacaaataggaatatgccagacgatgctgcaaggatatacaagaagatgatcaagaagggacttgagcccacaatccatacttacaacatgatgatgaagtcatatttcgttggtgatagcaactatgcaatgggttgtgcagtgtgggaggagatgcaccagaggggtatttgccctgatgtgaactcttacacagtgttcattaatgggcatatacgacatggcaggccagaggaggcatataaatatatcgaggagatgattaataaagggatgaaagctccacaaatagactataataagtttgctgcagatttctcaaaggctgggaaaccagatatattgtttgagttggctcagaaagtgaaatttgctgggaaattagatgtatctaatgtgttctatcagtgggcagatagaatgaagagtcgggtgaagagaaatgtaccttcagattggtaatagaatgttctaagattactatgctgccagcaggaatgtggcatgctgtgatggtgcttgaaatttgattactaaggagaactgctacctttttcagtttgccattgtacggtcaactttaatataattgtgacctgacattcaaaaaaaagtgcaagatgcaaggcctaccatgtgcttatttacggttgatgtcttttaacaatcttcaaggcaaacctgtgacatgcaaaatctttcttattatcactcgttttgacttttgtgattgatgcatttatcacatcgtgttaaacatagcttgttattcacatgttgatatgtgtagctccttccttcttgtttacgtttgtttgtttctttgattaaacaagttatctgagctatttctttgtatcttttttgatgccatgacatagaaaacactacattatcaaatattcaaatgcgtagatttggtaaaagtttgactatgatattgatgatctttcgtggtctgagtggtggagtttttgcagctattcacaggctggaaagttcatgcactgccctccttgtggatacactttctgttaacaaaatgctatacagtttctttctacttaccttgtgattttgatggagctctgttcctgtggttctttgacatttgttggtctcttgagcattagttctgcaatatgcattatgctcctctattgaactctatagcccatattgtggagatcactaacatgttagtaattttacttcccatcaaactttcagttccatcgaattgtacattattgaaatgctcttctgtcttcttatactcggtattcctgtaactagatttaaacaagggtacaagacaacaaaccttaataaatgtattgcatgcagcacatgcaaatcttttggtctaccatgtgctgggtgtttccagcatggcactctgctggtatgaggctaacaaatatctactattgagtttgttagctcccgtgactctgggcactgcttcaccattttgtgactttggtatggttattatgtttggtgaactcaattttctatgttccaatccctgctcttagttaattcttatatctgcagtctgcaaatcttgttttctattgcttcgctcataattaatctgtttggatcactagattagtaggataaaactgaaagaaatgagaatgacatgactctgggcctgaattttgcacaagatccgactgttcatttggttcgaatctttgcgtctgaactgcatctgctggtcattgagttctttacttcttttagtactcccgtggtccttcgacagactgcacttgtgtatttcacgtgaataaatacataagcatgtgaaacctgacctggattaatgtattatcctaatttatgtcaaaaaatatctgacatcctggacgcatgatttttctaacacacagaaactgtgtgtccagagtacaagcgagatagcagtaaattgtttcttccctgtataattgactgacatcattttattatttgaggttgtcatcttgcttagtttctccacttgccactggaatggagatgaagcacggtgctctattagttatgtttttcttttcttcgttccttgaggttatattaggattttccctctaaattattgacttgctagattaaaatcatctccttgataccaccaatatcatctgtgaaaaattgataaatatgaatgtgttaacttgactccattttatcttctccttatttgagcctatattcttctttttctactgagaaaaaccaaaagcaaataagtgtaactttacattcttattgaagatatgcgataatgttctgtttgaacattccctgcagcacctacatagcaagggatattttttttcatgcaacccagaatctgaacgccattgcgaaaagcagggataaaatgctgctgtttcactgcaccaactaaacagagaaagaaaaggagatgagaaaactcagcatgttttgattcgactacagtctgcgcccccaagaaaccagggaacaggagtcaggactaacctccagcagctgcaaccggtactgcctctgcccactttggacgacgccaatcattcgcatgacaaggtagagcggcagcaggataccagcagcacgaatgctctgctgcttcagccgtcgccactgcaaccagatgccatgcgagcgtcacaatggtgaactgcacaagtcagaatccaggggacagcatggatcaggactcgtcctaaaggatggctatttttcaattcgctgcatgacttagaaccactacataccgtgatcgccagcgaccggcaccatgtggcgcattgatctgcggcgtaggagcacctggtgtaatctgcaccgtcaaccaagccctccggaggttccaaatgttgcatgtcctcgtgttcactgcacgatcacttgagaaaatttagatggttgccaatttgactggaacccagttacaagcctacttgaaagctttttttattttagattttctttccgaactttatgaaacttttgcaggttaacggttttttttttgaaagaatggttaacattctca

SEQ ID NO: 62800 - DNA, 1346 bp, Zea Mays
tgtcactggaagtaggcattcaggcacctatatgtaatagctacagagcctcgatggattcagacagtggacattgacacagaacttccagtgtattgtccattggaagtgacagttgctgaaacggattattatgatgagaccaactattgtgaggtgacaccttgtcttctgccagaacgctcagtgcttaaaagcattcgagtttgtgggcctagatattggcctcaggtgataaaacttgcacctgaagacaagccatggtggagatctggagacaagacaaatccattcaatgggggagtactctacataaagcgaaaagttggatcttgctcctactctgacgatccaattggatgtcaatcgttaatttcacgggcaatgcatgaggtctgtgatgcaccatctgctagttgcagtaatcaaccaaacagcactaatggtagctacttcagagttgatcagctagtaagcactttctcggccaatccaagcttgattgcttttgcaaaactctgctccgtgtcatggaagagcagatgcaatagcaattttcaggagttctgttctcaagtgctatatgaatgtatgagcaaagatagaccatcactgttacaggtcgctttggcctacaacgaagcattagttgattctagaatcacaaatggaggaattattcattcgacattcttggagtcacttatgaagcgagtgggagacatctttgcggagctgccaaacctcaaggacaacctccaccgatacttgagcacgggcacatggcctgacacacaaaacgacgtggtggttctctcgtggtacctccaatggtacaatataccacctgcccatgttgtggcttctgcagttgagaaggtcagaccgagagtccctgccggtgtatctatgctcccactgcttcgcctcctgctgccaaccacacaccttgtgggactgatggagatcgagaaggtacagattgtcatggaatgctaaaggatgagcgtggaaaattcaatcaaccttctctgcatgcgggttacttgtgatgaacggtagcaagtattgcttagtgcacttgtgatgaaatctgccagggactaagctgttctgaattaagtttgagacaaaagaatcccataatttttattgtgctttgctttagattcatattttctgcatgaattgtttcgattctacccatgagaagtactccctctgtccttatcagaggtcaaaccctctaagtttgacaagtttatagaaaagagcaaccatataaaaatgtaagtcttatatatatatttcataatatacctaataaattttatgcggtattataa

SEQ ID NO: 62801 - DNA, 2438 bp, Zea Mays
gagcatgatataacaacacttggtttgttacttggtttggcagcatctcataggggaacaatggatcctgcaatatcaaagatgctctactttcatgttccttctcgacatccatcttctactccagagctggagttaccaactcttctacagtcagcagcagtaatgggaattggacttctatatgaaggctcagctcatgcactcaccatgaagatacttcttggtgagattggccgaagaagtggtggtgacaacgtgctagaaagggaagggtatgctgttgctgcaggttctgcattaggatttgttgccttgggtcatggcaatcgtgcatttggattcatggatactttcctagatcgactttttgaatatattggcaccaaagaagtctaccatgaaaagtacctaaatgcaacatctgccgatgatcaaagttgcaaccctggacagatgatggatggagcacaaataaatgttgatgttactgcacctggagcaatacttgctctagccttgatatttttgaaggccgagtctgaggagattgcagctagactcaatatccccaacacttacttcgatttgcagtatgtgaggcctgattttgttatgcttcgcattatagccaggaatttaatattgtggagcagaatacaacctaccaaaggatgggttgattctcaaattcctgaaacagtcaggtgtggtatttccaacatgagtgaagggactattgacagtgatgaattggatgctgaagctctttttcaagcttatgttaacatagtgactggcgcatgtattgcacttggactcaagtatgctggcagcagaaatggtgatgcccaagagctactctacgcttacaccgtctattttctaaatgagattaagcacatacctgttcgaacatcaaatatactaccaaagggattactacaatatgttgaccgtggaactcttgaactctgcttgcatcttattgttctctccctctctctggcattcaggcacctatatgtaatagctacagagcctcgatggattcagacagtggacattgacacagaacttccagtgtattgtccattggaagtgacagttgctgaaacggattattatgatgagaccaactattgtgaggtgacaccttgtcttctgccagaacgctcagtgcttaaaagcattcgagtttgtgggcctagatattggcctcaggtgataaaacttgcacctgaagacaagccatggtggagatctggagacaagacaaatccattcaatgggggagtactctacataaagcgaaaagttggatcttgctcctactctgacgatccaattggatgtcaatcgttaatttcacgggcaatgcatgaggtctgtgatgcaccatctgctagttgcagtaatcaaccaaacagcactaatggtagctacttcagagttgatcagctagtaagcactttctcggccaatccaagcttgattgcttttgcaaaactctgctccgtgtcatggaagagcagatgcaatagcaattttcaggagttctgttctcaagtgctatatgaatgtatgagcaaagatagaccatcactgttacaggcctatatcagtttttacacaacaatagagttaatgtgggagcatttgaagactgggaattttcctttttataattcccttttccttcccaacttgaaggtcgctttggcctacaacgaagcattagttgattctagaatcacaaatggaggaattattcattcgacattcttggagtcacttatgaagcgagtgggagacatctttgcggagctgccaaacctcaaggacaacctccaccgatacttgagcacgggcacatggcctgacacacaaaacgacgtggtggttctctcgtggtacctccaatggtacaatataccacctgcccatgttgtggcttctgcagttgagaaggtcagaccgagagtccctgccggtgtatctatgctcccactgcttcgcctcctgctgccaaccacacaccttgtgggactgatggagatcgagaaggtacagattgtcatggaatgctaaaggatgagcgtggaaaattcaatcaaccttctctgcatgcgggttacttgtgatgaacggtagcaagtattgcttagtgcacttgtgatgaaatctgccagggactaagctgttctgaattaagtttgagacaaaagaatcccataatttttattgtgctttgctttagattcatattttctgcatgaattgtttcgattctacccatgagaagtactccctctgtccttatcagaggtcaaaccctctaagtttgacaagtttatagaaaagagcaaccatataaaaatgtaagtcttatatatatatttcataatatacctaataaattttatgcggtattataa

SEQ ID NO: 62802 - DNA, 1596 bp, Zea Mays
ctggaaatttgcagactttccgcttactgcgctatcttagaggaagaatttctgcagaaggccaagtgaattatggattgcagatggcagtaagcttggcaataggattcttattccttggaggtggaacacacacattttcaactcagaatagtgcaattgctgcattactaatctcactttacccacgtttacccactggaccaaatgacaatcgctgccatctccaggcattcaggcacctatatgtaatagctacagagcctcgatggattcagacagtggacattgacacagaacttccagtgtattgtccattggaagtgacagttgctgaaacggattattatgatgagaccaactattgtgaggtgacaccttgtcttctgccagaacgctcagtgacaagccatggtggagatctggagacaagacaaatccattcaatgggggagtactctacataaagcgaaaagttggatcttgctcctactctgacgatccaattggatgtcaatcgttaatttcacgggcaatgcatgaggtctgtgatgcaccatctgctagttgcagtaatcaaccaaacagcactaatggtagctacttcagagttgatcagctagtaagcactttctcggccaatccaagcttgattgcttttgcaaaactctgctccgtgtcatggaagagcagatgcaatagcaattttcaggagttctgttctcaagtgctatatgaatgtatgagcaaagatagaccatcactgttacaggcctatatcagtttttacacaacaatagagttaatgtgggagcatttgaagactgggaattttcctttttataattcccttttccttcccaacttgaaggtcgctttggcctacaacgaagcattagttgattctagaatcacaaatggaggaattattcattcgacattcttggagtcacttatgaagcgagtgggagacatctttgcggagctgccaaacctcaaggacaacctccaccgatacttgagcacgggcacatggcctgacacacaaaacgacgtggtggttctctcgtggtacctccaatggtacaatataccacctgcccatgttgtggcttctgcagttgagaaggtcagaccgagagtccctgccggtgtatctatgctcccactgcttcgcctcctgctgccaaccacacaccttgtgggactgatggagatcgagaaggtacagattgtcatggaatgctaaaggatgagcgtggaaaattcaatcaaccttctctgcatgcgggttacttgtgatgaacggtagcaagtattgcttagtgcacttgtgatgaaatctgccagggactaagctgttctgaattaagtttgagacaaaagaatcccataatttttattgtgctttgctttagattcatattttctgcatgaattgtttcgattctacccatgagaagtactccctctgtccttatcagaggtcaaaccctctaagtttgacaagtttatagaaaagagcaaccatataaaaatgtaagtcttatatatatatttcataatatacctaataaattttatgcggtattataa

SEQ ID NO: 62803 - DNA, 1612 bp, Zea Mays
ggtaatggcaggatctggaaatttgcagactttccgcttactgcgctatcttagaggaagaatttctgcagaaggccaagtgaattatggattgcagatggcagtaagcttggcaataggattcttattccttggaggtggaacacacacattttcaactcagaatagtgcaattgctgcattactaatctcactttacccacgtttacccactggaccaaatgacaatcgctgccatctccagaggcattcaggcacctatatgtaatagctacagagcctcgatggattcagacagtggacattgacacagaacttccagtgtattgtccattggaagtgacagttgctgaaacggattattatgatgagaccaactattgtgaggtgacaccttgtcttctgccagaacgctcagtgacaagccatggtggagatctggagacaagacaaatccattcaatgggggagtactctacataaagcgaaaagttggatcttgctcctactctgacgatccaattggatgtcaatcgttaatttcacgggcaatgcatgaggtctgtgatgcaccatctgctagttgcagtaatcaaccaaacagcactaatggtagctacttcagagttgatcagctagtaagcactttctcggccaatccaagcttgattgcttttgcaaaactctgctccgtgtcatggaagagcagatgcaatagcaattttcaggagttctgttctcaagtgctatatgaatgtatgagcaaagatagaccatcactgttacaggcctatatcagtttttacacaacaatagagttaatgtgggagcatttgaagactgggaattttcctttttataattcccttttccttcccaacttgaaggtcgctttggcctacaacgaagcattagttgattctagaatcacaaatggaggaattattcattcgacattcttggagtcacttatgaagcgagtgggagacatctttgcggagctgccaaacctcaaggacaacctccaccgatacttgagcacgggcacatggcctgacacacaaaacgacgtggtggttctctcgtggtacctccaatggtacaatataccacctgcccatgttgtggcttctgcagttgagaaggtcagaccgagagtccctgccggtgtatctatgctcccactgcttcgcctcctgctgccaaccacacaccttgtgggactgatggagatcgagaaggtacagattgtcatggaatgctaaaggatgagcgtggaaaattcaatcaaccttctctgcatgcgggttacttgtgatgaacggtagcaagtattgcttagtgcacttgtgatgaaatctgccagggactaagctgttctgaattaagtttgagacaaaagaatcccataatttttattgtgctttgctttagattcatattttctgcatgaattgtttcgattctacccatgagaagtactccctctgtccttatcagaggtcaaaccctctaagtttgacaagtttatagaaaagagcaaccatataaaaatgtaagtcttatatatatatttcataatatacctaataaattttatgcggtattataa

SEQ ID NO: 62804 - DNA, 1569 bp, Zea Mays
aaggtaatggcaggatctggaaatttgcagactttccgcttactgcgctatcttagaggaagaatttctgcagaaggccaagtgaattatggattgcagatggcagtaagcttggcaataggattcttattccttggaggcattcaggcacctatatgtaatagctacagagcctcgatggattcagacagtggacattgacacagaacttccagtgtattgtccattggaagtgacagttgctgaaacggattattatgatgagaccaactattgtgaggtgacaccttgtcttctgccagaacgctcagtgcttaaaagcattcgagtttgtgggcctagatattggcctcaggtgataaaacttgcacctgaagacaagccatggtggagatctggagacaagacaaatccattcaatgggggagtactctacataaagcgaaaagttggatcttgctcctactctgacgatccaattggatgtcaatcgttaatttcacgggcaatgcatgaggtctgtgatgcaccatctgctagttgcagtaatcaaccaaacagcactaatggtagctacttcagagttgatcagctagtaagcactttctcggccaatccaagcttgattgcttttgcaaaactctgctccgtgtcatggaagagcagatgcaatagcaattttcaggagttctgttctcaagtgctatatgaatgtatgagcaaagatagaccatcactgttacaggcctatatcagtttttacacaacaatagagttaatgtgggagcatttgaagactgggaattttcctttttataattcccttttccttcccaacttgaaggtcgctttggcctacaacgaagcattagttgattctagaatcacaaatggaggaattattcattcgacattcttggagtcacttatgaagcgagtgggagacatctttgcggagctgccaaacctcaaggacaacctccaccgatacttgagcacgggcacatggcctgacacacaaaacgacgtggtggttctctcgtggtacctccaatggtacaatataccacctgcccatgttgtggcttctgcagttgagaaggtcagaccgagagtccctgccggtgtatctatgctcccactgcttcgcctcctgctgccaaccacacaccttgtgggactgatggagatcgagaaggtacagattgtcatggaatgctaaaggatgagcgtggaaaattcaatcaaccttctctgcatgcgggttacttgtgatgaacggtagcaagtattgcttagtgcacttgtgatgaaatctgccagggactaagctgttctgaattaagtttgagacaaaagaatcccataatttttattgtgctttgctttagattcatattttctgcatgaattgtttcgattctacccatgagaagtactccctctgtccttatcagaggtcaaaccctctaagtttgacaagtttatagaaaagagcaaccatataaaaatgtaagtcttatatatatatttcataatatacctaataaattttatgcggtattataa

SEQ ID NO: 62805 - DNA, 1697 bp, Zea Mays
gatttcttattttcctttgttaaggtaatggcaggatctggaaatttgcagactttccgcttactgcgctatcttagaggaagaatttctgcagaaggccaagtgaattatggattgcagatggcagtaagcttggcaataggattcttattccttggaggtggaacacacacattttcaactcagaatagtgcaattgctgcattactaatctcactttacccacgtttacccactggaccaaatgacaatcgctgccatctccaggcattcaggcacctatatgtaatagctacagagcctcgatggattcagacagtggacattgacacagaacttccagtgtattgtccattggaagtgacagttgctgaaacggattattatgatgagaccaactattgtgaggtgacaccttgtcttctgccagaacgctcagtgcttaaaagcattcgagtttgtgggcctagatattggcctcaggtgataaaacttgcacctgaagacaagccatggtggagatctggagacaagacaaatccattcaatgggggagtactctacataaagcgaaaagttggatcttgctcctactctgacgatccaattggatgtcaatcgttaatttcacgggcaatgcatgaggtctgtgatgcaccatctgctagttgcagtaatcaaccaaacagcactaatggtagctacttcagagttgatcagctagtaagcactttctcggccaatccaagcttgattgcttttgcaaaactctgctccgtgtcatggaagagcagatgcaatagcaattttcaggagttctgttctcaagtgctatatgaatgtatgagcaaagatagaccatcactgttacaggcctatatcagtttttacacaacaatagagttaatgtgggagcatttgaagactgggaattttcctttttataattcccttttccttcccaacttgaaggtcgctttggcctacaacgaagcattagttgattctagaatcacaaatggaggaattattcattcgacattcttggagtcacttatgaagcgagtgggagacatctttgcggagctgccaaacctcaaggacaacctccaccgatacttgagcacgggcacatggcctgacacacaaaacgacgtggtggttctctcgtggtacctccaatggtacaatataccacctgcccatgttgtggcttctgcagttgagaaggtcagaccgagagtccctgccggtgtatctatgctcccactgcttcgcctcctgctgccaaccacacaccttgtgggactgatggagatcgagaaggtacagattgtcatggaatgctaaaggatgagcgtggaaaattcaatcaaccttctctgcatgcgggttacttgtgatgaacggtagcaagtattgcttagtgcacttgtgatgaaatctgccagggactaagctgttctgaattaagtttgagacaaaagaatcccataatttttattgtgctttgctttagattcatattttctgcatgaattgtttcgattctacccatgagaagtactccctctgtccttatcagaggtcaaaccctctaagtttgacaagtttatagaaaagagcaaccatataaaaatgtaagtcttatatatatatttcataatatacctaataaattttatgcggtattataa

SEQ ID NO: 62806 - DNA, 456 bp, Zea Mays
ggtaatggcaggatctggaaatttgcagactttccgcttactgcgctatcttagaggaagaatttctgcagaaggccaagtgaattatggattgcagatggcagtaagcttggcaataggattcttattccttggaggtggaacacacacattttcaactcagaatagtgcaattgctgcattactaatctcactttacccacgtttacccactggaccaaatgacaatcgctgccatctccaggcattcaggcacctatatgtaatagctacagagcctcgatggattcagacagtggacattgacacagaacttccagtgtattgtccattggaagtgacagttgctgaaacggattattatgatgagaccaactattgtgaggtgacaccttgtcttctgccagaacgctcagtgaattttgggaagtatgtggaaagtgcataggtttaaac

SEQ ID NO: 62807 - DNA, 913 bp, Zea Mays
ctctatgcatgatcctcgtgagccctatctcgcgttgatcaagagtatccttcgtcagcagcagtaatgggaattggacttctatatgaaggctcagctcatgcactcaccatgaagatacttcttggtgagattggccgaagaagtggtggtgacaacgtgctagaaagggaagggtatgctgttgctgcaggttctgcattaggatttgttgccttgggtcatggcaatcgtgcatttggattcatggatactttcctagatcgactttttgaatatattggcaccaaagaagtctaccatgaaaagtacctaaatgcaacatctgccgatgatcaaagttgcaaccctggacagatgatggatggagcacaaataaatgttgatgttactgcacctggagcaatacttgctctagccttgatatttttgaaggccgagtctgaggagattgcagctagactcaatatccccaacacttacttcgatttgcagtatgtgaggcctgattttgttatgcttcgcattatagccaggaatttaatattgtggagcagaatacaacctaccaaaggatgggttgattctcaaattcctgaaacagtcaggtgtggtatttccaacatgagtgaagggactattgacagtgatgaattggatgctgaagctctttttcaagcttatgttaacatagtgactggcgcatgtattgcacttggactcaagtatgctggcagcagaaatggtgatgcccaagagctactctacgcttacaccgtctattttctaaatgagattaagcacatacctgttcgaacatcaaatatactaccaaagggattactacaatatgttgaccgtggaactcttgaactctgcttgcatcttattgttctctccctctctctggtga

SEQ ID NO: 62808 - DNA, 952 bp, Zea Mays
caacacttggtttgttacttggtttggcagcatctcataggggaacaatggatcctgcaatatcaaagatgctctactttcatgttccttctcgacatccatcttctactccagagctggagttaccaactcttctacagtcagcagcagtaatgggaattggacttctatatgaaggctcagctcatgcactcaccatgaagatacttcttggtgagattggccgaagaagtggtggtgacaacgtgctagaaagggaagggtatgctgttgctgcaggttctgcattaggatttgttgccttgggtcatggcaatcgtgcatttggattcatggatactttcctagatcgactttttgaatatattggcaccaaagaagtctaccatgaaaagtacctaaatgcaacatctgccgatgatcaaagttgcaaccctggacagatgatggatggagcacaaataaatgttgatgttactgcacctggagcaatacttgctctagccttgatatttttgaaggccgagtctgaggagattgcagctagactcaatatccccaacacttacttcgatttgcagtatgtgaggcctgattttgttatgcttcgcattatagccaggaatttaatattgtggagcagtcaggtgtggtatttccaacatgagtgaagggactattgacagtgatgaattggatgctgaagctctttttcaagcttatgttaacatagtgactggcgcatgtattgcacttggactcaagtatgctggcagcagaaatggtgatgcccaagagctactctacgcttacaccgtctattttctaaatgagattaagcacatacctgttcgaacatcaaatatactaccaaagggattactacaatatgttgaccgtggaactcttgaactctgcttgcatcttattgttctctccctctctctggtga

SEQ ID NO: 62809 - DNA, 569 bp, Zea Mays
taacaacacttggtttgttacttggtttggcagcatctcataggggaacaatggatcctgcaatatcaaaggggaaatggaaaaatgtacctccaacagactcctatctgatctctctaaagtcccgcacgcgcaaacgtcctgtttcgtggcacaaatgttcgctgctggccaggctcccaatccactttctcttttccgttcccgcgcctttgcccagtccgcgcctctgtcggtcgttcaaatttagccactgttcgtcagcaacacgagggcaccgtctagaaaacaaatacgacccacacctgctactctggccacgtgacaggactgattgctgccgccgattacctacagcaaggagacgatggcgcaggatcgtcttcgtcggccacttgggatcccttggcggcgcatgcaagacagaaatagagccccagagacccatatttgaccagttcaacagatgctctactttcatgttccttctcgacatccatcttctactccagagctggagttaccaactcttctacaggtgtagatatgtacagcaacaacagactttt

SEQ ID NO: 62810 - DNA, 2388 bp, Zea Mays
gtcattatggatgaatgctatcagtgatgctcttctatgtgtcctgcaagttgatactttatctctatacaatgtaactggtgaaattgtttgtattcccttaccttatgctgtttcatcaatatggccactccctttcggtcttctacttcagaaatcaactgatggaggtcacatggtgtcatcctcgagttcactgttaaatgcaagggatttaaatcgtcctagcaaggaatatggattgacctacaatattccattccaagcaaacatcttggagacagacaacaaagctaatggcgccattatctcgtcacacctcatcttgaaacatccatttgaagagcctcaggcaacatatgttgaagaaaaggacaaactaactatgatgagagattttgatgaaaaaactatctggacaagtgatgtgatacctctaatagcatcatatcataaagggaagtttcagcattctgtctggcaaattgacggtgctagttaccaggaagcaatgaacgaaaatacaatgctacctgtcgatatttcttcacataaatgtgcattccgcaagatatggcaagggaaatgctcccactctgctgctagcaaggtttttttggcaactgatattgatgggatgccgataattagttttttactgcatgagcaaaaaatattgcttgctgtaaggattcaagttgatgatgctactgaagaagcttttggtgatattaagcctcacatgagctggaacattcctgcatttgctgctgcgccagttgttgtgactcgtccaagagtacgagttggagttcttccctttacagacatccttgttttgagttcagacaatgatctacttctctattctgggaagcagtgcctctgcagatatactctccctaatgaattgggaaaggggttcttttcaaatcatgagctaaattcagatatttcagatacttactctgatctgaagatcacaagcatagctgatgctgttgaagggcgtataaatgtgacatgcagtaatggcttgatgttcgttgcgcaaaaatccttcctcttctttggttagtgactgtataactgcaatggcagagggtttgcagagttgcttttacaatcagttcatttctcttttttggggtagtgatgccgcctacctatattcaagctctcaggttgattcagaatgggaattttttagtcatgaaataaaaagagtttgtacaaagtatggacaaactttgtcaactaaatcactcacttttccaagtaaagcttgggacttcctgatcaacagcaaataccattcccaatactgcaaaagagccctatcatcttccaattcttttttgcctgtgtcatataatacaggcaaaactgtttttaattcctttctccaggatgaacatagttcagatgtgtcatataatattcggttcatgagagaaacattggagacattgcatgccctatatgagaacctcaagcttaatattttgcggaaagaggatctaggatgtctcgcttcattgttatgtactgttgcttcatctctgggtgaacatagttatgttgattattattgccgtgactttccactcaacttgactgaatccccatccctagtctcttcaaattctttaacaactccaccgtccctgtttcgttggtttgaatattgtctacgtcatggtttgaactccgcaaagctggaagacattcctactctaatgcgcaaacagaaagtttctgccgtgagttggagtaggaaggtgttgtcattctatagtttgttgttaggagcagaaaggaaaggcaaaaatctctcttctggtgtgtattgtgaagttgccagtggttcagcgagaaacactgaagaacttactgttctggctatggttgctgaaaagtttggtcatcggcagttggatttgttaccagttggtgtatctcttgtgcttcgtcatgcactggacaaatgccgtgactccccacctgatgattggcctgcaactgcttatgttcttgttggcagggaagacctagctacggcaaagatggggacagttaggaaagaaaacctgttgtggaacaatgataatttgacatcaatgtcagtcccttatatgctacatctgcaacctgtaatcataccgacaactgcacctgacatccctgcatcagaagttttgaattctgatgattcagattctgtctataaatctgttgaggatggcatggaacatatctttacttcaacaacacaactccgatttggtcatgatttgcgcttgaatgaggttagacgcctcttatgctcagcaaggcctgtgcctatacaaacacctactaatcctagcgtgtcggatcaagacctac

SEQ ID NO: 62811 - DNA, 2847 bp, Zea Mays
atggctccaggctcattaaaaataccctgccccaaaccaaaatccgcggcgcccaaaattttccctccgtcgctagggtttcgtcctatagcaggaaaccgtttgaagcgcccaaagggacggcagcttgccagctttcgcctcactccgccaatagtccacaccgcgctccgcctgctccccggcgccgactcgtttcccctcctccttgacgccgcggccgccagcagtgggatcatggcttcggtcggttcgcggcggctaacggtgctgcgggagttccgccctcacgggctcgcagtcgaggaagccgacggccagggcgtccctggggcgccaccgccgcaagactacgactacttcctctttgaccctgcactcgccatttcccccacccctgaccccagcgatgaggcctcctcttctggtgcagacggcgaccacgagctcttcatccgtgacaatcagataatatggagtaatggttctcgagttcacaaaagatatgtatcacctaatacagtcattatggtgaaattgtttgtattcccttaccttatgctgtttcatcaatatggccactccctttcggtcttctacttcagaaatcaactgatggaggtcacatggtgtcatcctcgagttcactgttaaatgcaagggatttaaatcgtcctagcaaggaatatggattgacctacaatattccattccaagcaaacatcttggagacagacaacaaagctaatggcgccattatctcgtcacacctcatcttgaaacatccatttgaagagcctcaggcaacatatgttgaagaaaaggacaaactaactatgatgagagattttgatgaaaaaactatctggacaagtgatgtgatacctctaatagcatcatatcataaagggaagtttcagcattctgtctggcaaattgacggtgctagttaccaggaagcaatgaacgaaaatacaatgctacctgtcgatatttcttcacataaatgtgcattccgcaagatatggcaagggaaatgctcccactctgctgctagcaaggtttttttggcaactgatattgatgggatgccgataattagttttttactgcatgagcaaaaaatattgcttgctgtaaggattcaagttgatgatgctactgaagaagcttttggtgatattaagcctcacatgagctggaacattcctgcatttgctgctgcgccagttgttgtgactcgtccaagagtacgagttggagttcttccctttacagacatccttgttttgagttcagacaatgatctacttctctattctgggaagcagtgcctctgcagatatactctccctaatgaattgggaaaggggttcttttcaaatcatgagctaaattcagatatttcagatacttactctgatctgaagatcacaagcatagctgatgctgttgaagggcgtataaatgtgacatgcagtaatggcttgatgctcagatgttcgttgcgcaaaaatccttcctcttctttggttagtgactgtataactgcaatggcagagggtttgcagagttgcttttacaatcagttcatttctcttttttggggtagtgatgccgcctacctatattcaagctctcaggttgattcagaatgggaattttttagtcatgaaataaaaagagtttgtacaaagtatggacaaactttgtcaactaaatcactcacttttccaagtaaagcttgggacttcctgatcaacagcaaataccattcccaatactgcaaaagagccctatcatcttccaattcttttttgcctgtgtcatataatacaggcaaaactgtttttaattcctttctccaggatgaacatagttcagatgtgtcatataatattcggttcatgagagaaacattggagacattgcatgccctatatgagaacctcaagcttaatattttgcggaaagaggatctaggatgtctcgcttcattgttatgtactgttgcttcatctctgggtgaacatagttatgttgattattattgccgtgactttccactcaacttgactgaatccccatccctagtctcttcaaattctttaacaactccaccgtccctgtttcgttggtttgaatattgtctacgtcatggtttgaactccgcaaagctggaagacattcctactctaatgcgcaaacagaaagtttctgccgtgagttggagtaggaaggtgttgtcattctatagtttgttgttaggagcagaaaggaaaggcaaaaatctctcttctggtgtgtattgtgaagttgccagtggttcagcgagaaacactgaagaacttactgttctggctatggttgctgaaaagtttggtcatcggcagttggatttgttaccagttggtgtatctcttgtgcttcgtcatgcactggacaaatgccgtgactccccacctgatgattggcctgcaactgcttatgttcttgttggcagggaagacctagctacggcaaagatggggacagttaggaaagaaaacctgttgtggaacaatgataatttgacatcaatgtcagtcccttatatgctacatctgcaacctgtaatcataccgacaactgcacctgacatccctgcatcagaagttttgaattctgatgattcagattctgtctataaatctgttgaggatggcatggaacatatctttacttcaacaacacaactccgatttggtcatgatttgcgcttgaatgaggttagacgcctcttatgctcagcaaggcctgtgcctatacaaacacctactaatcctagcgtgtcggatcaagacctac

SEQ ID NO: 62812 - DNA, 2932 bp, Zea Mays
atggctccaggctcattaaaaataccctgccccaaaccaaaatccgcggcgcccaaaattttccctccgtcgctagggtttcgtcctatagcaggaaaccgtttgaagcgcccaaagggacggcagcttgccagctttcgcctcactccgccaatagtccacaccgcgctccgcctgctccccggcgccgactcgtttcccctcctccttgacgccgcggccgccagcagtgggatcatggcttcggtcggttcgcggcggctaacggtgctgcgggagttccgccctcacgggctcgcagtcgaggaagccgacggccagggcgtccctggggcgccaccgccgcaagactacgactacttcctctttgaccctgcactcgccatttcccccacccctgaccccagcgatgaggcctcctcttctggtgcagacggcgaccacgagctcttcatccgtgacaatcagataatatggagtaatggttctcgagttcacaaaagatatgtatcacctaatacagtcattatggcttgctggtgtaggatgaatgctatcagtgatgctcttctatgtgtcctgcaagttgatactttatctctatacaatgtaactggtgaaattgtttgtattcccttaccttatgctgtttcatcaatatggccactccctttcggtcttctacttcagaaatcaactgatggaggtcacatggtgtcatcctcgagttcactgttaaatgcaagggatttaaatcgtcctagcaaggaatatggattgacctacaatattccattccaagcaaacatcttggagacagacaacaaagctaatggcgccattatctcgtcacacctcatcttgaaacatccatttgaagagcctcaggcaacatatgttgaagaaaaggacaaactaactatgatgagagattttgatgaaaaaactatctggacaagtgatgtgatacctctaatagcatcatatcataaagggaagtttcagcattctgtctggcaaattgacggtgctagttaccaggaagcaatgaacgaaaatacaatgctacctgtcgatatttcttcacataaatgtgcattccgcaagatatggcaagggaaatgctcccactctgctgctagcaaggtttttttggcaactgatattgatgggatgccgataattagttttttactgcatgagcaaaaaatattgcttgctgtaaggattcaagttgatgatgctactgaagaagcttttggtgatattaagcctcacatgagctggaacattcctgcatttgctgctgcgccagttgttgtgactcgtccaagagtacgagttggagttcttccctttacagacatccttgttttgagttcagacaatgatctacttctctattctgggaagcagtgcctctgcagatatactctccctaatgaattgggaaaggggttcttttcaaatcatgagctaaattcagatatttcagatacttactctgatctgaagatcacaagcatagctgatgctgttgaagggcgtataaatgtgacatgcagtaatggcttgatgctcagatgttcgttgcgcaaaaatccttcctcttctttggttagtgactgtataactgcaatggcagagggtttgcagagttgcttttacaatcagttcatttctcttttttggggtagtgatgccgcctacctatattcaagctctcaggttgattcagaatgggaattttttagtcatgaaataaaaagagtttgtacaaagtatggacaaactttgtcaactaaatcactcacttttccaagtaaagcttgggacttcctgatcaacagcaaataccattcccaatactgcaaaagagccctatcatcttccaattcttttttgcctgtgtcatataatacaggcaaaactgtttttaattcctttctccaggatgaacatagttcagatgtgtcatataatattcggttcatgagagaaacattggagacattgcatgccctatatgagaacctcaagcttaatattttgcggaaagaggatctaggatgtctcgcttcattgttatgtactgttgcttcatctctgggtgaacatagttatgttgattattattgccgtgactttccactcaacttgactgaatccccatccctagtctcttcaaattctttaacaactccaccgtccctgtttcgttggtttgaatattgtctacgtcatggtttgaactccgcaaagctggaagacattcctactctaatgcgcaaacagaaagtttctgccgtgagttggagtaggaaggtgttgtcattctatagtttgttgttaggagcagaaaggaaaggcaaaaatctctcttctggtgtgtattgtgaagttgccagtggttcagcgagaaacactgaagaacttactgttctggctatggttgctgaaaagtttggtcatcggcagttggatttgttaccagttggtgtatctcttgtgcttcgtcatgcactggacaaatgccgtgactccccacctgatgattggcctgcaactgcttatgttcttgttggcagggaagacctagctacggcaaagatggggacagttaggaaagaaaacctgttgtggaacaatgataatttgacatcaatgtcagtcccttatatgctacatctgcaacctgtaatcataccgacaactgcacctgacatccctgcatcagaagttttgaattctgatgattcagattctgtctataaatctgttgaggatggcatggaacatatctttacttcaacaacacaactccgatttggtcatgatttgcgcttgaatgaggttagacgcctcttatgctcagcaaggcctgtgcctatacaaacacctactaatcctagcgtgtcggatcaagacctac

SEQ ID NO: 62813 - DNA, 3257 bp, Zea Mays
atggctccaggctcattaaaaataccctgccccaaaccaaaatccgcggcgcccaaaattttccctccgtcgctagggtttcgtcctatagcaggaaaccgtttgaagcgcccaaagggacggcagcttgccagctttcgcctcactccgccaatagtccacaccgcgctccgcctgctccccggcgccgactcgtttcccctcctccttgacgccgcggccgccagcagtgggatcatggcttcggtcggttcgcggcggctaacggtgctgcgggagttccgccctcacgggctcgcagtcgaggaagccgacggccagggcgtccctggggcgccaccgccgcaagactacgactacttcctctttgaccctgcactcgccatttcccccacccctgaccccagcgatgaggcctcctcttctggtgcagacggcgaccacgagctcttcatccgtgacaatcagataatatggagtaatggttctcgagttcacaaaagatatgtatcacctaatacagtcattatggatgaatgctatcagtgatgctcttctatgtgtcctgcaagttgatactttatctctatacaatgtaactggtgaaattgtttgtattcccttaccttatgctgtttcatcaatatggccactccctttcggtcttctacttcagaaatcaactgatggaggtcacatggtgtcatcctcgagttcactgttaaatgcaagggatttaaatcgtcctagcaaggaatatggattgacctacaatattccattccaagcaaacatcttggagacagacaacaaagctaatggcgccattatctcgtcacacctcatcttgaaacatccatttgaagagcctcaggcaacatatgttgaagaaaaggacaaactaactatgatgagagattttgatgaaaaaactatctggacaagtgatgtgatacctctaatagcatcatatcataaaggtttctgtttcacatttctctagtcttgtgttttcctgttttttattgtttattaagaaatttagttgtggcatgcagggaagtttcagcattctgtctggcaaattgacggtgctagttaccaggaagcaatgaacgaaaatacaatgctacctgtcgatatttcttcacataaatgtgcattccgcaagatatggcaagggaaatgctcccactctgctgctagcaaggtttttttggcaactgatattgatgggatgccgataattagttttttactgcatgagcaaaaaatattgcttgctgtaaggattcaagttgatgatgctactgaagaagcttttggtgatattaagcctcacatgagctggaacattcctgcatttgctgctgcgccagttgttgtgactcgtccaagagtacgagttggagttcttccctttacagacatccttgttttgagttcagacaatgatctacttctctattctgggaagcagtgcctctgcagatatactctccctaatgaattgggaaaggggttcttttcaaatcatgagctaaattcagatatttcagatacttactctgatctgaagatcacaagcatagctgatgctgttgaagggcgtataaatgtgacatgcagtaatggcttgatgctcagatgttcgttgcgcaaaaatccttcctcttctttggttagtgactgtataactgcaatggcagagggtttgcagagttgcttttacaatcagttcatttctcttttttggggtagtgatgccgcctacctatattcaagctctcaggttgattcagaatgggaattttttagtcatgaaataaaaagagtttgtacaaagtatggacaaactttgtcaactaaatcactcacttttccaagtaaagcttgggacttcctgatcaacagcaaataccattcccaatactgcaaaagagccctatcatcttccaattcttttttgcctgtgtcatataatacaggcaaaactgtttttaattcctttctccaggatgaacatagttcagatgtgtcatataatattcggttcatgagagaaacattggagacattgcatgccctatatgagaacctcaagcttaatattttgcggaaagaggatctaggatgtctcgcttcattgttatgtactgttgcttcatctctgggtgaacatagttatgttgattattattgccgtgactttccactcaacttgactgaatccccatccctagtctcttcaaattctttaacaactccaccgtccctgtttcgttggtttgaatattgtctacgtcatggtttgaactccgcaaagctggaagacattcctactctaatgcgcaaacagaaagtttctgccgtgagttggagtaggaaggtgttgtcattctatagtttgttgttaggagcagaaaggaaaggcaaaaatctctcttctggtgtgtattgtgaagttgccagtggttcagcgagaaacactgaagaacttactgttctggctatggttgctgaaaagtttggtcatcggcagttggatttgttaccagttggtgtatctcttgtgcttcgtcatgcactggacaaatgccgtgactccccacctgatgattggcctgcaactgcttatgttcttgttggcagggaagacctagctacggcaaagatggggacagttaggaaagaaaacctgttgtggaacaatgataatttgacatcaatgtcagtcccttatatgctacatctgcaacctgtaatcataccgacaactgcacctgacatccctgcatcagaagttttgaattctgatgattcagattctgtctataaatctgttgaggatggcatggaacatatctttacttcaacaacacaactccgatttggtcatgatttgcgcttgaatgaggtttatcctttcttttgagtcagactgtctttctgaattactggattgcaattgcaatattgcattgttatttgcttaataataatgttttggttcttactttcaatcgtgcaagccttttttgctttatttctatgatttttatgcttcatgtatttttgtgacaggaacactctggcttgtgtaagtcacattagtctgctgtatcttgtttcattctttatatgtctgcttaaaattctgtaatattcttttgattaggttagacgcctcttatgctcagcaaggcctgtgcctatacaaacacctactaatcctagcgtgtcggatcaagacctac

SEQ ID NO: 62814 - DNA, 1745 bp, Zea Mays
gggaagcctacgacactggagattccgactgctgatgaaattgaggtgttcaaaatccttcagaagtgcctcgagttaagagactcttatctctttagagaggaggttgctccatgggagaaggaggtcataaatgacccctgtactccaaaacctaaccccaacccgttcacttatgtgcctgaaccaaagtcagagggaacacaagaactgtctgccataatcggttaaatcttcttgagcataagtttaaattccatctgatgttaaatgcggatagggaatttcttgcccagaagactgccccacatcgtgatttttacaatgtcaggaaggttgacactcatgttcatcattcagcatgcatgaatcaaaaacatctgttgaggttcataaaatccaaactaagaaaagaacctgatgaggtggtcattttcagagatggtacttatatgactttaaaagaggtttttgagagcttggacttaactgggccgttttcttgctgagttgacaaagcaagttttctctgacctttctgctagcaaatatcaggtaaactgtcagctggataacttttttagtttttaattcagaagtacttcttatttgatatcttgttactttatccctaatatgctatttcagatggcagaatataggatttcaatctacggaaggaaacagagtgaatgggaccaacttgcaagttggatagtgaacaatgaattgcacagtggaaatgttgtctggctggttcagattccacgcttatataatgtgtacaaggaaatgggtatcgttacatcattccaaaatcttcttgacaacattttcgttcctctttttgaggttactattgatccagcttcacacccacagctccatgtcttcctgaagcaggttgtagggttggacctggttgatgatgaaagtaaaccagaaaggcgtccaacaaagcacatgcccacacctgaacagtggaccaatgtgttcaaccctgcattttcatattatgcgtactactgctatgctaacttattcaccctaaacaagctgcgtgagtcaaagggaatgaccactatcaaattccgtccacatgctggagaggctggagatgttgatcacttggcagcgacatttcttctctgtcacaacatatcacatggaattaatctaaggaagtctcctgtgcttcagtacttgtactatcttggtcagattggtctggcgatgtccccattgagcaacaactccttatttcttgactatcatcgcaacccttttccaacgttcttccaacgaggtctgaatgtctcattatctacggatgaccctttgcaaattcacctgacaaaagaaccattggtggaagaatacagcattgctgcttcgctgtggaagctcagttcttgtgatttatgcgaaattgcgaggaactctgtttaccaatctgggttttcacatgctctcaaggcgcactggattggtaagaactacttcaaaagaggacctgctggaaatgatattcacagaaccaatgtaccgcacatcagggttcaatttagagagatgatctggagaaatgaaatgaaactagtgtactctgacaatgagatcttaataccagacgagctggacctgtaagatgtccagcctcgtgtataccagacgagttgcgttgtagctgctatgggaattatacttcatgttttggtgtggggtggcggcggctccgggtgcag

SEQ ID NO: 62815 - DNA, 2471 bp, Zea Mays
ctggaagagctggacagcccctaagtgtaagacaaaagcacatttcatcgttttgacaaattcaatctaaaatacaatccatgtggccaaagtaggctcagagaaattttcctcaaacaagataatcttattcaaggccgttttcttgctgagttgacaaagcaagttttctctgacctttctgctagcaaatatcagatggcagaatataggatttcaatctacggaaggaaacagagtgaatgggaccaacttgcaagttggatagtgaacaatgaattgcacagtggaaatgttgtctggctggttcagattccacgcttatataatgtgtacaaggaaatgggtatcgttacatcattccaaaatcttcttgacaacattttcgttcctctttttgaggttactattgatccagcttcacacccacagctccatgtcttcctgaagcaggttgtagggttggacctggttgatgatgaaagtaaaccagaaaggcgtccaacaaagcacatgcccacacctgaacagtggaccaatgtgttcaaccctgcattttcatattatgcgtactactgctatgctaacttattcaccctaaacaagctgcgtgagtcaaagggaatgaccactatcaaattccgtccacatgctggagaggctggagatgttgatcacttggcagcgacatttcttctctgtcacaacatatcacatggaattaatctaaggaagtctcctgtgcttcagtacttgtactatcttggtcagattggtctggcgatgtccccattgagcaacaactccttatttcttgactatcatcgcaacccttttccaacgttcttccaacgaggtctgaatgtctcattatctacggatgaccctttgcaaattcacctgacaaaagaaccattggtggaagaatacagcattgctgcttcgctgtggaagctcagttcttgtgatttatgcgaaattgcgaggaactctgtttaccaatctgggttttcacatgctctcaaggcgcactggattggtaagaactacttcaaaagaggacctgctggaaatgatattcacagaaccaatgtaccgcacatcagggttcaatttagagagatgatctggagaaatgaaatgaaactagtgtactctgacaatgagatcttaataccagacgagctggacctgtaagatgtccagcctcgtgtataccagacgagttgcgttgtagctgctatgggaattatacttcatgttttgttgctggaagtcggcaaagtgatcaagagtgtcaccaagcataccaactaccaagggatgcaatactacctccattctcgaatatttgccgtccgctagtttatttttgaactaaaacatgacaaataaaaaagaacggaggaagtaatacggcaaagtgaagcaacagatgcttgtgtaggagttgtgttactatcttcaaggcttgtgcaagagttgtgttaatgtctcttactcactcttatctcttatcttaaatcttactttataagtgttttttttttgcatgctcatagctagtattccctgaacaccccccctcccctcgaattgtaaccatgtactcgaagtgcttgcactctggttggatcctatacggtgagtaaggtgctatcggttgttatgctgcccagatgaaatggaaattgaactagatgaagaggttctggtttcacatacgggatcatgggggacaattatgtgtttggcagaggaggaactggactgatgtttttttttgggtgggtgtggcgtagggacaccaaaagataagacaacaacgaatagaacgtaactggcagatattcatactcctgttcttgtttggatgcaaatgcaatattctcaaggaaggcactcggttgagcaagtttgaaaaaaaggttgatggactcttacttggatactccaactcaagcaagacctgtagagtatacaacaccacacatggcatagttattgatgtgcatgatgttgagtttaatgagataaaccattctcaagttggagatgagaacatagtgatgtgagatgtgccaatctggatgatgcaacgaaatatatggcaattagagatataatccctagaggggaacaagatcaagaaggtggctcaattagggtggttccctcatcaagtgtgcaaaaatgaagatcatcccagcacaagtggttgtcatgatcaacctcaagtacaacaaatgtaaatcaacaagtggctagaccaactcaagtgacaaccaagttatcaaccaagctcaagcactccatgtcaaattgtccaactagttacctttgcaagagataatccattagatcaaatagttggtgacttgataagtggtgttcaaacaagatcactacttgcataattttgtgagaactatttctttttgtcatcaagtgagccaaccaagatagaaaag

SEQ ID NO: 62816 - DNA, 311 bp, Zea Mays
agaagatccctaatcaattgcttctcatttcagtcgtgctttgaaataagatgggtttgagcttgggctggcgcttctcttggagtagccctgagtttgagcagcctgctcgtctctcgaaatgacaaaaggattacaaaatggttgagtgctcctgcagaaacagacatacatgtacgctgacgagtgcggtccggcgcccactacaccacgcgacacaccaagatatagaaggtgctctcaaagacattgaaggacctctcagaggtaactttattcatgctacggcagcgactttgagcgaacatgag

SEQ ID NO: 62817 - DNA, 1434 bp, Zea Mays
ctgcaccccctgcctcggcaccgctccagcagcctccccttccatgtgccccacccgcccgcatgcatcgacgcccgcacgacaaccttgcccccgtgcccacaatctcaaccatccgcgcgagaacaatcgattacgcgcctccaatctcctccattcgggcggacgcaatctcctccatcctcacttcccgcagtcgttcccgtgctcgccccgctgtcgcccgccgcaccccaccacaagcaggaagcaaccaacacgtgaggtccctcccccaccgctgtagagcgagaagccatcccccactgaattattctcactccacgtttcactttgagcggccgcctaggtcttcatgtgtgcccccaaggtcctgagtcacgacgacacaaggcatcacaaggctcaaggtcagaacctcataaagaagctgaaaattaaaaagaatcatcatcggttcaaggctgaccttctatcctatcgttgtgacgttgacttgaaagctctcatcccatatatccctagaagctatcagtccattcagatgtctgcaacttcagggtgtttaatgctggagtacagttagaagatccctaatcaattgcttctcatttcagtcgtgtaagtcactctgtaagttttgctaccattttctgaactccattgttcttcgtatgattttatttggtcacatgctccttcatgtgctattttgcttcttgcaagttcttgtgatcttctgttctggctccttgatttcatacatgaacctttctacccttgtccttgatacctgagcattttcaggtagcaagtgttgggcgaagtacaaagatactggccaacaaaaacatggagtttccatgtgttgcagtattctacacttgcctaacagtatttattaactgtagttagcatatatgtttatactcacctgttgctgccaagaataatactaaagttttctaataagtttcagttatggaattcatgaagcacactatctgaatttatagagcttggtgccacaatgaaactatgataaaccagctttctttttttccgaatgagctagtttgcccagaattaattggtcaggccgccgacatggtgttctgataggatacatacatgttttcatgaacaaaactatcaaaaaggctttgaaataagatgggtttgagcttgggctggcgcttctcttggagtagccctgagtttgagcagcctgctcgtctctcgaaatgacaaaaggattacaaaatggttgagtgctcctgcagaaacagacatacatgtacgctgacgagtgcggtccggcgcccactacaccacgcgacacaccaagatatagaaggtgctctcaaagacattgaaggacctctcagaggtaactttattcatgctacggcagcgactttgagcgaacatgag

SEQ ID NO: 62818 - DNA, 1426 bp, Zea Mays
gcgcagccactcctaggcccacgcccctgcccccgactctgcaccccctgcctcggcaccgctccagcagcctccccttccatgtgccccacccgcccgcatgcatcgacgcccgcacgacaaccttgcccccgtgcccacaatctcaaccatccgcgcgagaacaatcgattacgcgcctccaatctcctccattcgggcggacgcaatctcctccatcctcacttcccgcagtcgttcccgtgctcgccccgctgtcgcccgccgcaccccaccacaagcaggaagcaaccaacacgtgaggtccctcccccaccgctgtagagcgagaagccatcccccactgaattagttaattatcttgccaagctttttttcctttctttttttgcgtaagtgcgtaaaggcaatatcttcttatcacctgaggtccaaggatcatgtacaaaaatgaggctgaccttctatcctatcgttgtgacgttgacttgaaagctctcatcccatatatccctagaagctatcagtccattcagatgtctgcaacttcagggtgtttaatgctggagtacagttagaagatccctaatcaattgcttctcatttcagtcgtgtaagtcactctgtaagttttgctaccattttctgaactccattgttcttcgtatgattttatttggtcacatgctccttcatgtgctattttgcttcttgcaagttcttgtgatcttctgttctggctccttgatttcatacatgaacctttctacccttgtccttgatacctgagcattttcaggtagcaagtgttgggcgaagtacaaagatactggccaacaaaaacatggagtttccatgtgttgcagtattctacacttgcctaacagtatttattaactgtagttagcatatatgtttatactcacctgttgctgccaagaataatactaaagttttctaataagtttcagttatggaattcatgaagcacactatctgaatttatagagcttggtgccacaatgaaactatgataaaccagctttctttttttccgaatgagctagtttgcccagaattaattggtcaggccgccgacatggtgttctgataggatacatacatgttttcatgaacaaaactatcaaaaaggctttgaaataagatgggtttgagcttgggctggcgcttctcttggagtagccctgagtttgagcagcctgctcgtctctcgaaatgacaaaaggattacaaaatggttgagtgctcctgcagaaacagacatacatgtacgctgacgagtgcggtccggcgcccactacaccacgcgacacaccaagatatagaaggtgctctcaaagacattgaaggacctctcagaggtaactttattcatgctacggcagcgactttgagcgaacatgag

SEQ ID NO: 62819 - DNA, 983 bp, Zea Mays
gtcgcctccagcgcctctctggctccgtgcccagccccgcgcgcctccctgacacagcatcgcctccaagcgcagccactcctaggcccacgcccctgcccccgactctgcaccccctgcctcggcaccgctccagcagcctccccttccatgtgccccacccgcccgcatgcatcgacgcccgcacgacaaccttgcccccgtgcccacaatctcaaccatccgcgcgagaacaatcgattacgcgcctccaatctcctccattcgggcggacgcaatctcctccatcctcacttcccgcagtcgttcccgtgctcgccccgctgtcgcccgccgcaccccaccacaagcaggaagcaaccaacacgtgaggtccctcccccaccgctgtagagcgagaagccatcccccactgaattagttaattatcttgccaagctttttttcctttctttttttgcgtaagtgcgtaaaggcaatatcttcttatcacctgaggtccaaggatcatgtacaaaaatgagttctcactccacgtttcactttgagcggccgcctaggtcttcatgtgtgcccccaaggtcctgagtcacgacgacacaaggcatcacaaggctcaaggtcagaacctcataaagaagctgaaaattaaaaagaatcatcatcggttcaaggctgaccttctatcctatcgttgtgacgttgacttgaaagctctcatcccatatatccctagaagctatcagtccattcagatgtctgcaacttcagggtgtttaatgctggagtacagttagaagatccctaatcaattgcttctcatttcagtcgtaaacagacatacatgtacgctgacgagtgcggtccggcgcccactacaccacgcgacacaccaagatatagaaggtgctctcaaagacattgaaggacctctcagaggtaactttattcatgctacggcagcgactttgagcgaacatgag

SEQ ID NO: 62820 - DNA, 1645 bp, Zea Mays
gtcgcctccagcgcctctctggctccgtgcccagccccgcgcgcctccctgacacagcatcgcctccaagcgcagccactcctaggcccacgcccctgcccccgactctgcaccccctgcctcggcaccgctccagcagcctccccttccatgtgccccacccgcccgcatgcatcgacgcccgcacgacaaccttgcccccgtgcccacaatctcaaccatccgcgcgagaacaatcgattacgcgcctccaatctcctccattcgggcggacgcaatctcctccatcctcacttcccgcagtcgttcccgtgctcgccccgctgtcgcccgccgcaccccaccacaagcaggaagcaaccaacacgtgaggtccctcccccaccgctgtagagcgagaagccatcccccactgaattagttaattatcttgccaagctttttttcctttctttttttgcgtaagtgcgtaaaggcaatatcttcttatcacctgaggtccaaggatcatgtacaaaaatgagttctcactccacgtttcactttgagcggccgcctaggtcttcatgtgtgcccccaaggtcctgagtcacgacgacacaaggcatcacaaggctcaaggtcagaacctcataaagaagctgaaaattaaaaagaatcatcatcggttcaaggctgaccttctatcctatcgttgtgacgttgacttgaaagctctcatcccatatatccctagaagctatcagtccattcagatgtctgcaacttcagggtgtttaatgctggagtacagttagaagatccctaatcaattgcttctcatttcagtcgtgtaagtcactctgtaagttttgctaccattttctgaactccattgttcttcgtatgattttatttggtcacatgctccttcatgtgctattttgcttcttgcaagttcttgtgatcttctgttctggctccttgatttcatacatgaacctttctacccttgtccttgatacctgagcattttcaggtagcaagtgttgggcgaagtacaaagatactggccaacaaaaacatggagtttccatgtgttgcagtattctacacttgcctaacagtatttattaactgtagttagcatatatgtttatactcacctgttgctgccaagaataatactaaagttttctaataagtttcagttatggaattcatgaagcacactatctgaatttatagagcttggtgccacaatgaaactatgataaaccagctttctttttttccgaatgagctagtttgcccagaattaattggtcaggccgccgacatggtgttctgataggatacatacatgttttcatgaacaaaactatcaaaaaggctttgaaataagatgggtttgagcttgggctggcgcttctcttggagtagccctgagtttgagcagcctgctcgtctctcgaaatgacaaaaggattacaaaatggttgagtgctcctgcagaaacagacatacatgtacgctgacgagtgcggtccggcgcccactacaccacgcgacacaccaagatatagaaggtgctctcaaagacattgaaggacctctcagaggtaactttattcatgctacggcagcgactttgagcgaacatgag

SEQ ID NO: 62821 - DNA, 694 bp, Zea Mays
caagaatgatacgtaagggcctcaagagctgtccttatgttgggacggagagcccgaacgaaaattacaaggagcagtacggctgggcgcatgagaagcagcaatggcagcgttgccactccctactctccatactccaccacggcgaaccctaatagggcaagcatccctaatggtgtgactgacggcggcggcggcgcaaggggagattacagcaaccatgcgccctaggtgtgctgactgatcctctactcaagtttggttgtgccgtagcgggtgctggctgactcagcctgtattcatgtttccttgccgtggatggcatgaaacacgttttgttgataagtatggtctatgtatgaacccccgaaaaccactctggtgaccagtgaaggtgaggagccatgggcgaaggtttgaatcatgtctttgaaccccgtcgagaagatcacctgttggtcagtggatttaaccttttgtacagcttgttggttcgatcagtatccagtagtttgttgcagtacattttgtagagcactctgtatgactcgtctatggcgcatctggatttgcgagaagaaaagtgaggcagactgagcaagctgctgaactgatccgtgccaccatcgcccacgtgagtaggcatatgttatggttacgacaaatgacagagatcataacctactttgttttc

SEQ ID NO: 62822 - DNA, 967 bp, Zea Mays
aagcaatccaataggctaattgaactcatggtgttggaatgagatgacaaatttatcaagcagttggtttgagttggcattcatgatgaagggtgatatgaattttcacggtaagttcttaacgtatttttatgttggccccagatggaaacaaccacattcctctagcatgatcaactataagggcaagatcttaagaaatccttaagaccatccatgcagaatttgagcacgataataggttgaggattcatgatcttgtccagctttgaatggggctcatggttaacatatatccagttcccaactatcgagggacggagagcccgaacgaaaattacaaggagcagtacggctgggcgcatgagaagcagcaatggcagcgttgccactccctactctccatactccaccacggcgaaccctaatagggcaagcatccctaatggtgtgactgacggcggcggcggcgcaaggggagattacagcaaccatgcgccctaggtgtgctgactgatcctctactcaagtttggttgtgccgtagcgggtgctggctgactcagcctgtattcatgtttccttgccgtggatggcatgaaacacgttttgttgataagtatggtctatgtatgaacccccgaaaaccactctggtgaccagtgaaggtgaggagccatgggcgaaggtttgaatcatgtctttgaaccccgtcgagaagatcacctgttggtcagtggatttaaccttttgtacagcttgttggttcgatcagtatccagtagtttgttgcagtacattttgtagagcactctgtatgactcgtctatggcgcatctggatttgcgagaagaaaagtgaggcagactgagcaagctgctgaactgatccgtgccaccatcgcccacgtgagtaggcatatgttatggttacgacaaatgacagagatcataacctactttgttttc

SEQ ID NO: 62823 - DNA, 692 bp, Zea Mays
atcctctttcttgcactggagacgtgtttttgaaagcaagggacggagagcccgaacgaaaattacaaggagcagtacggctgggcgcatgagaagcagcaatggcagcgttgccactccctactctccatactccaccacggcgaaccctaatagggcaagcatccctaatggtgtgactgacggcggcggcggcgcaaggggagattacagcaaccatgcgccctaggtgtgctgactgatcctctactcaagtttggttgtgccgtagcgggtgctggctgactcagcctgtattcatgtttccttgccgtggatggcatgaaacacgttttgttgataagtatggtctatgtatgaacccccgaaaaccactctggtgaccagtgaaggtgaggagccatgggcgaaggtttgaatcatgtctttgaaccccgtcgagaagatcacctgttggtcagtggatttaaccttttgtacagcttgttggttcgatcagtatccagtagtttgttgcagtacattttgtagagcactctgtatgactcgtctatggcgcatctggatttgcgagaagaaaagtgaggcagactgagcaagctgctgaactgatccgtgccaccatcgcccacgtgagtaggcatatgttatggttacgacaaatgacagagatcataacctactttgttttc

SEQ ID NO: 62824 - DNA, 1047 bp, Zea Mays
agcacggcccggatatatacaaacctggtgagcgctaacttgcgcgacccgccagcttgaacatccaactgatccaaccaccgacccgggcgagcaagccatctccgtttccttgccagtcccgcgagcaccattcaccacaccagcgcagccgccatggccgacgtcgagaaggccacccccgtggccgcaccggccgagggcgcgggcggcgacgtggccgccgggagaaccggcgcggtggccgccctgctgcggcggtggcggacccaggacctgctggaccggtcggggtccgcgctgcgcgccgcggcgtgggcgttctccctgctggcgttcctcgtcatggcctgcaacgagcatggggactggaggcagttcgaccgctacgaggagtacaggtacatcgttgccatcggcctgctggccttcgtctacacgacgctgcagctcctccggcacggcgtccgcctcaccggcggccaggacctggagcccaagaccggcctcctcgttgacttcgccggggatcaggtccaggacaaagaatttttgtaatctgagccagttagccaccatatgggcttggaaaatgcttttatcagaggtaaccgcctacctgatgatgtcggcgctgtcagctgcgatcccgatcaccaaccgcatgcgcgagggcgctgacaacgtgttcaccgactcgtcggcggcgtccatcagcatggccttcttcgccttcgtctgcctggcgctctccgccctcgtctccggcttcaagctcgccaagcagacatacatctgatctgatactccgtacacggacacttgcatatacacttcacatatttatttgctccgttgtgtacagtctgaattgcgtgcgttgtgtacagtctgaattgcgtgcgtcatttaccattgttctcattgtatacatagatttggttcattgtgactgtataagagctacctcccaatttgaacgtagacggtgtacgtatgggcgtgtggttagatgaatgaattgaagatacctacactacattgtta

SEQ ID NO: 62825 - DNA, 1552 bp, Zea Mays
attgtcttctctcttatatgtttctcttcccacattttgtatttggctggatctatttcaaggttctattttgtacagcttgccaatccagaccagagcctgactgacacctgcacccgtgtcccagccctcaaggctcttattctggagaggatgggaaagcctgatgaagcattgagcggggccctgaatgctaaggagctattgtattcagacaacatttttcattttgatgatcttacacttagcactctacagatagtatttcaaaggcttgaccgattggatcttgctacttcatgctatgagtatgcctgtacaaagtatccaagtaacttggaattaatgatggggctttttaattgctatgttcgagagtactcatacgtgaaacaacagcagacagctctcaaaatgtacaaaactgtaggagaagaaaggtttttgctttgggctgtttgcagcattcagctgcaggtgcattttagcagtggtggtgtgaaattattggcactagccgaagcattgctgaagaagcacataaattctcatagtttacatgagccagaagcactttctctctatgtttcaattttggagcaagagaaaaagtatgacactgctttggaagttctttctggagacttgggatctcttcttggaagggaggaggacaagcttcgtttgcagggatgtcttcttgctcaagcgagtagctatctgtctgcttctgaaatataccagaaggttctggagtcttggatgtttgctggagcatgatgtgaatctccctaaaccatccactggcgaacacacttgtccttcttgctctgttgattcagcattatccaacaagacttctcttgacaaggagctggttgaatctcgccttacaagtgcgttgtcatttgtgcaaagtctacaagaaaataactcaagcgattgtgtcagaggacctcatctggcaaaaattgaaattgaacggcagcggtgcctcaatggaaacccagataatatcaagcttatggaagctttggtgcagtacctccacagatttggtcatttgtcttgctcagcatctgatgttgaaatttaccttcacatgctatccaacaatgagatatctgagctgctagatgaaattactagatcttttgatgcatcatcaatttcagttaacacactgggttcaacaattactcttttcaaggtccaggaacttttgggaacttcattcacaaaaccaacttcagaacttgagggcattgcaaaaagaatggttgataccttttacaaaaacctgcctctatcaaattacttggatcctcaggaaagcatgtacggtgaagagcttctgtcaatggccagcagtatccttgtgcagctatactggcgcaccagggatttaggatacctacttgaagcaattttgatactggagtttggattgactgttcgcaagtatgtctggcaatacaaggttactctggtccatctgtactcttacctgggggcacttcctttagcacataaatggtaatttctcctttga

SEQ ID NO: 62826 - DNA, 1817 bp, Zea Mays
ccgactcgataaacccttctctcgtccgcctccgcgcctcactccctctcctcctctgcttcgtcttccccacccgcggcgcgcagcacacccaaaaccgtaaccctagattgcaagaggacatgaccagcaagtttgggctcgccggcggcatcccggagcggcgggtgagaccgatctgggacgcagtcgactcacgccagtacaagcccgcgctcaagctctgcaccgcgctcctcgccaagcaccctacatccccctacgcgctcgccctcaaggctcttattctggagaggatgggaaagcctgatgaagcattgagcggggccctgaatgctaaggagctattgtattcagacaacatttttcattttgatgatcttacacttagcactctacagatagtatttcaaaggcttgaccgattggatcttgctacttcatgctatgagtatgcctgtacaaagtatccaagtaacttggaattaatgatggggctttttaattgctatgttcgagagtactcatacgtgaaacaacagcagacagctctcaaaatgtacaaaactgtaggagaagaaaggtttttgctttgggctgtttgcagcattcagctgcaggtgcattttagcagtggtggtgtgaaattattggcactagccgaagcattgctgaagaagcacataaattctcatagtttacatgagccagaagcactttctctctatgtttcaattttggagcaagagaaaaagtatgacactgctttggaagttctttctggagacttgggatctcttcttggaagggaggaggacaagcttcgtttgcagtcgctcttcgcatccgagtcgtcttcgtcggggtcgtcggagtcgtcctcggcctcctcggatgtgaagctagatctatggtggcatggcgagcgggacggcaatctcgtgggacggtgcctgcacggtcgtgcgggtgagatacatggccaatgtgggcggcgggagtggcacggcaggggctgggaggctgcttcatgctcgggcgtgggagggggcggggcatccaggggtgtggacgccttccttgctcttatagttgctacaaacatatcattatccaacaagacttctcttgacaaggagctggttgaatctcgccttacaagtgcgttgtcatttgtgcaaagtctacaagaaaataactcaagcgattgtgtcagaggacctcatctggcaaaaattgaaattgaacggcagcggtgcctcaatggaaacccagataatatcaagcttatggaagctttggtgcagtacctccacagatttggtcatttgtcttgctcagcatctgatgttgaaatttaccttcacatgctatccaacaatgagatatctgagctgctagatgaaattactagatcttttgatgcatcatcaatttcagttaacacactgggttcaacaattactcttttcaaggtccaggaacttttgggaacttcattcacaaaaccaacttcagaacttgagggcattgcaaaaagaatggttgataccttttacaaaaacctgcctctatcaaattacttggatcctcaggaaagcatgtacggtgaagagcttctgtcaatggccagcagtatccttgtgcagctatactggcgcaccagggatttaggatacctacttgaagcaattttgatactggagtttggattgactgttcgcaagtatgtctggcaatacaaggttactctggtccatctgtactcttacctgggggcacttcctttagcacataaatggtaatttctcctttga

SEQ ID NO: 62827 - DNA, 1847 bp, Zea Mays
ctcacatcccttcctcggaccgtgccatccccatcctctacgtccccacgcgcgcggcgctctgtcacattcccgactcgataaacccttctctcgtccgcctccgcgcctcactccctctcctcctctgcttcgtcttccccacccgcggcgcgcagcacacccaaaaccgtaaccctagattgcaagaggacatgaccagcaagtttgggctcgccggcggcatcccggagcggcgggtgagaccgatctgggacgcagtcgactcacgccagtacaagcccgcgctcaagctctgcaccgcgctcctcgccaagcaccctacatccccctacgcgctcgccctcaaggctcttattctggagaggatgggaaagcctgatgaagcattgagcggggccctgaatgctaaggagctattgtattcagacaacatttttcattttgatgatcttacacttagcactctacagatagtatttcaaaggcttgaccgattggatcttgctacttcatgctatgagtatgcctgtacaaagtatccaagtaacttggaattaatgatggggctttttaattgctatgttcgagagtactcatacgtgaaacaacagcagacagctctcaaaatgtacaaaactgtaggagaagaaaggtttttgctttgggctgtttgcagcattcagctgcagtgtagtgtgtttgatttggttgcgtcgctggatcatttgtcacaggtgcattttagcagtggtggtgtgaaattattggcactagccgaagcattgctgaagaagcacataaattctcatagtttacatgagccagaagcactttctctctatgtttcaattttggagcaagagaaaaagtatgacactgctttggaagttctttctggagacttgggatctcttcttggaagggaggaggacaagcttcgtttgcagggatgtcttcttgctcaagcgagtagctatctgtctgcttctgaaatataccagaaggttctggagtcttgtcctgatgactgggagtcctttctccattatataggatgtttgctggagcatgatgtgaatctccctaaaccatccactggcgaacacacttgtccttcttgctctgttgattcagcattatccaacaagacttctcttgacaaggagctggttgaatctcgccttacaagtgcgttgtcatttgtgcaaagtctacaagaaaataactcaagcgattgtgtcagaggacctcatctggcaaaaattgaaattgaacggcagcggtgcctcaatggaaacccagataatatcaagcttatggaagctttggtgcagtacctccacagatttggtcatttgtcttgctcagcatctgatgttgaaatttaccttcacatgctatccaacaatgagatatctgagctgctagatgaaattactagatcttttgatgcatcatcaatttcagttaacacactgggttcaacaattactcttttcaaggtccaggaacttttgggaacttcattcacaaaaccaacttcagaacttgagggcattgcaaaaagaatggttgataccttttacaaaaacctgcctctatcaaattacttggatcctcaggaaagcatgtacggtgaagagcttctgtcaatggccagcagtatccttgtgcagctatactggcgcaccagggatttaggatacctacttgaagcaattttgatactggagtttggattgactgttcgcaagtatgtctggcaatacaaggttactctggtccatctgtactcttacctgggggcacttcctttagcacataaatggtaatttctcctttga

SEQ ID NO: 62828 - DNA, 1812 bp, Zea Mays
ctcacatcccttcctcggaccgtgccatccccatcctctacgtccccacgcgcgcggcgctctgtcacattcccgactcgataaacccttctctcgtccgcctccgcgcctcactccctctcctcctctgcttcgtcttccccacccgcggcgcgcagcacacccaaaaccgtaaccctagattgcaagaggacatgaccagcaagtttgggctcgccggcggcatcccggagcggcgggtgagaccgatctgggacgcagtcgactcacgccagtacaagcccgcgctcaagctctgcaccgcgctcctcgccaagcaccctacatccccctacgcgctcgccctcaaggctcttattctggagaggatgggaaagcctgatgaagcattgagcggggccctgaatgctaaggagctattgtattcagacaacatttttcattttgatgatcttacacttagcactctacagatagtatttcaaaggcttgaccgattggatcttgctacttcatgctatgagtatgcctgtacaaagtatccaagtaacttggaattaatgatggggctttttaattgctatgttcgagagtactcatacgtgaaacaacagcagacagctctcaaaatgtacaaaactgtaggagaagaaaggtttttgctttgggctgtttgcagcattcagctgcagtgtagtgtgtttgatttggttgcgtcgctggatcatttgtcacaggtgcattttagcagtggtggtgtgaaattattggcactagccgaagcattgctgaagaagcacataaattctcatagtttacatgagccagaagcactttctctctatgtttcaattttggagcaagagaaaaagtatgacactgctttggaagttctttctggagacttgggatctcttcttggaagggaggaggacaagcttcgtttgcagggatgtcttcttgctcaagcgagtagctatctgtctgcttctgaaatataccagaaggttctggagtcttggatgtttgctggagcatgatgtgaatctccctaaaccatccactggcgaacacacttgtccttcttgctctgttgattcagcattatccaacaagacttctcttgacaaggagctggttgaatctcgccttacaagtgcgttgtcatttgtgcaaagtctacaagaaaataactcaagcgattgtgtcagaggacctcatctggcaaaaattgaaattgaacggcagcggtgcctcaatggaaacccagataatatcaagcttatggaagctttggtgcagtacctccacagatttggtcatttgtcttgctcagcatctgatgttgaaatttaccttcacatgctatccaacaatgagatatctgagctgctagatgaaattactagatcttttgatgcatcatcaatttcagttaacacactgggttcaacaattactcttttcaaggtccaggaacttttgggaacttcattcacaaaaccaacttcagaacttgagggcattgcaaaaagaatggttgataccttttacaaaaacctgcctctatcaaattacttggatcctcaggaaagcatgtacggtgaagagcttctgtcaatggccagcagtatccttgtgcagctatactggcgcaccagggatttaggatacctacttgaagcaattttgatactggagtttggattgactgttcgcaagtatgtctggcaatacaaggttactctggtccatctgtactcttacctgggggcacttcctttagcacataaatggtaatttctcctttga

SEQ ID NO: 62829 - DNA, 1836 bp, Zea Mays
cagccacctccagtttccttttgttgacgatcgccgaccgcccgtcgtaacatcaacgggcgtgatgccctcacatcccttcctcggaccgtgccatccccatcctctacgtccccacgcgcgcggcgctctgtcacattcccgactcgataaacccttctctcgtccgcctccgcgcctcactccctctcctcctctgcttcgtcttccccacccgcggcgcgcagcacacccaaaaccgtaaccctagattgcaagaggacatgaccagcaagtttgggctcgccggcggcatcccggagcggcgggtgagaccgatctgggacgcagtcgactcacgccagtacaagcccgcgctcaagctctgcaccgcgctcctcgccaagcaccctacatccccctacgcgctcgccctcaaggctcttattctggagaggatgggaaagcctgatgaagcattgagcggggccctgaatgctaaggagctattgtattcagacaacatttttcattttgatgatcttacacttagcactctacagatagtatttcaaaggcttgaccgattggatcttgctacttcatgctatgagtatgcctgtacaaagtatccaagtaacttggaattaatgatggggctttttaattgctatgttcgagagtactcatacgtgaaacaacagcagacagctctcaaaatgtacaaaactgtaggagaagaaaggtttttgctttgggctgtttgcagcattcagctgcaggtgcattttagcagtggtggtgtgaaattattggcactagccgaagcattgctgaagaagcacataaattctcatagtttacatgagccagaagcactttctctctatgtttcaattttggagcaagagaaaaagtatgacactgctttggaagttctttctggagacttgggatctcttcttggaagggaggaggacaagcttcgtttgcagggatgtcttcttgctcaagcgagtagctatctgtctgcttctgaaatataccagaaggttctggagtcttggatgtttgctggagcatgatgtgaatctccctaaaccatccactggcgaacacacttgtccttcttgctctgttgattcagcattatccaacaagacttctcttgacaaggagctggttgaatctcgccttacaagtgcgttgtcatttgtgcaaagtctacaagaaaataactcaagcgattgtgtcagaggacctcatctggcaaaaattgaaattgaacggcagcggtgcctcaatggaaacccagataatatcaagcttatggaagctttggtgcagtacctccacagatttggtcatttgtcttgctcagcatctgatgttgaaatttaccttcacatgctatccaacaatgagatatctgagctgctagatgaaattactagatcttttgatgcatcatcaatttcagttaacacactgggttcaacaattactcttttcaaggtccaggaacttttgggaacttcattcacaaaaccaacttcagaacttgagggcattgcaaaaagaatggttgataccttttacaaaaacctgcctctatcaaattacttggatcctcaggaaagcatgtacggtgaagagcttctgtcaatggccagcagtatccttgtgcagctatactggcgcaccagggatttaggatacctacttgaagcaattttgatactggagtttggattgactgttcgcaagtatgtctggcaatacaaggttactctggtccatctgtactcttacctgggggcacttcctttagcacataaatggtaatttctcctttga

SEQ ID NO: 62830 - DNA, 2020 bp, Zea Mays
atatagtataaaaaacaatagtattaccttgaaaaaataaaaatacttcacttttgtgtggttcagtctcattaatccaggcctctcataaaatacactaatacagtactacagatctttgtgacgtccccacgatagggttacggcagcagccacctccagtttccttttgttgacgatcgccgaccgcccgtcgtaacatcaacgggcgtgatgccctcacatcccttcctcggaccgtgccatccccatcctctacgtccccacgcgcgcggcgctctgtcacattcccgactcgataaacccttctctcgtccgcctccgcgcctcactccctctcctcctctgcttcgtcttccccacccgcggcgcgcagcacacccaaaaccgtaaccctagattgcaagaggacatgaccagcaagtttgggctcgccggcggcatcccggagcggcgggtgagaccgatctgggacgcagtcgactcacgccagtacaagcccgcgctcaagctctgcaccgcgctcctcgccaagcaccctacatccccctacgcgctcgccctcaaggctcttattctggagaggatgggaaagcctgatgaagcattgagcggggccctgaatgctaaggagctattgtattcagacaacatttttcattttgatgatcttacacttagcactctacagatagtatttcaaaggcttgaccgattggatcttgctacttcatgctatgagtatgcctgtacaaagtatccaagtaacttggaattaatgatggggctttttaattgctatgttcgagagtactcatacgtgaaacaacagcagacagctctcaaaatgtacaaaactgtaggagaagaaaggtttttgctttgggctgtttgcagcattcagctgcaggtgcattttagcagtggtggtgtgaaattattggcactagccgaagcattgctgaagaagcacataaattctcatagtttacatgagccagaagcactttctctctatgtttcaattttggagcaagagaaaaagtatgacactgctttggaagttctttctggagacttgggatctcttcttggaagggaggaggacaagcttcgtttgcagggatgtcttcttgctcaagcgagtagctatctgtctgcttctgaaatataccagaaggttctggagtcttgtcctgatgactgggagtcctttctccattatataggatgtttgctggagcatgatgtgaatctccctaaaccatccactggcgaacacacttgtccttcttgctctgttgattcagcattatccaacaagacttctcttgacaaggagctggttgaatctcgccttacaagtgcgttgtcatttgtgcaaagtctacaagaaaataactcaagcgattgtgtcagaggacctcatctggcaaaaattgaaattgaacggcagcggtgcctcaatggaaacccagataatatcaagcttatggaagctttggtgcagtacctccacagatttggtcatttgtcttgctcagcatctgatgttgaaatttaccttcacatgctatccaacaatgagatatctgagctgctagatgaaattactagatcttttgatgcatcatcaatttcagttaacacactgggttcaacaattactcttttcaaggtccaggaacttttgggaacttcattcacaaaaccaacttcagaacttgagggcattgcaaaaagaatggttgataccttttacaaaaacctgcctctatcaaattacttggatcctcaggaaagcatgtacggtgaagagcttctgtcaatggccagcagtatccttgtgcagctatactggcgcaccagggatttaggatacctacttgaagcaattttgatactggagtttggattgactgttcgcaagtatgtctggcaatacaaggttactctggtccatctgtactcttacctgggggcacttcctttagcacataaatggtaatttctcctttga

SEQ ID NO: 62831 - DNA, 1727 bp, Zea Mays
ctcacatcccttcctcggaccgtgccatccccatcctctacgtccccacgcgcgcggcgctctgtcacattcccgactcgataaacccttctctcgtccgcctccgcgcctcactccctctcctcctctgcttcgtcttccccacccgcggcgcgcagcacacccaaaaccgtaaccctagattgcaagaggacatgaccagcaagtttgggctcgccggcggcatcccggagcggcgggtgagaccgatctgggacgcagtcgactcacgccagtacaagcccgcgctcaagctctgcaccgcgctcctcgccaagcaccctacatccccctacgcgctcgccctcaaggctcttattctggagaggatgggaaagcctgatgaagcattgagcggggccctgaatgctaaggagctattgtattcagacaacatttttcattttgatgatcttacacttagcactctacagatagtatttcaaaggcttgaccgattggatcttgctacttcatgctatgagtatgcctgtacaaagtatccaagtaacttggaattaatgatggggctttttaattgctatgttcgagagtactcatacgtgaaacaacagcagacagctctcaaaatgtacaaaactgtaggagaagaaaggtttttgctttgggctgtttgcagcattcagctgcaggtgcattttagcagtggtggtgtgaaattattggcactagccgaagcattgctgaagaagcacataaattctcatagtttacatgagccagaagcactttctctctatgtttcaattttggagcaagagaaaaagtatgacactgctttggaagttctttctggagacttgggatctcttcttggaagggaggaggacaagcttcgtttgcagggatgtcttcttgctcaagcgagtagctatctgtctgcttctgaaatataccagaaggttctggagtcttggatgtttgctggagcatgatgtgaatctccctaaaccatccactggcgaacacacttgtccttcttgctctgttgattcagcattatccaacaagacttctcttgacaaggagctggttgaatctcgccttacaagtgcgttgtcatttgtgcaaagtctacaagaaaataactcaagcgattgtgtcagaggacctcatctggcaaaaattgaaattgaacggcagcggtgcctcaatggaaacccagataatatcaagcttatggaagctttggtgcagtacctccacagatttggtcatttgtcttgctcagcatctgatgttgaaatttaccttcacatgctatccaacaatgagatatctgagctgctagatgaaattactagatcttttgatgcatcatcaatttcagttaacacactgggttcaacaattactcttttcaaggtccaggaacttttgggaacttcattcacaaaaccaacttcagaacttgagggcattgcaaaaagaatggttgataccttttacaaaaacctgcctctatcaaattacttggatcctcaggaaagcatgtacggtgaagagcttctgtcaatggccagcagtatccttgtgcagctatactggcgcaccagggatttaggatacctacttgaagcaattttgatactggagtttggattgactgttcgcaactgtgtcataacatgaagtgttattggattactcggttccattgatttaag

SEQ ID NO: 62832 - DNA, 1487 bp, Zea Mays
ccgactcgataaacccttctctcgtccgcctccgcgcctcactccctctcctcctctgcttcgtcttccccacccgcggcgcgcagcacacccaaaaccgtaaccctagattgcaagaggacatgaccagcaagtttgggctcgccggcggcatcccggagcggcgggtgagaccgatctgggacgcagtcgactcacgccagtacaagcccgcgctcaagctctgcaccgcgctcctcgccaagcaccctacatccccctacgcgctcgccctcaaggctcttattctggagaggatgggaaagcctgatgaagcattgagcggggccctgaatgctaaggagctattgtattcagacaacatttttcattttgatgatcttacacttagcactctacagatagtatttcaaaggcttgaccgattggatcttgctacttcatgctatgagtatgcctgtacaaagtatccaagtaacttggaattaatgatggggctttttaattgctatgttcgagagtactcatacgtgaaacaacagcagacagctctcaaaatgtacaaaactgtaggagaagaaaggtttttgctttgggctgtttgcagcattcagctgcagtgtagtgtgtttgatttggttgcgtcgctggatcatttgtcacaggtgcattttagcagtggtggtgtgaaattattggcactagccgaagcattgctgaagaagcacataaattctcatagtttacatgagccagaagcactttctctctatgtttcaattttggagcaagagaaaaagtatgacactgctttggaagttctttctggagacttgggatctcttcttggaagggaggaggacaagcttcgtttgcagggatgtcttcttgctcaagcgagtagctatctgtctgcttctgaaatataccagaaggttctggagtcttgtcctgatgactgggagtcctttctccattatataggatgtttgctggagcatgatgtgaatctccctaaaccatccactggcgaacacacttgtccttcttgctctgttgattcagcattatccaacaagacttctcttgacaaggagctggttgaatctcgccttacaagtgcgttgtcatttgtgcaaagtctacaagaaaataactcaagcgattgtgtcagaggacctcatctggcaaaaattgaaattgaacggcagcggtgcctcaatggaaacccagataatatcaagcttatggaagctttggtgcagtacctccacagcgctctagcagtctgttggtttctaatagtttaatgatctggttgctacgagagaacaattatattactagctagttataagattgtttcttcattgctgttacgtttatactataataacactgcttttgctgaaaaaggggagccttgggcgcagtggtaaagctgctgcattgtgacaaggtcacaggttcgagtcatagaaacagcc

SEQ ID NO: 62833 - DNA, 1459 bp, Zea Mays
cacattcccgactcgataaacccttctctcgtccgcctccgcgcctcactccctctcctcctctgcttcgtcttccccacccgcggcgcgcagcacacccaaaaccgtaaccctagattgcaagaggacatgaccagcaagtttgggctcgccggcggcatcccggagcggcgggtgagaccgatctgggacgcagtcgactcacgccagtacaagcccgcgctcaagctctgcaccgcgctcctcgccaagcaccctacatccccctacgcgctcgccctcaaggctcttattctggagaggatgggaaagcctgatgaagcattgagcggggccctgaatgctaaggagctattgtattcagacaacatttttcattttgatgatcttacacttagcactctacagatagtatttcaaaggcttgaccgattggatcttgctacttcatgctatgagtatgcctgtacaaagtatccaagtaacttggaattaatgatggggctttttaattgctatgttcgagagtactcatacgtgaaacaacagcagacagctctcaaaatgtacaaaactgtaggagaagaaaggtttttgctttgggctgtttgcagcattcagctgcagtgtagtgtgtttgatttggttgcgtcgctggatcatttgtcacaggtgcattttagcagtggtggtgtgaaattattggcactagccgaagcattgctgaagaagcacataaattctcatagtttacatgagccagaagcactttctctctatgtttcaattttggagcaagagaaaaagtatgacactgctttggaagttctttctggagacttgggatctcttcttggaagggaggaggacaagcttcgtttgcagggatgtcttcttgctcaagcgagtagctatctgtctgcttctgaaatataccagaaggttctggagtcttggatgtttgctggagcatgatgtgaatctccctaaaccatccactggcgaacacacttgtccttcttgctctgttgattcagcattatccaacaagacttctcttgacaaggagctggttgaatctcgccttacaagtgcgttgtcatttgtgcaaagtctacaagaaaataactcaagcgattgtgtcagaggacctcatctggcaaaaattgaaattgaacggcagcggtgcctcaatggaaacccagataatatcaagcttatggaagctttggtgcagtacctccacagcgctctagcagtctgttggtttctaatagtttaatgatctggttgctacgagagaacaattatattactagctagttataagattgtttcttcattgctgttacgtttatactataataacactgcttttgctgaaaaaggggagccttgggcgcagtggtaaagctgctgcattgtgacaaggtcacaggttcgagtcatagaaacagcc

SEQ ID NO: 62834 - DNA, 1479 bp, Zea Mays
ctcacatcccttcctcggaccgtgccatccccatcctctacgtccccacgcgcgcggcgctctgtcacattcccgactcgataaacccttctctcgtccgcctccgcgcctcactccctctcctcctctgcttcgtcttccccacccgcggcgcgcagcacacccaaaaccgtaaccctagattgcaagaggacatgaccagcaagtttgggctcgccggcggcatcccggagcggcgggtgagaccgatctgggacgcagtcgactcacgccagtacaagcccgcgctcaagctctgcaccgcgctcctcgccaagcaccctacatccccctacgcgctcgccctcaaggctcttattctggagaggatgggaaagcctgatgaagcattgagcggggccctgaatgctaaggagctattgtattcagacaacatttttcattttgatgatcttacacttagcactctacagatagtatttcaaaggcttgaccgattggatcttgctacttcatgctatgagtatgcctgtacaaagtatccaagtaacttggaattaatgatggggctttttaattgctatgttcgagagtactcatacgtgaaacaacagcagacagctctcaaaatgtacaaaactgtaggagaagaaaggtttttgctttgggctgtttgcagcattcagctgcaggtgcattttagcagtggtggtgtgaaattattggcactagccgaagcattgctgaagaagcacataaattctcatagtttacatgagccagaagcactttctctctatgtttcaattttggagcaagagaaaaagtatgacactgctttggaagttctttctggagacttgggatctcttcttggaagggaggaggacaagcttcgtttgcagggatgtcttcttgctcaagcgagtagctatctgtctgcttctgaaatataccagaaggttctggagtcttggatgtttgctggagcatgatgtgaatctccctaaaccatccactggcgaacacacttgtccttcttgctctgttgattcagcattatccaacaagacttctcttgacaaggagctggttgaatctcgccttacaagtgcgttgtcatttgtgcaaagtctacaagaaaataactcaagcgattgtgtcagaggacctcatctggcaaaaattgaaattgaacggcagcggtgcctcaatggaaacccagataatatcaagcttatggaagctttggtgcagtacctccacagcgctctagcagtctgttggtttctaatagtttaatgatctggttgctacgagagaacaattatattactagctagttataagattgtttcttcattgctgttacgtttatactataataacactgcttttgctgaaaaaggggagccttgggcgcagtggtaaagctgctgcattgtgacaaggtcacaggttcgagtcatagaaacagcc

SEQ ID NO: 62835 - DNA, 156 bp, Zea Mays
atggtcgacactgaggttgattgctctgaatttgaaagaatggttgacactgctgcttcttggtctaaagtggaaacaatggtcggcagtgaggctgcttgctctgaatttgtaagaatggtcgacactgccgctgcttggtttgagttagaatga

SEQ ID NO: 62836 - DNA, 1130 bp, Zea Mays
gaaatccctccacatacaaacagagggacaatacaagttgagacatgtaggtaaggttcactcatttacagaactacaatagatgtaggataacaaagagcactaaagagaccttaaacatagcacatgcatttatgatctgcacatgtcaaactttctctagtgttgatatcatatcatcgtcattgtctctcagtctcttaaaaaagaaaattttgtgcgtggaaaaaatgtgataaaatgtgtgagaacaggaaatatgtcaagcatcaaccaataagagggaaaactggagaatacataataactatcttgacagacttaactcatatggataaataataacattccagtatcaaatttatttctacaaagattttatgtaggtttaccagtttttgcttcttcactttttgggagggaaataggcttttttctcgatgttgaaacatggttttgtctttggtcacttgggctcatttcattagaattatatggatcatcattggcagtaataccgatgcaaccctgctccttggtggcttggtataaggcttcaaaatatctgaagtaagcaaatctgctagcctctcaaagtgagcctgagacctgcagacctcaaagtggtgaatagctatgtggtaatcatgtaagagtgctattatgttttatttcagacctcaaagtgagcctaagagtgtcattatgttttatttcagacctcaaagtggtaaatagctatcttataacatatatgagaaattccacaacaataaagtttcatcacaatcatatagttaagggagaaatataacgaaaaaagaggggaaattcaaatcatagagtatctaaacaaaatagatcacaaccatgatcaattgacgaataaaataaactgatggaatccatgcattatcacagcgtggtcacaacgtttaccatgccaccgtgtacgtagtgcaagcctatctacatatggtttttaataagagccacatctaagcaaccaaattagtcaaatcaacagtcaagcgagagcgcggagacagaggttcacacgcctagcagaatcctccacaaagaaaataatcctataacaaaacccctctaacatccaggcaggataagac

SEQ ID NO: 62837 - DNA, 828 bp, Zea Mays
cacgaaagctgccctccctacacaaggatctgccccacatagtcgatctcaagcagcattggagggtcagccaaatggatggtgaacaaaattaaagggaagatgcagaaagcacttccagatctcctcaaggaatatgacatgccagcagggctcttcccacgggacacgactaactatgagttcaatgaagagacaaagaagctgacagtgtacatcccgtcagcctgtgatgttggttacaaggactcgtcagtgctgcggttcttcacctgtgtgaccggctaccttgaaaaggggaagttttccgacatcgagggcatgaagaccaaagtgctggtctggaccaaggtgactgccatcaagaccgagggcccaaaggtccatttcactgcaggcgtgaagaagactcggagccgtgatgcctatgaggtcgtcagagatggtatcaccatagacaagttctagagcatatacctggcatgaaaaatgtgacgcggttattcatatatgcttctctcctctcagttggtacaccgaaattcatacaatatcgtgggctaattctgcatttgtatgaaagtttaatatgcttgacgtgttaatcacactgctagagcatgcgataaatcgcagttggttcattattaggaaattgcattgagctgtaatcagatatgcttctctcctctcagttggtacaccgaaattcatacaatattgtgtgctaattctgcatttatgtatgaaagtttaatatgcttgacgtgttgattaaataacactgttagagcatgcgataaatcgcagttggttcattattaggaa

SEQ ID NO: 62838 - DNA, 3161 bp, Zea Mays
cgctccgcaccctctttttcactccccctcccccgccggagttgcgtttcatttgaataggcgagcggggaagcatctcctaaacaacctccgcactccccaaccgccccgaacactcgcctccattccgcgccgccgccgccacctcgcgtcgccgtccggatctcttgggctcgtgtgcggcagggatccattgatttctcctctgcgagccatggatatcactcaggttctgctagctgctcaatctccagatgctaaccttcgaacagtagcagaaggcaacctcacacagttccaggagcagaatcttcctaacttcctcctctccttatcaatagagctctcgaacgatgaaaaacctccagagtctagaaggcttgctggtattatccttaagaattctttggacgcaaaggattctgcgaaaaaggagctactgactcagcaatgggtaagcgtggacccatctatcaaattgaagattaaggagtcgttgctggtgacactaggatcttcggttcatgatgcaaggcatacctcttcacaagtcattgccaaggttgcttcaattgagataccacgtcgagaatggcaagatctcattgccaaattactggagaacatgacttctccaggtgcatctgctcctttgaagcaagcaacactagaagcattggggtatgtgtgtgaggagatttctccacaggacttggagcaggaccaagtgaatgctgttctgactgctgttgtccagggaatgaaccaggcagagctcagccctgaagttcgtcttgctgcagttaaagccctatataatgctcttgactttgctgagagtaactttgcaaatgaaatggagaggaattatataatgaaggtggtttgtgagactgctatgtctaaagaagtggagatcagacaggctgcatttgaatgccttgttgcaatagcatccacatattattcacacttagacccttatatgcaaaccatattcgacctgacagctaatgcagtgaaaggcgatgaagaaccggttgcacttcaagctgtcgagttctggagcgctatttgtgatgaagagattgcactccaagacgaatatgagggatctgaggatggcaactctactgtacactttcgctttattgaaaaagccctccctttactcgttccgatgcttctagaaactttgttgaagcaagaggaagatcaagatcaagatgataatgtttggaatatttctatgagtggtgggacgtgcctcggactcatttctagaactgttggtgatgcagttgtccctcttgtgatgccatttgtggaggccaacatcacaaagcctgattggcattgtcgtgaggcagctacctttgcatttggttctatccttgaaggtccctctgttgaaaaacttgctccactggtccaggctgggcttgatttcttgctcaacacaatgaatgatgcaaatagccaagtaaaagatactactgcttggactcttgggagggtatttgagcttttgcattctccagctggtgcaaacccaatcattaataattcaaaccttcctcgtatcatgtctgtgttgcttgagagtagtaaagatgctccaaatgtggccgaaaaagtctgtggagctatttattttcttgcccaaggttatgaagatgcggagtcaatgtcttctgtgctcacgccttatctacctaatatcattgctgcacttctttctgctgcggaccgtgctgattccacccattccaggcttcgtgcttctgcttatgaagcactgaatgagattgtgagggtcagcaacatacctgaaacttcaggcatcataggccaattgttgcaggagatcatgagaagattaaaccttacatttgatctccatatactttcttctggtgataaggagaagcaaagtgatctgcaggctttgctatgtggtgttctgcaggtcatcatccagaaactgagcagcactgatgcaaagtccatagtttctcagactgctgatcagctgatgatgctgtttctgcgtgtctttgcctgccacaattctactgtccatgaagaagcaatgcttgcaattggtgctcttgcatatgctactggtccagattttgtgaaatacatgcctaacttcttcacatacctggaggctggtttgcagaattatgaagaataccaagtgtgttccatctctgttggggtggttggtgatatttgccgtgccttggaagataaaattttgcccttctgtgatcgcattatgactgttcttcttaaggacctatcaagctctatgctcaatcggtctgtgaagcctccgattttctcatgctttggagatattgctcttgctattggtgagaattttgagaaatacctaccatatgccatgccgatgcttcaaggagctgctgaacttcttggtactcttgatcagagtgatgatgatatggttgattatggcaaccagctcagacgtggcatttttgaggcatactctggtatactccagggcatcaagggcccaaaagctcagctgatgatcccatatgcaacacatctactacagttcactgaagctgtcttcaaagataggagcagtgtgacaaaggctgcagttgctgtccttggggatcttgcagacacgcttggccagagctcaaaggatctgttcaagacccacctattccatgttgagttcttgagggagtgccaagcacaacagttggatgatgaagttcgggagactgcacaatgggcccaggggatgataaaccaggcggtggtctcctaatgtaggttgattttggtttgtttgttatgggagatttcttgtggttgtgccaagttcatttgccacagacgaaagaaaggctaccaatatatatgtagcgtcagtcgtaggatcctggtagacatatttgtgcgttgttggtctgtcaagtcggtgcgcgtcacattgtaccgagtggtttctgtccgagtatgtcttgaacagcaaaacttggttcatttatcttggtatttttcaatgctggtcatgtgtttcctttttttttcatttcttgtccagctgatcaagtttatatatgatacacacgcagactgatacatttaatcaaaatttgatctgcttg

SEQ ID NO: 62839 - DNA, 1301 bp, Zea Mays
gcatgttcggtttcatctggcgccggcctgacaacgatgatggatggagactatcggaatgctgtcaaattggtcattgaatttaaggagaccggtctcaaacctgaggtgtatagctatctcattggcttgactgccttggttaaagagcaaaaagaattctcaaaggctctgcgaagattaaatgcatcggtgaaggatggctcaatttctaaactggatgctgagagcatgcatagtatcaacaagtatcaatcggatttgttaagtgatggtgttcttttatcgaactgggtagtacaagagggcagcagcgaagttctaggacttgtgcgtgagaggctcctatcattgtatacttgtgctggttgtggcttggaagctgagcaccaactttgggaaatgaagcttcttggccgagaacctgatacacagctctatgatgttgtattggcaatttgtgcttctcaaggggaagctgctgctgttcgccgcttgcttgcaggagtcgagtcaaccagcgccggaagaaggaagaagtctatgtcatggctactgcgaggctatgtcaaaggtggcttcattctagacgcctcagaaacactcattcagatgctggacatgggcttgcttcctgattacctggatagagctgctgtactgactgcactgcggaggaacatacaggaatccggcagcctagagtcctacttgaagctttgcaagcgactatctgagacagatctgattggaccatgtattgtgtatctatatgtccgcaaattcaaattgtggatggcacacatgctttagagttctgatgaaccctttcgtcatatatccactcatggcaggtacaaaatggagatctctaaaaaatgtgtgtggctcaaacgcttgtccctgatgaacaagacatagaagcttcaatttcggtgaaccggttggtacataataatggttccttgtatatttttgaccgaagtagaggtatcaactggttgtttgttgtaaacagcgctgttgtagtactctgaacagagtccatatcgtacatgtaaattctctgtgtcactgttctcatatgcagttgctgttgaaatctgtgcgttactgcagcctgtaggggataggcaaaatggaaacttttgttgatataaatataatgtacagttctgtcgtgactgaacttctaaagttgtaccgagatgaacttctaaagttgtaccgagattacacgatacatctctgtttttctgtttgtggtgtggtttgtggcagtaactgaatgtaacttggtt

SEQ ID NO: 62840 - DNA, 1939 bp, Zea Mays
ccccacactagccgcggctggcaattcaccgcgcgactaccgtccgctataaacggcaccccagccaccgagcaaccactcccgtcagccactcctctaccggtgacgcacgcacccaatctctgatctgatctctccccctggatctcgacctccgcctggctgctccgctctgcgtcgctcgccatggcgtcctcgacggggagcttggagggcggcggcgtaggcgtgcccaagttcaagtcggcgcagccgcccagcctgcccatctcgccgccgccgatgtcgccctcctcctacttctccatcccgcccgggctcagccccgccgagctgctggactcgcccgtcctgctccactcttcctcgaacttcttcgcgtcgcccaccaccggcgccatcccggcgcagaggttcgactggaagcatgccgccgacctgatcgcgtctcagtctcagcaagacgacagccgggctgcggtcggcagcgccttcaacgacttctccttccacgcgcccaccatgcccgcgcagaccacgtccttcccttccttcaagcagcaacagcaagtcgaagcggcgaccaagagcgccgtcccgtcgagcaacaaggccagcggcggcggcggcggcaccaagcttgaggacgggtacaactggcgcaagtacgggcagaagcaggttaaggggagcgagaacccgcgcagctactacaagtgcacgtaccacagctgctccatgaagaagaaggtggagcggtccctggccgacgggcgcgtcacgcagatcgtgtacaagggcgcgcacaaccaccccaagccgctgtccacgcgccgcaactcctccggcggcgtggcggcggcggaggagcaggccgccaacaacagcagcctctctggctgcggcggcccggagcactccggcggcgccaccgccgagaactcgtccgtcacgttcggcgacgacgaggcggagaacgggtcgcagcggagcggcggtgacgagcccgacgccaagcgctggaaggcggaggacggtgagaacgaaggcagctcaggcgccggcggcggcaagccggtgcgcgagccgcggctggtggtacagacgctgagcgacatcgacatcctggacgacgggttccggtggcgcaagtacgggcagaaggtggtgaaggggaacccgaacccgcggagctactacaagtgcaccacggcggggtgccccgtgcggaagcacgtggagcgcgcgtgccacgacgcgcgcgccgtgatcaccacgtacgagggcaagcacaaccacgacgtgcccgtgggccgcggcgccgccagccgcgcggcggccgccgcgccactgctgggctccggcggcggccagatggatcatcgtcatcagcagccctacaccctggagatgctgagcggcggaggaggagggtacggcggcggctacgcggccaaggacgagccgcgggacgacctgttcgtcgactcgctcctctgctagagggagaggctagagctggcgagggggatgcggagccggtccaccaatctcggtgcggcggcggtgtctgtagcctgctgtacgtgtacggcgggggtatacgtagcgtgcacgctcgccttcgcattcagaattcagatacgtgcagtatacacacacgcacgcacacacaacacgctgtgtgcaccggatctaggttagctaggaatgggaatttgttgattcgttggaggccttcctgccacgcgcgcacggcacggtactcgtacagacagtcatacggttgtgtcgttttgtagttgtagcaacggtgccgctaacgcctgtgtggaaaggccctataccgtatatatagtgtgacaaagtcaataaagctgaaaagatcgcgttatttcctcttggagtactgctacagttatttcttcttcgagtacaa

SEQ ID NO: 62841 - DNA, 1927 bp, Zea Mays
taggtgtagcatgcacttgtgcttttttactggggaaaacaatggatggatagggcgtcaaggttcaggtcttcagctttgaaggttggcatgaaacgtccaggatacaatgcaagtgactcggactccgatgatgcaaatgatgatgccaaccaatgacagtcagttacaaattgagttattattagttaggagattcacaggtcacggctgcaggtagcagaagacgctggaggcaggaaggccttgaatgccgcagtgcatgtgaacgaagagctttcctttgcaagttacgtttggctgctgacgggtgtgtgtccggaggtcgcggctgacaccacacgcacgtctgctggtcagctgcagctacatctatgggtccatagacgatcccgcaagtggttgaaaagaagatactaaacgacttgagggcgaccatgcctcttctcgacggcgttccaactacatccctagcaccctcattgcaagggatcacggtgctggagagcggctaatccttaggcacttcttcaggcccaaccttgtctatccatccaacattttccgacgaaggtttaggatacgttgtcacatgttcttgcagattatgcaatcaattcaactggtagatgactacttcacctagcgagttgatgctactggtttagccaatctcggtcctttccaaaaaaatgtgccacattgtgaatccttgcttatggtctaccatcatatgtagtggacgagtacatccagataggcaggttcactgctagagaatgcctcattcgatttatcgtgcactcataatagcctttagtgcatggtaccttaggatctcaaatgctaacgatattgctcgtatacttcatcaaagtgaggcacgtggattcctaggcatgctaggatcaattaattgcatgcactgggaatggaggaattgcctgatagtttggcgggggcagttttgttgtaggaacttgagtcctagtatgatcctagaggctatagccttttacgatctgtggatccgacatgctttctttaagatgtatggtaccaacaacgatattaacattctccaaatatcctcggtcttcaatcctttatggaggggcattatgccactggtggagtacaccttaaacgacacctcttataacatgggttatgatcttgttgatggtatctatccagattggctaatattcgttaaggcaattaggcacccatgggaagagaagaaagtctatttcacttaaatgcaagagagttgcaggaaagatgtggagcgagcttttggggttttacatgcacgttgtgttgttcttcgggatcctgcttttggttgggctcagaatcatcttggagaaagaatgacagcttgtatcataacacacaacatatttgtcgaggacaaggtcccacgtgcaagtaatgttgagtttgccgcaattggagtgcacgtggatctctcatcacaatccctgaagttcgtacagagtggctatgctcccaccacaacatcactagtctcaaatgatacaaccaacttcaacatgatctcatcgagcacttatggacttggcgtggagcaattggcgtaaaacccatgtgaagttatgtcgttttctatgatgttgtcctctatttgttctgtgttccattatgtttggttccctcaacctatgtattttatttcattatgtccaagtcatcattatgcttgttctaatgtttctttgtaatgaaccaattagttagctatgtgaacgaactatgcactctttttctattaatgtcactactggaaacaacttatttgccgagtgtctgaagcactcgacaaaggctttgccgagtgtgacactcgacaaagaggctcagtgaactatggacaactttcacgaaatattttcaacttttt

SEQ ID NO: 62842 - DNA, 2803 bp, Zea Mays
ctcacgcctcgcgcctcgttgcttcttatcctttatttttttccccaacccgtcgtcggctgccggctgcggcactctgggaggaaggccccaagcccttgccgccggagacgaaccgaaacgatggtgggcgccaatgaagtgggcgggctggagtgcgagcggaagccgctggcggaggtggtcggcgactgcgtccagcgctggttccaggacgcgtacaaggaggcgcgcaaaggcgacgtcgccaaccaagtgcttgtagcgcagatgttcttctcgggttatggaacccccaagaacgagtataagggaaaacaatggatggatagggcgtcaaggttcaggtcttcagctttgaaggttggcatgaaacgtccaggatacaatgcaagtgactcggactccgatgatgcaaatgatgatgccaaccaatgacagtcagttacaaattgagttattattagttaggagattcacaggtcacggctgcaggtagcagaagacgctggaggcaggaaggccttgaatgccgcagtgcatgtgaacgaagagctttcctttgcaagttacgtttggctgctgacgggtgtgtgtccggaggtcgcggctgacaccacacgcacgtctgctggtcagctgcagctacatctatgggtccatagacgatcccgcaagtggttgaaaagaaggtacattggatcaaacttgttatgaccatcgaaccattgaaagaaaaaacactcttggtcctaaacaagttgacgacatgaacttaatagcaatttaataacacatatcaagaaacaatgaaatagaatatttgtaaaacaattatttacattaaaacaatcgcatgtgtagaagcaaagtgcatatgtatctaaatgacttggtaaaaacacctgggatatcttaccacaatcataattacaatataggtgggccacgatggacaagtgtatccttgcaagatacatctggatataaatctttgagataatcctatttttgctacttatctcgcctcggtcctgtgtctattaaaacaaagtgttctaaaaaatagtctcttttccttataacacaatctaaacttttcaaattaatgtagataaatagcctaatctaaataactaataaaaataaacattataaaccaaaaaaataaagcatttagaaaacagataaatgaagcctacggttaaagctaaacataataactaacattattataacctaattgtaaaacacatgcgctgatatgtacacatacaaatttatggtagatactaaacgacttgagggcgaccatgcctcttctcgacggcgttccaactacatccctagcaccctcattgcaagggatcacggtgctggagagcggctaatccttaggcacttcttcaggcccaaccttgtctatccatccaacattttccgacgaaggtttaggatacgttgtcacatgttcttgcagattatgcaatcaattcaactggtagatgactacttcacctagcgagttgatgctactggtttagccaatctcggtcctttccaaaaaaatgtgccacattgtgaatccttgcttatggtctaccatcatatgtagtggacgagtacatccagataggcaggttcactgctagagaatgcctcattcgatttatcgtgcactcataatagcctttagtgcatggtaccttaggatctcaaatgctaacgatattgctcgtatacttcatcaaagtgaggcacgtggattcctaggcatgctaggatcaattaattgcatgcactgggaatggaggaattgcctgatagtttggcgggggcagttttgttgtaggaacttgagtcctagtatgatcctagaggctatagccttttacgatctgtggatccgacatgctttctttaagatgtatggtaccaacaacgatattaacattctccaaatatcctcggtcttcaatcctttatggaggggcattatgccactggtggagtacaccttaaacgacacctcttataacatgggttatgatcttgttgatggtatctatccagattggctaatattcgttaaggcaattaggcacccatgggaagagaagaaagtctatttcacttaaatgcaagagagttgcaggaaagatgtggagcgagcttttggggttttacatgcacgttgtgttgttcttcgggatcctgcttttggttgggctcagaatcatcttggagaaagaatgacagcttgtatcataacacacaacatatttgtcgaggacaaggtcccacgtgcaagtaatgttgagtttgccgcaattggagtgcacgtggatctctcatcacaatccctgaagttcgtacagagtggctatgctcccaccacaacatcactagtctcaaatgatacaaccaacttcaacatgatctcatcgagcacttatggacttggcgtggagcaattggcgtaaaacccatgtgaagttatgtcgttttctatgatgttgtcctctatttgttctgtgttccattatgtttggttccctcaacctatgtattttatttcattatgtccaagtcatcattatgcttgttctaatgtttctttgtaatgaaccaattagttagctatgtgaacgaactatgcactctttttctattaatgtcactactggaaacaacttatttgccgagtgtctgaagcactcgacaaaggctttgccgagtgtgacactcgacaaagaggctcagtgaactatggacaactttcacgaaatattttcaacttttt

SEQ ID NO: 62843 - DNA, 3479 bp, Zea Mays
ctcacgcctcgcgcctcgttgcttcttatcctttatttttttccccaacccgtcgtcggctgccggctgcggcactctgggaggaaggccccaagcccttgccgccggagacgaaccgaaacgatggtgggcgccaatgaagtgggcgggctggagtgcgagcggaagccgctggcggaggtggtcggcgactgcgtccagcgctggttccaggacgcgtacaaggaggcgcgcaaaggcgacgtcgccaaccaagtgcttgtagcgcagatgttcttctcgggttatggaacccccaagaacgagtataagggaaaacaatggatggatagggcgtcaaggttcaggtcttcagctttgaaggttggcatgaaacgtccaggatacaatgcaagtgactcggactccgatgatgcaaatgatgatgccaaccaatgacagtcagttacaaattgagttattattagttaggagattcacagggtaagaaagtttggtataagctgttgctcaccttttcatgatttctaatattcccctgaccttggtgtcgggacttcaggattgaattacttggtgatttatgcatttatcactacgtttgaatcactgtcacactgagcttgtggtgattagccagattaggtgtcctgacctttgttgttccgtgtgtcactgttgcatgctctatagcgcaatggaattcctcaggtgtttaatgacagaactgaatttatattttgatgtaattacaaggttgtggttactatagtgtcagtcccggcaacttgggagttggttatatttattaattcatttttagacccgttttttcgtttccctgtggaagcaagcattgctgttttgtggtcttattttaaatcacgctgtaattcgacttagagccattctatctaatttttggagtataaaaaggctgtcatgatattgctattttgtatctaaatcccattgttttttgttattacaaattggaagctatcaggatattgctgtttattaattcatcaagcttgttcgtcgctgctgctgctgcttgctgtggctttaatccggctgcggcttctgcagtattttgtttctatagatagatgaagcagtctgaacagttgcagtaactgccgctcctctcctgcagtcacggctgcaggtagcagaagacgctggaggcaggaaggccttgaatgccgcagtgcatgtgaacgaagagctttcctttgcaagttacgtttggctgctgacgggtgtgtgtccggaggtcgcggctgacaccacacgcacgtctgctggtcagctgcagctacatctatgggtccatagacgatcccgcaagtggttgaaaagaaggtacattggatcaaacttgttatgaccatcgaaccattgaaagaaaaaacactcttggtcctaaacaagttgacgacatgaacttaatagcaatttaataacacatatcaagaaacaatgaaatagaatatttgtaaaacaattatttacattaaaacaatcgcatgtgtagaagcaaagtgcatatgtatctaaatgacttggtaaaaacacctgggatatcttaccacaatcataattacaatataggtgggccacgatggacaagtgtatccttgcaagatacatctggatataaatctttgagataatcctatttttgctacttatctcgcctcggtcctgtgtctattaaaacaaagtgttctaaaaaatagtctcttttccttataacacaatctaaacttttcaaattaatgtagataaatagcctaatctaaataactaataaaaataaacattataaaccaaaaaaataaagcatttagaaaacagataaatgaagcctacggttaaagctaaacataataactaacattattataacctaattgtaaaacacatgcgctgatatgtacacatacaaatttatggtagatactaaacgacttgagggcgaccatgcctcttctcgacggcgttccaactacatccctagcaccctcattgcaagggatcacggtgctggagagcggctaatccttaggcacttcttcaggcccaaccttgtctatccatccaacattttccgacgaaggtttaggatacgttgtcacatgttcttgcagattatgcaatcaattcaactggtagatgactacttcacctagcgagttgatgctactggtttagccaatctcggtcctttccaaaaaaatgtgccacattgtgaatccttgcttatggtctaccatcatatgtagtggacgagtacatccagataggcaggttcactgctagagaatgcctcattcgatttatcgtgcactcataatagcctttagtgcatggtaccttaggatctcaaatgctaacgatattgctcgtatacttcatcaaagtgaggcacgtggattcctaggcatgctaggatcaattaattgcatgcactgggaatggaggaattgcctgatagtttggcgggggcagttttgttgtaggaacttgagtcctagtatgatcctagaggctatagccttttacgatctgtggatccgacatgctttctttaagatgtatggtaccaacaacgatattaacattctccaaatatcctcggtcttcaatcctttatggaggggcattatgccactggtggagtacaccttaaacgacacctcttataacatgggttatgatcttgttgatggtatctatccagattggctaatattcgttaaggcaattaggcacccatgggaagagaagaaagtctatttcacttaaatgcaagagagttgcaggaaagatgtggagcgagcttttggggttttacatgcacgttgtgttgttcttcgggatcctgcttttggttgggctcagaatcatcttggagaaagaatgacagcttgtatcataacacacaacatatttgtcgaggacaaggtcccacgtgcaagtaatgttgagtttgccgcaattggagtgcacgtggatctctcatcacaatccctgaagttcgtacagagtggctatgctcccaccacaacatcactagtctcaaatgatacaaccaacttcaacatgatctcatcgagcacttatggacttggcgtggagcaattggcgtaaaacccatgtgaagttatgtcgttttctatgatgttgtcctctatttgttctgtgttccattatgtttggttccctcaacctatgtattttatttcattatgtccaagtcatcattatgcttgttctaatgtttctttgtaatgaaccaattagttagctatgtgaacgaactatgcactctttttctattaatgtcactactggaaacaacttatttgccgagtgtctgaagcactcgacaaaggctttgccgagtgtgacactcgacaaagaggctcagtgaactatggacaactttcacgaaatattttcaacttttt

SEQ ID NO: 62844 - DNA, 2882 bp, Zea Mays
ctcacgcctcgcgcctcgttgcttcttatcctttatttttttccccaacccgtcgtcggctgccggctgcggcactctgggaggaaggccccaagcccttgccgccggagacgaaccgaaacgatggtgggcgccaatgaagtgggcgggctggagtgcgagcggaagccgctggcggaggtggtcggcgactgcgtccagcgctggttccaggacgcgtacaaggaggcgcgcaaaggcgacgtcgccaaccaagtgcttgtagcgcagatgttcttctcgggttatggaacccccaagaacgagtataagggaaaacaatggatggatagggcgtcaaggttcaggtcttcagctttgaaggttggcatgaaacgtccaggatacaatgcaagtgactcggactccgatgatgcaaatgatgatgccaaccaatgacagtcagttacaaattgagttattattagttaggagattcacagggtaagaaagtttggtataagctgttgctcaccttttcatgatttctaatattcccctgaccttggtgtcgggacttcaggattgaattacttggtgatttatgcatttatcactacgtttgaatcactgtcacactgagcttgtggtgattagccagattaggtgtcctgacctttgttgttccgtgtgtcactgttgcatgctctatagcgcaatggaattcctcaggtgtttaatgacagaactgaatttatattttgatgtaattacaaggttgtggttactatagtgtcagtcccggcaacttgggagttggttatatttattaattcatttttagacccgttttttcgtttccctgtggaagcaagcattgctgttttgtggtcttattttaaatcacgctgtaattcgacttagagccattctatctaatttttggagtataaaaaggctgtcatgatattgctattttgtatctaaatcccattgttttttgttattacaaattggaagctatcaggatattgctgtttattaattcatcaagcttgttcgtcgctgctgctgctgcttgctgtggctttaatccggctgcggcttctgcagtattttgtttctatagatagatgaagcagtctgaacagttgcagtaactgccgctcctctcctgcagtcacggctgcaggtagcagaagacgctggaggcaggaaggccttgaatgccgcagtgcatgtgaacgaagagctttcctttgcaagttacgtttggctgctgacgggtgtgtgtccggaggtcgcggctgacaccacacgcacgtctgctggtcagctgcagctacatctatgggtccatagacgatcccgcaagtggttgaaaagaagatactaaacgacttgagggcgaccatgcctcttctcgacggcgttccaactacatccctagcaccctcattgcaagggatcacggtgctggagagcggctaatccttaggcacttcttcaggcccaaccttgtctatccatccaacattttccgacgaaggtttaggatacgttgtcacatgttcttgcagattatgcaatcaattcaactggtagatgactacttcacctagcgagttgatgctactggtttagccaatctcggtcctttccaaaaaaatgtgccacattgtgaatccttgcttatggtctaccatcatatgtagtggacgagtacatccagataggcaggttcactgctagagaatgcctcattcgatttatcgtgcactcataatagcctttagtgcatggtaccttaggatctcaaatgctaacgatattgctcgtatacttcatcaaagtgaggcacgtggattcctaggcatgctaggatcaattaattgcatgcactgggaatggaggaattgcctgatagtttggcgggggcagttttgttgtaggaacttgagtcctagtatgatcctagaggctatagccttttacgatctgtggatccgacatgctttctttaagatgtatggtaccaacaacgatattaacattctccaaatatcctcggtcttcaatcctttatggaggggcattatgccactggtggagtacaccttaaacgacacctcttataacatgggttatgatcttgttgatggtatctatccagattggctaatattcgttaaggcaattaggcacccatgggaagagaagaaagtctatttcacttaaatgcaagagagttgcaggaaagatgtggagcgagcttttggggttttacatgcacgttgtgttgttcttcgggatcctgcttttggttgggctcagaatcatcttggagaaagaatgacagcttgtatcataacacacaacatatttgtcgaggacaaggtcccacgtgcaagtaatgttgagtttgccgcaattggagtgcacgtggatctctcatcacaatccctgaagttcgtacagagtggctatgctcccaccacaacatcactagtctcaaatgatacaaccaacttcaacatgatctcatcgagcacttatggacttggcgtggagcaattggcgtaaaacccatgtgaagttatgtcgttttctatgatgttgtcctctatttgttctgtgttccattatgtttggttccctcaacctatgtattttatttcattatgtccaagtcatcattatgcttgttctaatgtttctttgtaatgaaccaattagttagctatgtgaacgaactatgcactctttttctattaatgtcactactggaaacaacttatttgccgagtgtctgaagcactcgacaaaggctttgccgagtgtgacactcgacaaagaggctcagtgaactatggacaactttcacgaaatattttcaacttttt

SEQ ID NO: 62845 - DNA, 2207 bp, Zea Mays
cctcacgcctcgcgcctcgttgcttcttatcctttatttttttccccaacccgtcgtcggctgccggctgcggcactctgggaggaaggccccaagcccttgccgccggagacgaaccgaaacgatggtgggcgccaatgaagtgggcgggctggagtgcgagcggaagccgctggcggaggtggtcggcgactgcgtccagcgctggttccaggacgcgtacaaggaggcgcgcaaaggcgacgtcgccaaccaagtgcttgtagcgcagatgttcttctcgggttatggaacccccaagaacgagtataagggaaaacaatggatggatagggcgtcaaggttcaggtcttcagctttgaaggttggcatgaaacgtccaggatacaatgcaagtgactcggactccgatgatgcaaatgatgatgccaaccaatgacagtcagttacaaattgagttattattagttaggagattcacaggtcacggctgcaggtagcagaagacgctggaggcaggaaggccttgaatgccgcagtgcatgtgaacgaagagctttcctttgcaagttacgtttggctgctgacgggtgtgtgtccggaggtcgcggctgacaccacacgcacgtctgctggtcagctgcagctacatctatgggtccatagacgatcccgcaagtggttgaaaagaagatactaaacgacttgagggcgaccatgcctcttctcgacggcgttccaactacatccctagcaccctcattgcaagggatcacggtgctggagagcggctaatccttaggcacttcttcaggcccaaccttgtctatccatccaacattttccgacgaaggtttaggatacgttgtcacatgttcttgcagattatgcaatcaattcaactggtagatgactacttcacctagcgagttgatgctactggtttagccaatctcggtcctttccaaaaaaatgtgccacattgtgaatccttgcttatggtctaccatcatatgtagtggacgagtacatccagataggcaggttcactgctagagaatgcctcattcgatttatcgtgcactcataatagcctttagtgcatggtaccttaggatctcaaatgctaacgatattgctcgtatacttcatcaaagtgaggcacgtggattcctaggcatgctaggatcaattaattgcatgcactgggaatggaggaattgcctgatagtttggcgggggcagttttgttgtaggaacttgagtcctagtatgatcctagaggctatagccttttacgatctgtggatccgacatgctttctttaagatgtatggtaccaacaacgatattaacattctccaaatatcctcggtcttcaatcctttatggaggggcattatgccactggtggagtacaccttaaacgacacctcttataacatgggttatgatcttgttgatggtatctatccagattggctaatattcgttaaggcaattaggcacccatgggaagagaagaaagtctatttcacttaaatgcaagagagttgcaggaaagatgtggagcgagcttttggggttttacatgcacgttgtgttgttcttcgggatcctgcttttggttgggctcagaatcatcttggagaaagaatgacagcttgtatcataacacacaacatatttgtcgaggacaaggtcccacgtgcaagtaatgttgagtttgccgcaattggagtgcacgtggatctctcatcacaatccctgaagttcgtacagagtggctatgctcccaccacaacatcactagtctcaaatgatacaaccaacttcaacatgatctcatcgagcacttatggacttggcgtggagcaattggcgtaaaacccatgtgaagttatgtcgttttctatgatgttgtcctctatttgttctgtgttccattatgtttggttccctcaacctatgtattttatttcattatgtccaagtcatcattatgcttgttctaatgtttctttgtaatgaaccaattagttagctatgtgaacgaactatgcactctttttctattaatgtcactactggaaacaacttatttgccgagtgtctgaagcactcgacaaaggctttgccgagtgtgacactcgacaaagaggctcagtgaactatggacaactttcacgaaatattttcaacttttt

SEQ ID NO: 62846 - DNA, 327 bp, Zea Mays
ctcacgcctcgcgcctcgttgcttcttatcctttatttttttccccaacccgtcgtcggctgccggctgcggcactctgggaggaaggccccaagcccttgccgccggagacgaaccgaaacgatggtgggcgccaatgaagtgggcgggctggagtgcgagcggaagccgctggcggaggtggtcggcgactgcgtccagcgctggttccaggacgcgtacaaggaggcgcgcaaaggcgacgtcgccaaccaagtgcttgtagcgcagatgttcttctcgggttatggaacccccaagaacgagtataagggatgatttttctgt

SEQ ID NO: 62847 - DNA, 639 bp, Zea Mays
gtgtaccggatgtgtgttcaaatatacttcacaagtttcattgatagtttataggcttcttgtgaatgtacgtttagtataaagcaagagaaacctgaaaccccttgagcttgcctctgaatcatcaccatcaccaactcacacagtcacatgtcacatcacacaggtgccatttggtttgcttcaattattttcacttttttttaatgtgtggctcatttgattcatccatgtccaattgtaaccacattgcagacatgcacaagcataataagctaagccacaccgccagttggctgggcaacaacctatatgtcgcatgattcgcatccgatccggtcagatcgcaagcacgaggccagggagaagagaagtgtacgtacagtgtgtagccaagcgtgtgcggctgtgcgctagagtagaggtcggcttgtcctttatatagagaaaacttgttgggtagtcgctcgctggcgctgccttgtgatgtgagtaggattccaaaagcatataatttcccccctttttgtgggataaatctagatagtggtaatgcgattcagttgcagatatataccttgttgctgcaagttaagagtattggatcagctactttttgagtacaattggactgagcaa

SEQ ID NO: 62848 - DNA, 1731 bp, Zea Mays
cctcgctcccgcaatcaacacgtcctcgccttaccatgccgatccagccccagctctccatggaaggcgcgacgaccgagccccaactctccatggcctcccgcaatcaatagtctctcgccccaccacgacaaccctgccctggctccccatggaaggccatggaaggtgtgactgagccccagctcaacaaggaaggcgcgatccactctcctcgccccaccatcggcgtccactatccatcgaaaagtcccgccttcctagtcccccttccccacctacgacgaccgccgcggacgtatcaaaaaagattcctcctcccagtgtcgcctccacgcgtggaggcggcgatccattccgccccctaggattttgctcctcccgatccggacgtcatatctcgcgtggcggcacgcggatctgggggtttctctagaggcggcggtggcggccggaacaggggcagatggcgctctcggggatgcgagggctcttggtcttcatcagcgacatacgcaactgccacaataaggagcaggagcacctccgcgtcgagagtggacaccacacttcacccattccttctcggcgctcgcccaggaagactatagccaggtacgatgatactatatattatgtagtgttccttgcacaatctagcagaccgggacgccagtggggaggcgacgggtgttcgtgtagatagagactggctgcattctcggcatgtacctggaccgcggggacaacatgcacaccgtcaagcgctacttgcagctcacgctcaacgtgcccagcggcgagaccttgctcaccttcgacgatcgcgtcctagaccaaaaatgcttgggtaaaggagtttggcttggaggctatgtggaagagcccaaatggcacaattaggaacattctgaatggcactgtgttcagagaaccaatcatctgcaaaaatgtcccatagcttgttgtagatatggaaggaagaccacaatcatagagggaaaagaagagcaagttgagctggaggtgttcaacttcactggtgtaggaggagttgccttatcaatgtacaacactgacgaggtgcacttggtgcttgctactattccattaagaaatggccattgtatcttcgcaccaagaacattattttgaagaaatattatggcaagttcaagtatctccagtttcttgttttaccatatccaatccaatttgtgcatgggcctccgacgatgccacggtgatcaaggtagacatcgtcaatagccatgacacgctgctcgccgtcgtccaggtcatcgccgacctcaacctaataatctggaaggcatacttctcctctgatggcagctgattcatggacgtgttcaatgtcaccgaccgtgaagtaacagggttctcgacgcccaatcatcctacatccagaagacgctgtaggtggatgactggtactatctggaggcacgcaacacggtgggcatcgtggcattggaggactacacctccatcgatctcatgggcacagacccgggcctgctattcgaggctatctgcccagttaacaagaagatggcttttgtcggttatgccagagcatgagcttgttcatgttggtccagatacccgcttgaactacaaagttatcgagctacgaacactctcaaaccaagccatattccagatctagtgtcaagttgaaaacaaagcgaatcgctgaatgaaggatag

SEQ ID NO: 62849 - DNA, 2680 bp, Zea Mays
gtgagttctctcgttcctctcctttcctaccgcacccgtctcctggcgcacctcgcccttgccccaccccggatctcagcctccagtcctcgctgctgctgctccagcgccacgaattgctcgcctcgtctccctctcccttcgaccccgcctcgtcgtggtcgtggtgaccaaggaacccaagctcggtggtggcggatcgggggccggcgacggcgacgacccgagggaagaagctcacgccgctgcacctggccgcgagcccgcgacactagcggaggacaagcgcgacatcctacggtaggccatcacaggggcgttgggggacgacggagtggctcgggacttgttcgagcacgcgttgagcaacgcgccggagaagcttccattgcagtcctcgccgtcaaaatccgtccgggtgtccacgacactggtcgaggtcctgcgccgcgcgcagtccacgcagaaaaagcgcacgaacgctgctcgatctgctccaggactcacagatctccgtggagtagctccacatccccactcgctagataagatcttccctcgcttgtttcttccgctgctggtccgctgtttgctcactgttctgatgttttttcaggtccacatgccgaaagcaatggcgacgctgaggagatagctgctcgtgaagcctgcccgagcctcctcgtgccagatctggccaaacttgaatcagttgtttactgatttctcccgagcatatgtgtgctgctggcaacttaccacatggggtattcttcatcttactagatcaagtctcacctaaattgaattgaaactgaatatttttaacaaattgagcagcgacttacagctccaggtttataataactgtagctaacatatattttcaatttgcttctactggcagtggcggtgttgtatgtttcttttcttataaggtggtccaaagcaaaatctgagtcgaaatagtcatgattcgacaactatagaaacaacttcatatatatttgttggatgttgccatattagctgtaaaattggccatgattcttggtatattttcatatgacacagtgtttcgtatctgcctccaaactacccaacctaatgcagatgataaatatgtagctattgataaatatatggttctcattacttgtattatttgtcaagtgttcctagaaaactctcagagattattacagttgaagaggccaaagagttctacccactctttgggctaggtgccaatgtggcactcatcttttctggacacacattgaagtatttctcaaatatgaggaagattaggtcctagagtggatggttggccaaattcgttgaaggacatgacgagcatattggttgtaccgggtcttgtcatcactggtgtctattggggagtgaacagatttgttattgatacctcatcaatgtagcggaaaaagaaggtcaaaccaaagctcatcatgggtgagagcttgaaggttctattgtcatcttggtatgtgagggattttgcaacattggtcgttgattatggaataagcattaaccttatcgagagggaaaagaagagcaagttgagctggaggtgttcaacttcactggtgtaggaggagttgccttatcaatgtacaacactgacgaggtgcacttggtgcttgctactattccattaagaaatggccattgtatcttcgcaccaagaacattattttgaagaaatattatggcaagttcaagtatctccagtttcttgttttaccatatccaatccaatttgtgcatgggcctccgacgatgccacggtgatcaaggtagacatcgtcaatagccatgacacgctgctcgccgtcgtccaggtcatcgccgacctcaacctaataatctggaaggcatacttctcctctgatggcagctgattcatggacgtgttcaatgtcaccgaccgtgaagtaacagggttctcgacgcccaatcatcctacatccagaagacgctgtaggtggatgactggtactatctggaggcacgcaacacggtgggcatcgtggcattggaggactacacctccatcgatctcatgggcacagacccgggcctgctattcgaggctatctgcccagttaacaagaagatggcttttgtcggttatgccagagcatgagcttgttcatgttggtccagatacccgcttgaactacaaagttatcgagctacgaacactctcaaaccaagccatattccagatctagtgtcaagttgaaaaccgaggttacgtgtgatctgaaaagcaagctggtaactggaatctcaagtgccaggcaagttgtgcccttgattcacttttgttgcccaataatgttctttataatcattcaccatgcataggcttaattttgatgggacccgataggtcaccctagattgtttatctctttaccttgttatccctgaatcacttgggtagttttgctattgctttacatggttttgggataatattttgttatatccatgttccagttatcttgttattttatttcatgtcaagatcataaaattttaattggaacatggagcttaacttgagaaacacgtgccaccacaagggtttaatgggtcgcccttggccaactaactaggaaagctagtggaagactaccttacccgtaag

SEQ ID NO: 62850 - DNA, 1934 bp, Zea Mays
gttctctcgttcctctcctttcctaccgcacccgtctcctggcgcacctcgcccttgccccaccccggatctcagcctccagtcctcgctgctgctgctccagcgccacgaattgctcgcctcgtctccctctcccttcgaccccgcctcgtcgtggtcgtggtgaccaaggaacccaagctcggtggtggcggatcgggggccggcgacggcgacgacccgagggaagaagctcacgccgctgcacctggccgcgagcccgcgacactagcggaggacaagcgcgacatcctacggtaggccatcacaggggcgttgggggacgacggagtggctcgggacttgttcgagcacgcgttgagcaacgcgccggagaagcttccattgcagtcctcgccgtcaaaatccgtccgggtgtccacgacactggtcgaggtcctgcgccgcgcgcagtccacgcagaaaaagcgcacgaacgctgctcgatctgctccaggactcacagatctccgtggagtagctccacatccccactcgctagataagatcttccctcgcttgtttcttccgctgctggtccgctgtttgctcactgttctgatgttttttcaggtccacatgccgaaagcaatggcgacgctgaggagatagctgctcgtgaagcctgcccgagcctcctcgtgccagatctggccaaacttgaatcagttgtttactgatttctcccgagcatatgtgtgctgctggcaacttaccacatgggattattacagttgaagaggccaaagagttctacccactctttgggctaggtgccaatgtggcactcatcttttctggacacacattgaagtatttctcaaatatgaggaagattaggtcctagagtggatggttggccaaattcgttgaaggacatgacgagcatattggttgtaccgggtcttgtcatcactggtgtctattggggagtgaacagatttgttattgatacctcatcaatgtagcggaaaaagaaggtcaaaccaaagctcatcatgggtgagagcttgaaggttctattgtcatcttggtatgtgagggattttgcaacattggtcgttgattatggaataagcattaaccttatcgaggcactgtgttcagagaaccaatcatctgcaaaaatgtcccatagcttgttgtagatatggaaggaagaccacaatcatagagggaaaagaagagcaagttgagctggaggtgttcaacttcactggtgtaggaggagttgccttatcaatgtacaacactgacgaggtgcacttggtgcttgctactattccattaagaaatggccattgtatcttcgcaccaagaacattattttgaagaaatattatggcaagttcaagtatctccagtttcttgttttaccatatccaatccaatttgtgcatgggcctccgacgatgccacggtgatcaaggtagacatcgtcaatagccatgacacgctgctcgccgtcgtccaggtcatcgccgacctcaacctaataatctggaaggcatacttctcctctgatggcagctgattcatggacgtgttcaatgtcaccgaccgtgaagtaacagggttctcgacgcccaatcatcctacatccagaagacgctgtaggtggatgactggtactatctggaggcacgcaacacggtgggcatcgtggcattggaggactacacctccatcgatctcatgggcacagacccgggcctgctattcgaggctatctgcccagttaacaagaagatggcttttgtcggttatgccagagcatgagcttgttcatgttggtccagatacccgcttgaactacaaagttatcgagctacgaacactctcaaaccaagccatattccagatctagtgtcaagttgaaaaccgaggttacgtgt

SEQ ID NO: 62851 - DNA, 2357 bp, Zea Mays
gtgagttctctcgttcctctcctttcctaccgcacccgtctcctggcgcacctcgcccttgccccaccccggatctcagcctccagtcctcgctgctgctgctccagcgccacgaattgctcgcctcgtctccctctcccttcgaccccgcctcgtcgtggtcgtggtgaccaaggaacccaagctcggtggtggcggatcgggggccggcgacggcgacgacccgagggaagaagctcacgccgctgcacctggccgcgagcccgcgacactagcggaggacaagcgcgacatcctacggtaggccatcacaggggcgttgggggacgacggagtggctcgggacttgttcgagcacgcgttgagcaacgcgccggagaagcttccattgcagtcctcgccgtcaaaatccgtccgggtgtccacgacactggtcgaggtcctgcgccgcgcgcagtccacgcagaaaaagcgcacgaacgctgctcgatctgctccaggactcacagatctccgtggagtagctccacatccccactcgctagataagatcttccctcgcttgtttcttccgctgctggtccgctgtttgctcactgttctgatgttttttcaggtccacatgccgaaagcaatggcgacgctgaggagatagctgctcgtgaagcctgcccgagcctcctcgtgccagatctggccaaacttgaatcagttgtttactgatttctcccgagcatatgtgtgctgctggcaacttaccacatgggtggcggtgttgtatgtttcttttcttataaggtggtccaaagcaaaatctgagtcgaaatagtcatgattcgacaactatagaaacaacttcatatatatttgttggatgttgccatattagctgtaaaattggccatgattcttggtatattttcatatgacacagtgtttcgtatctgcctccaaactacccaacctaatgcagatgataaatatgtagctattgataaatatatggttctcattacttgtattatttgtcaagtgttcctagaaaactctcagagattattacagttgaagaggccaaagagttctacccactctttgggctaggtgccaatgtggcactcatcttttctggacacacattgaagtatttctcaaatatgaggaagattaggtcctagagtggatggttggccaaattcgttgaaggacatgacgagcatattggttgtaccgggtcttgtcatcactggtgtctattggggagtgaacagatttgttattgatacctcatcaatgtagcggaaaaagaaggtcaaaccaaagctcatcatgggtgagagcttgaaggttctattgtcatcttggtatgtgagggattttgcaacattggtcgttgattatggaataagcattaaccttatcgaggcactgtgttcagagaaccaatcatctgcaaaaatgtcccatagcttgttgtagatatggaaggaagaccacaatcatagagggaaaagaagagcaagttgagctggaggtgttcaacttcactggtgtaggaggagttgccttatcaatgtacaacactgacgaggtgcacttggtgcttgctactattccattaagaaatggccattgtatcttcgcaccaagaacattattttgaagaaatattatggcaagttcaagtatctccagtttcttgttttaccatatccaatccaatttgtgcatgggcctccgacgatgccacggtgatcaaggtagacatcgtcaatagccatgacacgctgctcgccgtcgtccaggtcatcgccgacctcaacctaataatctggaaggcatacttctcctctgatggcagctgattcatggacgtgttcaatgtcaccgaccgtgaagtaacagggttctcgacgcccaatcatcctacatccagaagacgctgtaggtggatgactggtactatctggaggcacgcaacacggtgggcatcgtggcattggaggactacacctccatcgatctcatgggcacagacccgggcctgctattcgaggctatctgcccagttaacaagaagatggcttttgtcggttatgccagagcatgagcttgttcatgttggtccagatacccgcttgaactacaaagttatcgagctacgaacactctcaaaccaagccatattccagatctagtgtcaagttgaaaacgtaagtgtgacataatatttttattgccaatctgttattgttcatatatttgataaaagattgttgtcctacaactccatacttaaattgtaatacccactttgtaaaaaaaactaaagggagagattatattcctttatatgt

SEQ ID NO: 62852 - DNA, 422 bp, Zea Mays
ccgccccaccctcctccccaccttggatggaaccttccatcaacacactcctctgctccataaacaacgcccatctccaatagcggaaggttggtgaggatctgcgccatcaacgcccgtctccgatagcggaaggtggctgatgatccgcgccaacccatacgcgatatcagcatcgccgtcatggaagattgcctgcgcgcgccatcgacagcgtgggccctcctccccatgccaatccaccccaccctcctccccaccatcgatggaaccttccctgaacgccctccaacgggcggatggcggcgcagagactaccaacaacggacggacgcctctgccccaccatcgctgaagcaacgcggaacacttctctgccccggctctcctcttcctagatccactcttctcgctcccaccat

SEQ ID NO: 62853 - DNA, 1613 bp, Zea Mays
gttctctcgttcctctcctttcctaccgcacccgtctcctggcgcacctcgcccttgccccaccccggatctcagcctccagtcctcgctgctgctgctccagcgccacgaattgctcgcctcgtctccctctcccttcgaccccgcctcgtcgtggtcgtggtgaccaaggaacccaagctcggtggtggcggatcgggggccggcgacggcgacgacccgagggaagaagctcacgccgctgcacctggccgcgagcccgcgacactagcggaggacaagcgcgacatcctacggtaggccatcacaggggcgttgggggacgacggagtggctcgggacttgttcgagcacgcgttgagcaacgcgccggagaagcttccattgcagtcctcgccgtcaaaatccgtccgggtgtccacgacactggtcgaggtcctgcgccgcgcgcagtccacgcagaaaaagcgcacgaacgctgctcgatctgctccaggactcacagatctccgtggagtagctccacatccccactcgctagataagatcttccctcgcttgtttcttccgctgctggtccgctgtttgctcactgttctgatgttttttcaggtccacatgccgaaagcaatggcgacgctgaggagatagctgctcgtgaagcctgcccgagcctcctcgtgccagatctggccaaacttgaatcagttgtttactgatttctcccgagcatatgtgtgctgctggcaacttaccacatggggtattcttcatcttactagatcaagtctcacctaaattgaattgaaactgaatatttttaacaaattgagcagcgacttacagctccaggtttataataactgtagctaacatatattttcaatttgcttctactggcagtggcggtgttgtatgtttcttttcttataaggtggtccaaagcaaaatctgagtcgaaatagtcatgattcgacaactatagaaacaacttcatatatatttgttggatgttgccatattagctgtaaaattggccatgattcttggtatattttcatatgacacagtgtttcgtatctgcctccaaactacccaacctaatgcagatgataaatatgtagctattgataaatatatgattattacagttgaagaggccaaagagttctacccactctttgggctaggtgccaatgtggcactcatcttttctggacacacattgaagtatttctcaaatatgaggaagattaggtcctagagtggatggttggccaaattcgttgaaggacatgacgagcatattggttgtaccgggtcttgtcatcactggtgtctattggggagtgaacagatttgttattgatacctcatcaatgtagcggaaaaagaaggtcaaaccaaagctcatcatgggtgagagcttgaaggttctattgtcatcttggtatgtgagggattttgcaacattggtcgttgattatggaataagcattaaccttatcgaggtggatcctttgattctattgaaaatgcaatgctcaacatttttattgttgttaacttttctaattaaacagaatgcagagtttttaacaacaaaattgttg

SEQ ID NO: 62854 - DNA, 1285 bp, Zea Mays
gttctctcgttcctctcctttcctaccgcacccgtctcctggcgcacctcgcccttgccccaccccggatctcagcctccagtcctcgctgctgctgctccagcgccacgaattgctcgcctcgtctccctctcccttcgaccccgcctcgtcgtggtcgtggtgaccaaggaacccaagctcggtggtggcggatcgggggccggcgacggcgacgacccgagggaagaagctcacgccgctgcacctggccgcgagcccgcgacactagcggaggacaagcgcgacatcctacggtaggccatcacaggggcgttgggggacgacggagtggctcgggacttgttcgagcacgcgttgagcaacgcgccggagaagcttccattgcagtcctcgccgtcaaaatccgtccgggtgtccacgacactggtcgaggtcctgcgccgcgcgcagtccacgcagaaaaagcgcacgaacgctgctcgatctgctccaggactcacagatctccgtggagtagctccacatccccactcgctagataagatcttccctcgcttgtttcttccgctgctggtccgctgtttgctcactgttctgatgttttttcaggtccacatgccgaaagcaatggcgacgctgaggagatagctgctcgtgaagcctgcccgagcctcctcgtgccagatctggccaaacttgaatcagttgtttactgatttctcccgagcatatgtgtgctgctggcaacttaccacatggggttctcattacttgtattatttgtcaagtgttcctagaaaactctcagagattattacagttgaagaggccaaagagttctacccactctttgggctaggtgccaatgtggcactcatcttttctggacacacattgaagtatttctcaaatatgaggaagattaggtcctagagtggatggttggccaaattcgttgaaggacatgacgagcatattggttgtaccgggtcttgtcatcactggtgtctattggggagtgaacagatttgttattgatacctcatcaatgtagcggaaaaagaaggtcaaaccaaagctcatcatgggtgagagcttgaaggttctattgtcatcttggtatgtgagggattttgcaacattggtcgttgattatggaataagcattaaccttatcgaggtggatcctttgattctattgaaaatgcaatgctcaacatttttattgttgttaacttttctaattaaacagaatgcagagtttttaacaacaaaattgttg

SEQ ID NO: 62855 - DNA, 1382 bp, Zea Mays
gttctctcgttcctctcctttcctaccgcacccgtctcctggcgcacctcgcccttgccccaccccggatctcagcctccagtcctcgctgctgctgctccagcgccacgaattgctcgcctcgtctccctctcccttcgaccccgcctcgtcgtggtcgtggtgaccaaggaacccaagctcggtggtggcggatcgggggccggcgacggcgacgacccgagggaagaagtctcagtcgccaccccttcctcgcagctcacgccgctgcacctggccgcgagcccgcgacactagcggaggacaagcgcgacatcctacggtaggccatcacaggggcgttgggggacgacggagtggctcgggacttgttcgagcacgcgttgagcaacgcgccggagaagcttccattgcagtcctcgccgtcaaaatccgtccgggtgtccacgacactggtcgaggtcctgcgccgcgcgcagtccacgcagaaaaagcgcacgaacgctgctcgatctgctccaggactcacagatctccgtggagtagctccacatccccactcgctagataagatcttccctcgcttgtttcttccgctgctggtccgctgtttgctcactgttctgatgttttttcaggtccacatgccgaaagcaatggcgacgctgaggagatagctgctcgtgaagcctgcccgagcctcctcgtgccagatctggccaaacttgaatcagttgtttactgatttctcccgagcatatgtgtgctgctggcaacttaccacatgggtgtttcgtatctgcctccaaactacccaacctaatgcagatgataaatatgtagctattgataaatatatggttctcattacttgtattatttgtcaagtgttcctagaaaactctcagagattattacagttgaagaggccaaagagttctacccactctttgggctaggtgccaatgtggcactcatcttttctggacacacattgaagtatttctcaaatatgaggaagattaggtcctagagtggatggttggccaaattcgttgaaggacatgacgagcatattggttgtaccgggtcttgtcatcactggtgtctattggggagtgaacagatttgttattgatacctcatcaatgtagcggaaaaagaaggtcaaaccaaagctcatcatgggtgagagcttgaaggttctattgtcatcttggtatgtgagggattttgcaacattggtcgttgattatggaataagcattaaccttatcgaggtggatcctttgattctattgaaaatgcaatgctcaacatttttattgttgttaacttttctaattaaacagaatgcagagtttttaacaacaaaattgttg

SEQ ID NO: 62856 - DNA, 1261 bp, Zea Mays
gttctctcgttcctctcctttcctaccgcacccgtctcctggcgcacctcgcccttgccccaccccggatctcagcctccagtcctcgctgctgctgctccagcgccacgaattgctcgcctcgtctccctctcccttcgaccccgcctcgtcgtggtcgtggtgaccaaggaacccaagctcggtggtggcggatcgggggccggcgacggcgacgacccgagggaagaagtctcagtcgccaccccttcctcgcagctcacgccgctgcacctggccgcgagcccgcgacactagcggaggacaagcgcgacatcctacggtaggccatcacaggggcgttgggggacgacggagtggctcgggacttgttcgagcacgcgttgagcaacgcgccggagaagcttccattgcagtcctcgccgtcaaaatccgtccgggtgtccacgacactggtcgaggtcctgcgccgcgcgcagtccacgcagaaaaagcgcacgaacgctgctcgatctgctccaggactcacagatctccgtggagtagctccacatccccactcgctagataagatcttccctcgcttgtttcttccgctgctggtccgctgtttgctcactgttctgatgttttttcaggtccacatgccgaaagcaatggcgacgctgaggagatagctgctcgtgaagcctgcccgagcctcctcgtgccagatctggccaaacttgaatcagttgtttactgatttctcccgagcatatgtgtgctgctggcaacttaccacatgggattattacagttgaagaggccaaagagttctacccactctttgggctaggtgccaatgtggcactcatcttttctggacacacattgaagtatttctcaaatatgaggaagattaggtcctagagtggatggttggccaaattcgttgaaggacatgacgagcatattggttgtaccgggtcttgtcatcactggtgtctattggggagtgaacagatttgttattgatacctcatcaatgtagcggaaaaagaaggtcaaaccaaagctcatcatgggtgagagcttgaaggttctattgtcatcttggtatgtgagggattttgcaacattggtcgttgattatggaataagcattaaccttatcgaggtggatcctttgattctattgaaaatgcaatgctcaacatttttattgttgttaacttttctaattaaacagaatgcagagtttttaacaacaaaattgttg

SEQ ID NO: 62857 - DNA, 1698 bp, Zea Mays
gttctctcgttcctctcctttcctaccgcacccgtctcctggcgcacctcgcccttgccccaccccggatctcagcctccagtcctcgctgctgctgctccagcgccacgaattgctcgcctcgtctccctctcccttcgaccccgcctcgtcgtggtcgtggtgaccaaggaacccaagctcggtggtggcggatcgggggccggcgacggcgacgacccgagggaagaagtctcagtcgccaccccttcctcgcagctcacgccgctgcacctggccgcgagcccgcgacactagcggaggacaagcgcgacatcctacggtaggccatcacaggggcgttgggggacgacggagtggctcgggacttgttcgagcacgcgttgagcaacgcgccggagaagcttccattgcagtcctcgccgtcaaaatccgtccgggtgtccacgacactggtcgaggtcctgcgccgcgcgcagtccacgcagaaaaagcgcacgaacgctgctcgatctgctccaggactcacagatctccgtggagtagctccacatccccactcgctagataagatcttccctcgcttgtttcttccgctgctggtccgctgtttgctcactgttctgatgttttttcaggtccacatgccgaaagcaatggcgacgctgaggagatagctgctcgtgaagcctgcccgagcctcctcgtgccagatctggccaaacttgaatcagttgtttactgatttctcccgagcatatgtgtgctgctggcaacttaccacatggggtattcttcatcttactagatcaagtctcacctaaattgaattgaaactgaatatttttaacaaattgagcagcgacttacagctccaggtttataataactgtagctaacatatattttcaatttgcttctactggcagtggcggtgttgtatgtttcttttcttataaggtggtccaaagcaaaatctgagtcgaaatagtcatgattcgacaactatagaaacaacttcatatatatttgttggatgttgccatattagctgtaaaattggccatgattcttggtatattttcatatgacacagtgtttcgtatctgcctccaaactacccaacctaatgcagatgataaatatgtagctattgataaatatatggttctcattacttgtattatttgtcaagtgttcctagaaaactctcagaggtcagagttgttctttgatttgacaaaccaccctgctctgcctagatgccgcgctactgctcccgcctactccgccaccgccacggcccccgagcccaaggacaacgcgtcgtccaggttcctgggcgtggaggcgaagacactcctctacaccaggctcactgacgtcctctccaaggaagcgctcttctacatcgtcatcttcctgttcattgccttcttcggtgcctttgcctatgtgctctaccccatgtgcgacgccatccaccctatcacgctcgatgaccacctcctcgcctcgctcgggcccaacttccttggatttgttgccatcctccgtgtctggagcttctacctcttctacgttatggctgagctccggggagcatcgtcatattcatcctcttctgggggtttgcccattaggtgtggttcgcccaattcaatttttgtgctctgtctatcacaactaatactttaa

SEQ ID NO: 62858 - DNA, 1532 bp, Zea Mays
gttctctcgttcctctcctttcctaccgcacccgtctcctggcgcacctcgcccttgccccaccccggatctcagcctccagtcctcgctgctgctgctccagcgccacgaattgctcgcctcgtctccctctcccttcgaccccgcctcgtcgtggtcgtggtgaccaaggaacccaagctcggtggtggcggatcgggggccggcgacggcgacgacccgagggaagaagctcacgccgctgcacctggccgcgagcccgcgacactagcggaggacaagcgcgacatcctacggtaggccatcacaggggcgttgggggacgacggagtggctcgggacttgttcgagcacgcgttgagcaacgcgccggagaagcttccattgcagtcctcgccgtcaaaatccgtccgggtgtccacgacactggtcgaggtcctgcgccgcgcgcagtccacgcagaaaaagcgcacgaacgctgctcgatctgctccaggactcacagatctccgtggagtagctccacatccccactcgctagataagatcttccctcgcttgtttcttccgctgctggtccgctgtttgctcactgttctgatgttttttcaggtccacatgccgaaagcaatggcgacgctgaggagatagctgctcgtgaagcctgcccgagcctcctcgtgccagatctggccaaacttgaatcagttgtttactgatttctcccgagcatatgtgtgctgctggcaacttaccacatgggtggcggtgttgtatgtttcttttcttataaggtggtccaaagcaaaatctgagtcgaaatagtcatgattcgacaactatagaaacaacttcatatatatttgttggatgttgccatattagctgtaaaattggccatgattcttggtatattttcatatgacacagtgtttcgtatctgcctccaaactacccaacctaatgcagatgataaatatgtagctattgataaatatatggttctcattacttgtattatttgtcaagtgttcctagaaaactctcagaggtcagagttgttctttgatttgacaaaccaccctgctctgcctagatgccgcgctactgctcccgcctactccgccaccgccacggcccccgagcccaaggacaacgcgtcgtccaggttcctgggcgtggaggcgaagacactcctctacaccaggctcactgacgtcctctccaaggaagcgctcttctacatcgtcatcttcctgttcattgccttcttcggtgcctttgcctatgtgctctaccccatgtgcgacgccatccaccctatcacgctcgatgaccacctcctcgcctcgctcgggcccaacttccttggatttgttgccatcctccgtgtctggagcttctacctcttctacgttatggctgagctccggggagcatcgtcatattcatcctcttctgggggtttgcccattaggtgtggttcgcccaattcaatttttgtgctctgtctatcacaactaatactttaa

SEQ ID NO: 62859 - DNA, 1365 bp, Zea Mays
gttctctcgttcctctcctttcctaccgcacccgtctcctggcgcacctcgcccttgccccaccccggatctcagcctccagtcctcgctgctgctgctccagcgccacgaattgctcgcctcgtctccctctcccttcgaccccgcctcgtcgtggtcgtggtgaccaaggaacccaagctcggtggtggcggatcgggggccggcgacggcgacgacccgagggaagaagctcacgccgctgcacctggccgcgagcccgcgacactagcggaggacaagcgcgacatcctacggtaggccatcacaggggcgttgggggacgacggagtggctcgggacttgttcgagcacgcgttgagcaacgcgccggagaagcttccattgcagtcctcgccgtcaaaatccgtccgggtgtccacgacactggtcgaggtcctgcgccgcgcgcagtccacgcagaaaaagcgcacgaacgctgctcgatctgctccaggactcacagatctccgtggagtagctccacatccccactcgctagataagatcttccctcgcttgtttcttccgctgctggtccgctgtttgctcactgttctgatgttttttcaggtccacatgccgaaagcaatggcgacgctgaggagatagctgctcgtgaagcctgcccgagcctcctcgtgccagatctggccaaacttgaatcagttgtttactgatttctcccgagcatatgtgtgctgctggcaacttaccacatgggtgtttcgtatctgcctccaaactacccaacctaatgcagatgataaatatgtagctattgataaatatatggttctcattacttgtattatttgtcaagtgttcctagaaaactctcagaggtcagagttgttctttgatttgacaaaccaccctgctctgcctagatgccgcgctactgctcccgcctactccgccaccgccacggcccccgagcccaaggacaacgcgtcgtccaggttcctgggcgtggaggcgaagacactcctctacaccaggctcactgacgtcctctccaaggaagcgctcttctacatcgtcatcttcctgttcattgccttcttcggtgcctttgcctatgtgctctaccccatgtgcgacgccatccaccctatcacgctcgatgaccacctcctcgcctcgctcgggcccaacttccttggatttgttgccatcctccgtgtctggagcttctacctcttctacgttatggctgagctccggggagcatcgtcatattcatcctcttctgggggtttgcccattaggtgtggttcgcccaattcaatttttgtgctctgtctatcacaactaatactttaa

SEQ ID NO: 62860 - DNA, 1871 bp, Zea Mays
agctcatatagggtacatattacaggaacatgcacaataatagggtttacattaaagttttccaaaagctcgagttggtccactactctgaatgcgcttgcttcacactcaggataattattgcctttcttgtttgttcaaatcttcaaattcgttgatatttcataaaatataatgcttatatggtaacaaatgatttagtgcttttagtttagttcataattcatatggtcaataaatttcagttcaagaaaactagagtctttgagtggtctcgacgtagcttatacaagaaagctcattttattgtactgtataaagtctggaaatccgtgtagccctttaactatttgctacattagacatagtgggcttaaaatccatcacgttatactatcaacctatcgctatagcattctcaatagaaccagttcaatatatgtttggttgtgtgcttgtgtgggttgtacactaaatacttctcattaatgcaatgatccgtagctctcctgcctttgtattaaacgacaacaaagttcaagtggagacagtagcgtagccaaaagctttcaggagtttgggcgaccacattatgcaaaaaaattagctagcaaattatagtatttttgtttgatataaagaaatatttcctttgaacttcgccaatgagcccagtcggctgcccagaggggtggacagtgactccgccgctgactcaagagtcaaaattttgagaccaaaagcagaactgtcagggcccaagagggcccactacagtaacggcggcactgtagcacacccctcaggttgtttagataaatggcaacgactggtatgcaagcagtccttctgtgcaagcgtgcaagcaaaccatctgatccattagattacgatccaactatagatacaatcatggtttgttagggttttttataaagattattgagatggtggtggaagggtttaagtgttaaatatgacttacggttggatcacgatctaacagattagatggtttgcttgcacgcttgcacagaaggattgcttgcatagcagtcgttgcctaaataaagatagactagtttggaataagattagaattagagacaagattagatctagtgcttaggggtcaagtaaccctcattatataagaagagtgattgtatcaattgaaggtaaacaagagattagaagaaaatcccttctctcttgccggtcgtgggcaaatccctacggccaacctccccagcgcccctaaccatagctgtcgccctctaaccctcacagccatctgccgctcaaaacaagaacactcaaagactaactgtcttttattttgttgagtttcagtataacacatggatttatttccgctaaaaagatgtagaaaataaaaaggaagataagaggtccaaaataacagacaaaaggatattgtggagtcgtacgggctcatatccataagctctttgatatagtccttccacatctcatgcattagcttatagaggtcgtacctacaagatcaagaacatcaggtgctatgtggaaatttgagcaaggacataaactgtagcttcgtgtagacagaaacaaaaaaaaagtcatgttttttggtggtgaggtatcaatctatgggcaacgagaaccaaggttcagctaggcgctaggcggaatctaggcggtgacccattgcctagcgcctagtcgggagtactcggtcttaggcgtttctaggcgcttttctaggcgttttagcaatatagccataaattatatatattatgtatataactatatatacgtatataactactatatatgactatatgagtcacagtaagtataaaaagaaggccagtagacat

SEQ ID NO: 62861 - DNA, 496 bp, Zea Mays
ctttctcgacgggccacagaagccgatgctggatgcagggtgagtggcaagcattcagtgggaatagtttggaggagagacacatcattttcactgcaaaagctatacctgcttcttcaagtcgagaggaggtacatgtgttcatctcaccaagaagcactgttgaagattcaaaaccaagctacagactcgtaggaagtgcattccaaagagcgtgcacagtaataaagggggactccatcgttgctcagacaaatctcttgtacaaactcaagcagaatatctattcacggcgtaaattcagagtgactatttaccctgcaaatgataacatccttgtcatggcaatggttgctacattctttatcaaaaaatgacagatgatatggatgcctgctttggtttcgaaactttggtggctaactctgctaataaatcatgtgcactgttctcgttatggatggtttctttcattttaaactttttatatcactca

SEQ ID NO: 62862 - DNA, 578 bp, Zea Mays
caccccctcccctctcccttgtgcagccgcccccctctctagcccttggctgcccccccttctcccatcttctccttcctcaaacacttgcagccaccacctcacaaccctagcccccccatcccctcctctcctaggtgcagccctcccacttgatctatgtcgcgttggtgcaaatctccaattggaatttggtggaaggaagaaggagggaggaaagagggagaattcaaggtggtggactcccggatcaaacttaggactttgtccaaactccccggtgaaggcacttgatccttacttttgggaaaggagggaagtagcagcacgaccactacacatttaaataaatgtaccactgcttagtaataatgttaaacagagatttaagtctaggggattaatatgttctagtcttcatgatagtcgaatttgcttttgggttggctggattccctctctttttatttggtcatgaatatgcattaatatctctgcgttctatttatactacgtgaattatctttcttttacattatgtataaactttatgtccctctcgttatgctactttcggg

SEQ ID NO: 62863 - DNA, 1437 bp, Zea Mays
ttctctttcacatgttgttcattcttcttcttgatgattactcatccatcgacctcttgttatgtacgtgaacacgaattctcgttttctctctctctctctctctctctctgaaagaacactcatcgtgctctagctagttatgtaggtgaaagaatctcaagctaataatagctagtgtgtcatgcacggttaactgtttttccttcagttgttgttttctttcacgtatgaggcaatgatcgtcgtttacattcatcatttcatcagtttgtttatccacacagccattcatgccttgcgtatgttttctctgaaagaacagatgctttcgtaccaatattattcacatatcagtcatgctgtgtgtgtatatctacgtaccattcacctttcagaccattccgatgctgtcaagttatatgcaacacgtacgtgtgtgtcacgcagggggataaagtgtcgataatagcggacgcgtcatcgtacatcaaggaactaaagcagaagatcgcgaagctaagccaagagatggcatcgtcgtctccgcagcacgccactactggtgtctgccaacaacaaccgtcgtcgtcgtcggtgagtgtgggagtcctgctggacaagaagggccgtttcctcgtcagtgtgttcatggacgagagctgcggcccgccgccggccgggctactcgcttccgtcctcgaggccttcgacgacatcggactcacggtgctcgaggctagggctacctgcgctggttcctttcggctagaagctgtaggagaggaagtagtagtagatgggggcctcatcatcgacgcgcacgcggtggagcaagcagtagttcaggcaatcaagaattgccctgcaaattaaactaatcgacctagtcctccaattcgatcgatcgagttgacgatgcgctggtggtggaccacaaagttcatgccaagctagagactccgagctatatatacatactgattcgcatcgtactttttgaagagagcaaagcaattttttctcttttgcctgccgcaacgagtcagtcttgcgagttctgctatttagtaaggggggcacctgtggccatcgtttggcaaatgccaatatatatacctcaattatccagcttgcgtatccaaattctagagtaaaagaattactcgcacggcatcacggagatggcgtagctagctcccatcgatcacccttcttctctctacccctgatgaatgttgtggtcttcctcgaaacatatcctggctgtatgatttctgaaggttttcgtttcatcgtctgtccactgaatctagcgtgttgtttggttcatatatttgtaacgcgactgataacgttaaatcatatttgtttaaatccaacgtaacgggataccacactagcaattgataccggcctattcagacttaccgcttg

SEQ ID NO: 62864 - DNA, 907 bp, Zea Mays
gtacgtcctcccagtcccagggttcttgtgcggacaaatgcctctatatatatatagctgtgctcgccgcaagaggagactcagaaagcagagagagcgggcaacatcgcagatagagagagagagagagagagagagagagagagagagaggcaaactggagaggccgagggtgatggtttccaaggagcagaataagcgaggagctttgcatgagaagctcaagattctccgcagcgttactcactctcatgcggaagtagtagtagatgggggcctcatcatcgacgcgcacgcggtggagcaagcagtagttcaggcaatcaagaattgccctgcaaattaaactaatcgacctagtcctccaattcgatcgatcgagttgacgatgcgctggtggtggaccacaaagttcatgccaagctagagactccgagctatatatacatactgattcgcatcgtactttttgaagagagcaaagcaattttttctcttttgcctgccgcaacgagtcagtcttgcgagttctgctatttagtaaggggggcacctgtggccatcgtttggcaaatgccaatatatatacctcaattatccagcttgcgtatccaaattctagagtaaaagaattactcgcacggcatcacggagatggcgtagctagctcccatcgatcacccttcttctctctacccctgatgaatgttgtggtcttcctcgaaacatatcctggctgtatgatttctgaaggttttcgtttcatcgtctgtccactgaatctagcgtgttgtttggttcatatatttgtaacgcgactgataacgttaaatcatatttgtttaaatccaacgtaacgggataccacactagcaattgataccggcctattcagacttaccgcttg

SEQ ID NO: 62865 - DNA, 1345 bp, Zea Mays
aagagcgcgagtgccttgcagaccgagacttgcattggcctggcctcatgtggagctagctaggaatataatgtgcatcgatcggccaccacgcgcttatatatctttcctcgtctaattaaccaggctctcgtttattttatttttttccttgattaatcctgaaccgtacgtgttgctaatggtaaaaatattagtttttgttacaaaactgtgcctacattaagtgcagccattttcgttagactttgcgactgtaaacgcgactcccatgcataaccgcgtctctccgtacgtcctcccagtcccagggttcttgtgcggacaaatgcctctatatatatatagctgtgctcgccgcaagaggagactcagaaagcagagagagcgggcaacatcgcagatagagagagagagagagagagagagagagagagagagaggcaaactggagaggccgagggtgatggtttccaaggagcagaataagcgaggagctttgcatgagaagctcaagattctccgcagcgttactcactctcatgcgggggataaagtgtcgataatagcggacgcgtcatcgtacatcaaggaactaaagcagaagatcgcgaagctaagccaagagatggcatcgtcgtctccgcagcacgccactactggtgtctgccaacaacaaccgtcgtcgtcgtcggaagtagtagtagatgggggcctcatcatcgacgcgcacgcggtggagcaagcagtagttcaggcaatcaagaattgccctgcaaattaaactaatcgacctagtcctccaattcgatcgatcgagttgacgatgcgctggtggtggaccacaaagttcatgccaagctagagactccgagctatatatacatactgattcgcatcgtactttttgaagagagcaaagcaattttttctcttttgcctgccgcaacgagtcagtcttgcgagttctgctatttagtaaggggggcacctgtggccatcgtttggcaaatgccaatatatatacctcaattatccagcttgcgtatccaaattctagagtaaaagaattactcgcacggcatcacggagatggcgtagctagctcccatcgatcacccttcttctctctacccctgatgaatgttgtggtcttcctcgaaacatatcctggctgtatgatttctgaaggttttcgtttcatcgtctgtccactgaatctagcgtgttgtttggttcatatatttgtaacgcgactgataacgttaaatcatatttgtttaaatccaacgtaacgggataccacactagcaattgataccggcctattcagacttaccgcttg

SEQ ID NO: 62866 - DNA, 553 bp, Zea Mays
ggccatttgatgtcttttttttttcttttttctttcaagtggattggattggaccgaaccccctgtccgcctcctcctccgatgatgatgatcctcggcatctatataaggggacctgctgccactacttgtttcgccaaggaaacacacaattcagcacacgcaccaccaaaaagagggagaagaggggatctcggagaagagtcttcgcctcggagagacgtgctctgcctagcatatatagccacgaaagagagtgctggccctgccggccttcgtctagctatagctaactagccagcagcagcgtgcgtgcgtgcgttcaaggcagcagaggtagagaggttttgagagagagaatggcaagcaggcaaggtgtagccgcctccatgttcgccacggcattgctcctcggcgtctttgcatccatcccacaaagtcgcagcagggtaaacggcgtctccttcactcgccatggatcacgtactcctgcgccaatggaacagtagtattagtaattcggtgatgtcacccgtcactttcttacgaaaac

SEQ ID NO: 62867 - DNA, 1926 bp, Zea Mays
taaggaaaaattccatgtatgtcactagattttatattcattccttgtaccacggagtggcgtctacaactatataatggttaccagctgctaaaactcgttaaaaacaagctaataataataacttaatagctctgggaaattagtgcagttccgcatggccagacttttacattggtacacacatgcaaattaaggcaactgatgaaccaagtgtgacgatggtatacgcacgtagtacatatataggagtgtctatcaatatatatgatatatactagttcgtgtgtgtgtgtagatcgacgtggaaaccttacccagaccagcagggggctatagcttcagcaagttgtttctgtggcttatccgatcatcgttatccagatatcctcctctccttactgatccttagccagcaaattttacatatatatatggaataaacagcagcgacggcgatggagacggagacggtgaccgtgacgccggacggagacgccgagaagaaatactggaactctctctgtgcgtgcactagtgctggtacgaccggtccatcttccacgagtctaaccgaccggccggtacggtgccacggtggtgacaggacaggagtaaggctgcatagcaggagatccttcaagttacttactagcagactagctaatgagctagtgttgagagatcttggatatcgatgccatgatgatgatgatgagtacgtagtcgatcctctcctccatgacccgcggttcgtcagctttagccgccatttaactgctgcacttatcagctaactgtggtgggggcccctgatgcctaatcatgtaacacacagcgccatcattcttcttgcattgcttatagttttatcctcctccaccaccagagtcgattccgacgtccctcgttttttgcccccctctttttttcctcttccattttttttttgttgctgctgcctgtatatacccgagcgcatgtatagtaagctagtaggagcgctgtccccccccccccccccccccctagcttgtggggcctcttgtattttccttttctatttttcgtggccgatatataaggcccgcccctagctcatgcgcttcttttatactcttttatcagtgctttatttattacgtttttatttgctacaaaaaagcatcatttctgcccatccaaatacacgcactgtacttaatatttccgaagtaaatgaagtgacgactgacgaaccgaataaaatagatcggcatgccaggaacaatggtattatcgtgcacgtaatatttttgctgatatttgtgtgctagactcgtcacagctagcagtccaacggcaaagaagataagcacttgatcacggagccgccgccaagccggccggatgcagtaaagcgtgcgtgcgtgaggggagttctgatcccagaaggctggctggctggcttttagccatcgttaccagccggccgcccgcgctctctgctgacacgacaagacatgtcaccgcgtccacacaagcaagataaagataaacttatcaaggatgacccgcccagcacagcaggtctctcttttccgtcgaattctctaccttcttgagacatcgacaactacagcgggcagaggcaggcacacgtcgttgacggacacgtagctttgtttctctcctggtcagactcctgccagccgaacacatacgcgacaacagtgctagtagctagggaataaacaaaaaagaaaaggtgcagctagcttaaagaaagtgaggcacgaccgcacgagccaggggacggagtttaaataaataaaattaggccagacggctaaagcagccgcaaaagccaaagccaaaaaaaaaactcgtgagcaggaccaggacacgttggtgacgcgtaccgcttgtcgtcgcacgacacgttgc

SEQ ID NO: 62868 - DNA, 1106 bp, Zea Mays
agagattgcatcaattgaagataagcaagagattagaaggaaatcccttctctcttgccggtcgtggggaaatccctgtggctggcctccccagcgccactaaccctagccgtcaccctcaaaccctcgcaacacatcaagtgaacagtaccgcgtctccccagccaacatcctgacgacgcccaagcgtcagggtcctggtcctagactccaaacttaccacttgttgttgaaacacttagggggtttgttacttgcgatggacattcatgcacacatgttgttactggaaaagctcgcaggactatgaatttctgtattgctttgtgctctggtgcttggataatttccccaaactggttaaaagaaagcttcagagaagggcagtttgtaggagaagcacaatatgttctggaagatgaagaatataggatgcaatataagtctgaacttagagatgcagttatgagagctaaagaaaggcctaactctttatttgctggttatactttctgtctgtcaaagtacatccagccctcttttgatgttctctcagccattattaaatctaccggaggcaagatcataaaaaaactgagtgagttagatgagctgtcccggacaatctttttggtgtgtgaagaggaggcagaacttgcattggttgcagcaaaaagtggcatcaaaacattcagcagtgactggttcatgagctgtgtcatgaaacaggaacttgaccttgaggcccctcagtttattgtatctctatgatgtgcctacagttcaagtcctcctaactcctaatatatctctttctttggttgggatataaattgtttctcctggttcttcgtggatatacaaattttctcatttccttagttacaaaagctgaagtagtgtcaaactagttatcatcctgtgacgatgatgacctgtttaaatggaaaaggttgcggtggagctattccaatttctgtataggcccatttgattcccttcattttgagtaaatggaaactaactaatggagtaggttatttcttttaaaatgtgtcattccatatctttccaaagtttatatataagtctatcttaaattcacc

SEQ ID NO: 62869 - DNA, 2781 bp, Zea Mays
cgcataaacattagccatttcttacttagttttttcatccgcggtggcatccacgagttgctgaagccagcccataaaatccatcctgcgcgcgtgcggcctctccattttccccgtcttcccgccaccccgaaaatttccgcccgaattccatttcaacattctcacatttcgcttcccagttgccacgaagaactcgaaatccaatccccggcgtcctagctcctccagattccgcagaccccgatccatcctcgacagcgactggcatagcagattccttcccagatcagatggggagaccgcggaagaccaaggccgagccggagccagcccccgccttcccgatcggcaactgcaaggtggagatccgtgggagcggactgcggtgcgagacgacagagcagggtctgacaatctccggacccaggggcgccaaggtcgtcgtctctggtgagggctctcagttcatccttctcaatccaagcgatgcagatagccaaaccaagtccttgcttgaggtcatagctactgtatcgtatcagattgtgccagctgacactcagtatgctgaaatacctctggcagttgtgagatcatcttatcaacgtgtgggtattggcaagctcttatataaggaactatcgcagaggcttcagaatgttggtgttacatccattttctgctgggcagataaggtctctgagggtttttggctaaaacagggttttgtatctgttggagaagtgaatactaaaggtaagattcgaaagattccagtaagggctgatataaagagagcattatgctttccaggaggatcaacacttatggttgcccaccttaataaagaattgccagtcatgcaaacatgggagaaaccccagacatcactccatactgtagtaccagatagtaagcctacactccatacttattatgtaacgttttaggtttttgaatcacaaatgtgctgtttttgaagcctgtgtcatggcaaatgtaagtttgatgtaaggtacatcttgcaagcttataccaacttttaggtctattataatcagggccatccttttttcgttttgttatttttcaaatttatctgtgatcagttatcaaagtaaacacacagcttgaaaaatagctacattatatgcattgctacaggacatactagtttgaaaaatagctacatttttgttctcttattgcgatttgagagtaacccaatgtgatgatgcatttgcttgaaggaagctttttttgttatggagaaccattttttatttgcttgtgagagtgaagtttaattatagtcaataacaatcttgtatatcactgttgatcattattaaagaaaatagacatatgcagccttaataacttaccaactttggtacaactgccaactcaacactgtaactttggtgcattttgaacaaattcagtttcctatgttttctactattttacagagttctttgcaggtatctctcctggtgataccaatgtctcatgtgagaacatggtcctccaaacatataaacgtcgtgttgttagaaatactgcaaaggtggcaacaaatgaagtcagcaatgcttatagtgaaagttcattatctgagcaagagccaaagaaacgcatgtacaaaacatcgtcatcatcactaaagtcaaaaagaataagatgtagcaatcatgacgacaattgccaagacatgaatcaaattggtgtgcatgacaataacttgtgcagttcccctgagaattcactgcatgtaattcttaaagaacatcacattcctagcactggagctcatatttattctaatggtagtggaagccctacaattatgctcatgaatattgcagacgaacaaaagaaggcacgccttacaaaggttgttgaaacacttagggggtttgttacttgcgatggacattcatgcacacatgttgttactggaaaagctcgcaggactatgaatttctgtattgctttgtgctctggtgcttggataatttccccaaactggttaaaagaaagcttcagagaagggcagtttgtaggagaagcacaatatgttctggaagatgaagaatataggatgcaatataagtctgaacttagagatgcagttatgagagctaaagaaaggcctaactctttatttgctggttatactttctgtctgtcaaagtacatccagccctcttttgatgttctctcagccattattaaatctaccggaggcaagatcataaaaaaactgagtgagttagatgagctgtcccggacaatctttttggtgtgtgaagaggaggcagaacttgcattggttgcagcaaaaagtggcatcaaaacattcagcagtgactggttcatgagctgtgtcatgaaacaggaacttgaccttgaggcccctcagtttattgtatctctatgatgtgcctacagttcaagtcctcctaactcctaatatatctctttctttggttgggatataaattgtttctcctggttcttcgtggatatacaaattttctcatttccttagttacaaaagctgaagtagtgtcaaactagttatcatcctgtgacgatgatgacctgtttaaatggaaaaggttgcggtggagctattccaatttctgtataggcccatttgattcccttcattttgagtaaatggaaactaactaatggagtaggttatttcttttaaaatgtgtcattccatatctttccaaagtttatatataagtctatcttaaattcacc

SEQ ID NO: 62870 - DNA, 2359 bp, Zea Mays
cgcataaacattagccatttcttacttagttttttcatccgcggtggcatccacgagttgctgaagccagcccataaaatccatcctgcgcgcgtgcggcctctccattttccccgtcttcccgccaccccgaaaatttccgcccgaattccatttcaacattctcacatttcgcttcccagttgccacgaagaactcgaaatccaatccccggcgtcctagctcctccagattccgcagaccccgatccatcctcgacagcgactggcatagcagattccttcccagatcagatggggagaccgcggaagaccaaggccgagccggagccagcccccgccttcccgatcggcaactgcaaggtggagatccgtgggagcggactgcggtgcgagacgacagagcagggtctgacaatctccggacccaggggcgccaaggtcgtcgtctctggtgagggctctcagttcatccttctcaatccaagcgatgcagatagccaaaccaagtccttgcttgaggaagtgctaatgctttataagaaagaacttcctactatggactatgctgcagacactgggagaaagtcagggtttcttgaaacatgcacaactaatgggaaatacaagactctaattctgatgtctagctctgcagcacagcatgaagaggtcatagctactgtatcgtatcagattgtgccagctgacactcagtatgctgaaatacctctggcagttgtgagatcatcttatcaacgtgtgggtattggcaagctcttatataaggaactatcgcagaggcttcagaatgttggtgttacatccattttctgctgggcagataaggtctctgagggtttttggctaaaacagggttttgtatctgttggagaagtgaatactaaaggtaagattcgaaagattccagtaagggctgatataaagagagcattatgctttccaggaggatcaacacttatggttgcccaccttaataaagaattgccagtcatgcaaacatgggagaaaccccagacatcactccatactgtagtaccagatagtatctctcctggtgataccaatgtctcatgtgagaacatggtcctccaaacatataaacgtcgtgttgttagaaatactgcaaaggtggcaacaaatgaagtcagcaatgcttatagtgaaagttcattatctgagcaagagccaaagaaacgcatgtacaaaacatcgtcatcatcactaaagtcaaaaagaataagatgtagcaatcatgacgacaattgccaagacatgaatcaaattggtgtgcatgacaataacttgtgcagttcccctgagaattcactgcatgtaattcttaaagaacatcacattcctagcactggagctcatatttattctaatggtagtggaagccctacaattatgctcatgaatattgcagacgaacaaaagaaggcacgccttacaaaggttgttgaaacacttagggggtttgttacttgcgatggacattcatgcacacatgttgttactggaaaagctcgcaggactatgaatttctgtattgctttgtgctctggtgcttggataatttccccaaactggttaaaagaaagcttcagagaagggcagtttgtaggagaagcacaatatgttctggaagatgaagaatataggatgcaatataagtctgaacttagagatgcagttatgagagctaaagaaaggcctaactctttatttgctggttatactttctgtctgtcaaagtacatccagccctcttttgatgttctctcagccattattaaatctaccggaggcaagatcataaaaaaactgagtgagttagatgagctgtcccggacaatctttttggtgtgtgaagaggaggcagaacttgcattggttgcagcaaaaagtggcatcaaaacattcagcagtgactggttcatgagctgtgtcatgaaacaggaacttgaccttgaggcccctcagtttattgtatctctatgatgtgcctacagttcaagtcctcctaactcctaatatatctctttctttggttgggatataaattgtttctcctggttcttcgtggatatacaaattttctcatttccttagttacaaaagctgaagtagtgtcaaactagttatcatcctgtgacgatgatgacctgtttaaatggaaaaggttgcggtggagctattccaatttctgtataggcccatttgattcccttcattttgagtaaatggaaactaactaatggagtaggttatttcttttaaaatgtgtcattccatatctttccaaagtttatatataagtctatcttaaattcacc

SEQ ID NO: 62871 - DNA, 2209 bp, Zea Mays
cgcataaacattagccatttcttacttagttttttcatccgcggtggcatccacgagttgctgaagccagcccataaaatccatcctgcgcgcgtgcggcctctccattttccccgtcttcccgccaccccgaaaatttccgcccgaattccatttcaacattctcacatttcgcttcccagttgccacgaagaactcgaaatccaatccccggcgtcctagctcctccagattccgcagaccccgatccatcctcgacagcgactggcatagcagattccttcccagatcagatggggagaccgcggaagaccaaggccgagccggagccagcccccgccttcccgatcggcaactgcaaggtggagatccgtgggagcggactgcggtgcgagacgacagagcagggtctgacaatctccggacccaggggcgccaaggtcgtcgtctctggtgagggctctcagttcatccttctcaatccaagcgatgcagatagccaaaccaagtccttgcttgaggtcatagctactgtatcgtatcagattgtgccagctgacactcagtatgctgaaatacctctggcagttgtgagatcatcttatcaacgtgtgggtattggcaagctcttatataaggaactatcgcagaggcttcagaatgttggtgttacatccattttctgctgggcagataaggtctctgagggtttttggctaaaacagggttttgtatctgttggagaagtgaatactaaaggtaagattcgaaagattccagtaagggctgatataaagagagcattatgctttccaggaggatcaacacttatggttgcccaccttaataaagaattgccagtcatgcaaacatgggagaaaccccagacatcactccatactgtagtaccagatagtatctctcctggtgataccaatgtctcatgtgagaacatggtcctccaaacatataaacgtcgtgttgttagaaatactgcaaaggtggcaacaaatgaagtcagcaatgcttatagtgaaagttcattatctgagcaagagccaaagaaacgcatgtacaaaacatcgtcatcatcactaaagtcaaaaagaataagatgtagcaatcatgacgacaattgccaagacatgaatcaaattggtgtgcatgacaataacttgtgcagttcccctgagaattcactgcatgtaattcttaaagaacatcacattcctagcactggagctcatatttattctaatggtagtggaagccctacaattatgctcatgaatattgcagacgaacaaaagaaggcacgccttacaaaggttgttgaaacacttagggggtttgttacttgcgatggacattcatgcacacatgttgttactggaaaagctcgcaggactatgaatttctgtattgctttgtgctctggtgcttggataatttccccaaactggttaaaagaaagcttcagagaagggcagtttgtaggagaagcacaatatgttctggaagatgaagaatataggatgcaatataagtctgaacttagagatgcagttatgagagctaaagaaaggcctaactctttatttgctggttatactttctgtctgtcaaagtacatccagccctcttttgatgttctctcagccattattaaatctaccggaggcaagatcataaaaaaactgagtgagttagatgagctgtcccggacaatctttttggtgtgtgaagaggaggcagaacttgcattggttgcagcaaaaagtggcatcaaaacattcagcagtgactggttcatgagctgtgtcatgaaacaggaacttgaccttgaggcccctcagtttattgtatctctatgatgtgcctacagttcaagtcctcctaactcctaatatatctctttctttggttgggatataaattgtttctcctggttcttcgtggatatacaaattttctcatttccttagttacaaaagctgaagtagtgtcaaactagttatcatcctgtgacgatgatgacctgtttaaatggaaaaggttgcggtggagctattccaatttctgtataggcccatttgattcccttcattttgagtaaatggaaactaactaatggagtaggttatttcttttaaaatgtgtcattccatatctttccaaagtttatatataagtctatcttaaattcacc

SEQ ID NO: 62872 - DNA, 2382 bp, Zea Mays
cgcataaacattagccatttcttacttagttttttcatccgcggtggcatccacgagttgctgaagccagcccataaaatccatcctgcgcgcgtgcggcctctccattttccccgtcttcccgccaccccgaaaatttccgcccgaattccatttcaacattctcacatttcgcttcccagttgccacgaagaactcgaaatccaatccccggcgtcctagctcctccagattccgcagaccccgatccatcctcgacagcgactggcatagcagattccttcccagatcagatggggagaccgcggaagaccaaggccgagccggagccagcccccgccttcccgatcggcaactgcaaggtggagatccgtgggagcggactgcggtgcgagacgacagagcagggtctgacaatctccggacccaggggcgccaagtttctggggatcagaagggcgcttcgaatggcgtcggtgagggctctcagttcatccttctcaatccaagcgatgcagatagccaaaccaagtccttgcttgaggaagtgctaatgctttataagaaagaacttcctactatggactatgctgcagacactgggagaaagtcagggtttcttgaaacatgcacaactaatgggaaatacaagactctaattctgatgtctagctctgcagcacagcatgaagaggtcatagctactgtatcgtatcagattgtgccagctgacactcagtatgctgaaatacctctggcagttgtgagatcatcttatcaacgtgtgggtattggcaagctcttatataaggaactatcgcagaggcttcagaatgttggtgttacatccattttctgctgggcagataaggtctctgagggtttttggctaaaacagggttttgtatctgttggagaagtgaatactaaaggtaagattcgaaagattccagtaagggctgatataaagagagcattatgctttccaggaggatcaacacttatggttgcccaccttaataaagaattgccagtcatgcaaacatgggagaaaccccagacatcactccatactgtagtaccagatagtatctctcctggtgataccaatgtctcatgtgagaacatggtcctccaaacatataaacgtcgtgttgttagaaatactgcaaaggtggcaacaaatgaagtcagcaatgcttatagtgaaagttcattatctgagcaagagccaaagaaacgcatgtacaaaacatcgtcatcatcactaaagtcaaaaagaataagatgtagcaatcatgacgacaattgccaagacatgaatcaaattggtgtgcatgacaataacttgtgcagttcccctgagaattcactgcatgtaattcttaaagaacatcacattcctagcactggagctcatatttattctaatggtagtggaagccctacaattatgctcatgaatattgcagacgaacaaaagaaggcacgccttacaaaggttgttgaaacacttagggggtttgttacttgcgatggacattcatgcacacatgttgttactggaaaagctcgcaggactatgaatttctgtattgctttgtgctctggtgcttggataatttccccaaactggttaaaagaaagcttcagagaagggcagtttgtaggagaagcacaatatgttctggaagatgaagaatataggatgcaatataagtctgaacttagagatgcagttatgagagctaaagaaaggcctaactctttatttgctggttatactttctgtctgtcaaagtacatccagccctcttttgatgttctctcagccattattaaatctaccggaggcaagatcataaaaaaactgagtgagttagatgagctgtcccggacaatctttttggtgtgtgaagaggaggcagaacttgcattggttgcagcaaaaagtggcatcaaaacattcagcagtgactggttcatgagctgtgtcatgaaacaggaacttgaccttgaggcccctcagtttattgtatctctatgatgtgcctacagttcaagtcctcctaactcctaatatatctctttctttggttgggatataaattgtttctcctggttcttcgtggatatacaaattttctcatttccttagttacaaaagctgaagtagtgtcaaactagttatcatcctgtgacgatgatgacctgtttaaatggaaaaggttgcggtggagctattccaatttctgtataggcccatttgattcccttcattttgagtaaatggaaactaactaatggagtaggttatttcttttaaaatgtgtcattccatatctttccaaagtttatatataagtctatcttaaattcacc

SEQ ID NO: 62873 - DNA, 2245 bp, Zea Mays
cgcataaacattagccatttcttacttagttttttcatccgcggtggcatccacgagttgctgaagccagcccataaaatccatcctgcgcgcgtgcggcctctccattttccccgtcttcccgccaccccgaaaatttccgcccgaattccatttcaacattctcacatttcgcttcccagttgccacgaagaactcgaaatccaatccccggcgtcctagctcctccagattccgcagaccccgatccatcctcgacagcgactggcatagcagattccttcccagatcagatggggagaccgcggaagaccaaggccgagccggagccagcccccgccttcccgatcggcaactgcaaggtggagatccgtgggagcggactgcggtgcgagacgacagagcagggtctgacaatctccggacccaggggcgccaaggtcgtcgtctctgtttctggggatcagaagggcgcttcgaatggcgtcggtgagggctctcagttcatccttctcaatccaagcgatgcagatagccaaaccaagtccttgcttgaggtcatagctactgtatcgtatcagattgtgccagctgacactcagtatgctgaaatacctctggcagttgtgagatcatcttatcaacgtgtgggtattggcaagctcttatataaggaactatcgcagaggcttcagaatgttggtgttacatccattttctgctgggcagataaggtctctgagggtttttggctaaaacagggttttgtatctgttggagaagtgaatactaaaggtaagattcgaaagattccagtaagggctgatataaagagagcattatgctttccaggaggatcaacacttatggttgcccaccttaataaagaattgccagtcatgcaaacatgggagaaaccccagacatcactccatactgtagtaccagatagtatctctcctggtgataccaatgtctcatgtgagaacatggtcctccaaacatataaacgtcgtgttgttagaaatactgcaaaggtggcaacaaatgaagtcagcaatgcttatagtgaaagttcattatctgagcaagagccaaagaaacgcatgtacaaaacatcgtcatcatcactaaagtcaaaaagaataagatgtagcaatcatgacgacaattgccaagacatgaatcaaattggtgtgcatgacaataacttgtgcagttcccctgagaattcactgcatgtaattcttaaagaacatcacattcctagcactggagctcatatttattctaatggtagtggaagccctacaattatgctcatgaatattgcagacgaacaaaagaaggcacgccttacaaaggttgttgaaacacttagggggtttgttacttgcgatggacattcatgcacacatgttgttactggaaaagctcgcaggactatgaatttctgtattgctttgtgctctggtgcttggataatttccccaaactggttaaaagaaagcttcagagaagggcagtttgtaggagaagcacaatatgttctggaagatgaagaatataggatgcaatataagtctgaacttagagatgcagttatgagagctaaagaaaggcctaactctttatttgctggttatactttctgtctgtcaaagtacatccagccctcttttgatgttctctcagccattattaaatctaccggaggcaagatcataaaaaaactgagtgagttagatgagctgtcccggacaatctttttggtgtgtgaagaggaggcagaacttgcattggttgcagcaaaaagtggcatcaaaacattcagcagtgactggttcatgagctgtgtcatgaaacaggaacttgaccttgaggcccctcagtttattgtatctctatgatgtgcctacagttcaagtcctcctaactcctaatatatctctttctttggttgggatataaattgtttctcctggttcttcgtggatatacaaattttctcatttccttagttacaaaagctgaagtagtgtcaaactagttatcatcctgtgacgatgatgacctgtttaaatggaaaaggttgcggtggagctattccaatttctgtataggcccatttgattcccttcattttgagtaaatggaaactaactaatggagtaggttatttcttttaaaatgtgtcattccatatctttccaaagtttatatataagtctatcttaaattcacc

SEQ ID NO: 62874 - DNA, 2973 bp, Zea Mays
gatggacgcataaacattagccatttcttacttagttttttcatccgcggtggcatccacgagttgctgaagccagcccataaaatccatcctgcgcgcgtgcggcctctccattttccccgtcttcccgccaccccgaaaatttccgcccgaattccatttcaacattctcacatttcgcttcccagttgccacgaagaactcgaaatccaatccccggcgtcctagctcctccagattccgcagaccccgatccatcctcgacagcgactggcatagcagattccttcccagatcagatggggagaccgcggaagaccaaggccgagccggagccagcccccgccttcccgatcggcaactgcaaggtggagatccgtgggagcggactgcggtgcgagacgacagagcagggtctgacaatctccggacccaggggcgccaaggtcgtcgtctctgtttctggggatcagaagggcgcttcgaatggcgtcggtgagggctctcagttcatccttctcaatccaagcgatgcagatagccaaaccaagtccttgcttgaggaagtgctaatgctttataagaaagaacttcctactatggactatgctgcagacactgggagaaagtcagggtttcttgaaacatgcacaactaatgggaaatacaagactctaattctgatgtctagctctgcagcacagcatgaagaggtcatagctactgtatcgtatcagattgtgccagctgacactcagtatgctgaaatacctctggcagttgtgagatcatcttatcaacgtgtgggtattggcaagctcttatataaggaactatcgcagaggcttcagaatgttggtgttacatccattttctgctgggcagataaggtctctgagggtttttggctaaaacagggttttgtatctgttggagaagtgaatactaaaggtaagattcgaaagattccagtaagggctgatataaagagagcattatgctttccaggaggatcaacacttatggttgcccaccttaataaagaattgccagtcatgcaaacatgggagaaaccccagacatcactccatactgtagtaccagatagtaagcctacactccatacttattatgtaacgttttaggtttttgaatcacaaatgtgctgtttttgaagcctgtgtcatggcaaatgtaagtttgatgtaaggtacatcttgcaagcttataccaacttttaggtctattataatcagggccatccttttttcgttttgttatttttcaaatttatctgtgatcagttatcaaagtaaacacacagcttgaaaaatagctacattatatgcattgctacaggacatactagtttgaaaaatagctacatttttgttctcttattgcgatttgagagtaacccaatgtgatgatgcatttgcttgaaggaagctttttttgttatggagaaccattttttatttgcttgtgagagtgaagtttaattatagtcaataacaatcttgtatatcactgttgatcattattaaagaaaatagacatatgcagccttaataacttaccaactttggtacaactgccaactcaacactgtaactttggtgcattttgaacaaattcagtttcctatgttttctactattttacagagttctttgcaggtatctctcctggtgataccaatgtctcatgtgagaacatggtcctccaaacatataaacgtcgtgttgttagaaatactgcaaaggtggcaacaaatgaagtcagcaatgcttatagtgaaagttcattatctgagcaagagccaaagaaacgcatgtacaaaacatcgtcatcatcactaaagtcaaaaagaataagatgtagcaatcatgacgacaattgccaagacatgaatcaaattggtgtgcatgacaataacttgtgcagttcccctgagaattcactgcatgtaattcttaaagaacatcacattcctagcactggagctcatatttattctaatggtagtggaagccctacaattatgctcatgaatattgcagacgaacaaaagaaggcacgccttacaaaggttgttgaaacacttagggggtttgttacttgcgatggacattcatgcacacatgttgttactggaaaagctcgcaggactatgaatttctgtattgctttgtgctctggtgcttggataatttccccaaactggttaaaagaaagcttcagagaagggcagtttgtaggagaagcacaatatgttctggaagatgaagaatataggatgcaatataagtctgaacttagagatgcagttatgagagctaaagaaaggcctaactctttatttgctggttatactttctgtctgtcaaagtacatccagccctcttttgatgttctctcagccattattaaatctaccggaggcaagatcataaaaaaactgagtgagttagatgagctgtcccggacaatctttttggtgtgtgaagaggaggcagaacttgcattggttgcagcaaaaagtggcatcaaaacattcagcagtgactggttcatgagctgtgtcatgaaacaggaacttgaccttgaggcccctcagtttattgtatctctatgatgtgcctacagttcaagtcctcctaactcctaatatatctctttctttggttgggatataaattgtttctcctggttcttcgtggatatacaaattttctcatttccttagttacaaaagctgaagtagtgtcaaactagttatcatcctgtgacgatgatgacctgtttaaatggaaaaggttgcggtggagctattccaatttctgtataggcccatttgattcccttcattttgagtaaatggaaactaactaatggagtaggttatttcttttaaaatgtgtcattccatatctttccaaagtttatatataagtctatcttaaattcacc

SEQ ID NO: 62875 - DNA, 1274 bp, Zea Mays
atttaaactagttccactctaattaaactagcaatataatactaaatgttctaccattccctagtcatactcatatatagacttttaatatctttctataatttaattgaatttctcgattaagcctagcccaggaatccaacggttccctcggtcacaagccaaacagtgcaacagtggttgctgtgcaatcagctagtagctaggtagtcgaggttctccttgcctctccttggctccttccatcattccatcgtctttgctcgaggagtcgaggttcaggttccacggtgcggcgagagctagctcgcagccatggagagcaagagcccatggtcgctgcggctgctaatttgctgcgcggcaatggtggccatcgcgcttctcccccaacaaggaggccagctgtttcttgctcatgtgcggtgggtttcttttccggacgttcatattcaggccgcttgtttcgtgccgacgccgggtccagctccggcaccgcccggctcctccgcgacgaacacgaacgcctcctccgctgctcctcggccagccaagcccagcgcattcccgcccccaatgtacggtggtgtcacccccggcaccggcagcctccagccccacggtccgtaccgtacgcgactttagctaaaagagagcagcacctctctgaagtctgaaccgcacggtcgtcgtcaattaataaaggtttcgctgtgctgcgtgtgcgtgtttgcaacagagtgcggcggccggtgcgcggagcggtgctcggcgacggcgtaccagaagccgtgcctcttcttctgccgcaagtgctgcgcggcgtgcctgtgcgtgccgccgggcacctacggcaacaagaacacctgcccctgctacaacaactggaagaccaagcggggaggccccaagtgcccctagtagccctccctctcggtctacttgatgagatcttctgttcaaaaaatcaaaaggaataagaatctgtttaactatctttagatttcacaaataaaacaggtttcaatttatctttgtagtgaaacgcttgcagctcatgtgtgaatctcatccaatattagtgtcagatccctagctagctgattgattactaaggccatgtttggtttcaattagtcttaggactaaactttagtcctaagactaaactttagtctctacttgtttggttatagggactaaatagattctaaagtcattaaatacattgtccaaagacttaaatgcctttggaatacactcatgtgggcttt

SEQ ID NO: 62876 - DNA, 553 bp, Zea Mays
cttgcttctcggctctgcctgttcatcttgagaagcacttcatgaaaagctacagaaaaaacagagcatttagcattttttcaatataagaagctggtggagaagtggagccaaacggggccattgtaaccttaagcctctttgttgtactaactggcaaggtgacacctagtgctcattttcagaaggaccttggacttgatagcttggacactgtggagatcgtgatggcgtttgaggaagaattttcctttgagattcctgacaacgatgcagagaagattgactccatcaagacagcggttgatttcattgcttcgcatcctcaagcaaaataagaggatttctttttttttcgtatttcaaagtgtgttttgcacttttgcatccagaactttatgcgacacgggactagttttatctagcttgccgcagtagataggaagtcatttctttacctttctgaatccgcgtgtaccaaacgattgttgtgttcttgtgacctcattggtacgctaatccataaatccatttggacttcctttctgcttca

SEQ ID NO: 62877 - DNA, 690 bp, Zea Mays
atttgtttgaatgggctacctgggccgcaatttcagtctgaacaggatttgtaccagcctgtatgaacacgaggagtaataaaacactaaaatggcgatggcggcggcgaggagagcgctcctggcccacctccgcgtgccggtggtccaccctgcagcggcggcagcgaccatccccgcggcagggcggctcctgtcgtcgacgacggagacaaaggggtcgttcctcgacaagggcgaggtcgctgaccgtgtcgtctccgtcgtcaagaacttccagaaggttgaaccctcaaaggtgacacctagtgctcattttcagaaggaccttggacttgatagcttggacactgtggagatcgtgatggcgtttgaggaagaattttcctttgagattcctgacaacgatgcagagaagattgactccatcaagacagcggttgatttcattgcttcgcatcctcaagcaaaataagaggatttctttttttttcgtatttcaaagtgtgttttgcacttttgcatccagaactttatgcgacacgggactagttttatctagcttgccgcagtagataggaagtcatttctttacctttctgaatccgcgtgtaccaaacgattgttgtgttcttgtgacctcattggtacgctaatccataaatccatttggacttcctttctgcttca

SEQ ID NO: 62878 - DNA, 2179 bp, Zea Mays
ctcggctagatctcgcttccctccacctccagagtccagatccaccccgaactctccgaaggccgcccccgccatggcagcgccgccccccaccactccccgtctcctctcgccgacgtccaaggaccttctcacagccgcctccttcacctcgccgccctcccccacctccgacgatcccgcctccccgctcgacgccttcgcctccgatcccgtcctctccgccttcctgtcgccgtccttctccccttctgtcttctcctccgccgcgctttcctcaggactcgctgcctcccgcgccgagcagctgcaggatgccatccgcctcctccgccgccatctccgcgtcgaggagggtgagcctcttataacagagagagtttgggatgcaattgtcaaggcctttgcaagtcagatgaagactacctttacggcttcaagctttgtgaaagaaatatttactcttgggtatccaagactgttttcgatggttgaaaacctccttgagaggatttcaagagatactgatgtaaagggcacccttccagctctcactcctgaaggaaaagatcatatgatttcagccattgagatgttccagacagcctttttggctctgtgtcatagtcggctatctgattatgtcaacagcatatttccaatgtcaaaccgtggaactataccttcaaaggatcagatctcaagattggtttctcgcatacaagaagaaatcgaagtagtgagaactcatgggcatttgcttgttcttgttctacgtgaaattggaaagaccttgcttcttttagcacagagagcagaatatcagatctctactggccccgaagctcgacaagttaccggcacagcgactgcagcccaactaaaaaattttgctctgtgtcttcaccttcaggaggttcacatgcgcatttctagcgtcttgtcaacactcccaaatgttgcttctgaagtcctttcaccctcccttggtgttgtttatggtgttgcttgtgattcagtgacttccctgttccaagcgatgcttgatcgtctcgagtcatgcatcctgaaaatgcatgagcaggactttgcaggtcagggaatggatgcatcaatggataacaatgcatcagcttacatggaagagcttcagaaatgtgctgtccacttccgcagcgagttcttatcgaagctgttgccttcatcatcctctcgatcagaaaccatatgtaccatcatggttagaaggatggcctcaagggtactcatattttttataaggcatgcttctcttgtcaggccactctcagaagcagggaagttgagaatggcacgggacatggctgagctggagcttgctgttggtcagaatctgtttccagtggagcagctgggggcaccataccgggcactacgggcattccgtcctgtcttgttcctggaaacatctcagcttgacaagtttccgctccttcaggacttgccgcctagtgtgatcctccaccatctgtattctcgagggcctgatgaactgcagtcgccattacagcgcaacaagctcacacctttgcagtactctctgtggcttgattcacaaggcaaggaccagatctggaagggggtcaaagcaaccctagatgactacgagatgagggtcagatctcgaggagacaaggaattcagtccggtgtatcctctcatgcttcagattggatcttcattgtctcagcccaacacctaacatgtctctggttcaatcttgcatctgtatcatcttgtaggcattgatttttgaggggtcgggtgaagcttcggcatagtctatacacatgaaataggggatttgtgtttgttcctgaaaataatggttagcgtacattgtcttgatgttctgctagtttctgtatctttttgtaactctgatccgtgaaatatttgaaaaaggtgtcgtttcacaaatacatcagcgtcgtggaaggaggtaaatatagaggttaaaaaaggcgagaagacctcttgtgatcaacttcatccaatttcgtattttttttgctagacatagttgcttgattcgagtaggaccatacaataaaacaaaactagttagttgttagatgagtgctctctttctagataggtttaaattccaacagatgtatatttttttaatattttccgc

SEQ ID NO: 62879 - DNA, 2865 bp, Zea Mays
ctcggctagatctcgcttccctccacctccagagtccagatccaccccgaactctccgaaggccgcccccgccatggcagcgccgccccccaccactccccgtctcctctcgccgacgtccaaggaccttctcacagccgcctccttcacctcgccgccctcccccacctccgacgatcccgcctccccgctcgacgccttcgcctccgatcccgtcctctccgccttcctgtcgccgtccttctccccttctgtcttctcctccgccgcgctttcctcaggactcgctgcctcccgcgccgagcagctgcaggatgccatccgcctcctccgccgccatctccgcgtcgaggtgctgcgccgccaccccctcctcctctcccacctcctttctctccgctccgcctccgcgtctctctcctcgctcccatcccacctcaaccttctctcctctcacctctctctcctctcctcccacctctcggccccgcgctcccatctcgctcactcctcggcttccctttccagcctcttggccacagccgacctcctcctccactcccaccgcttagtgcgcctctcctcccgactcctcgcctcctcccctgcgcccgatcttgcgcgccaggctgagctctaccgcgagatccgcctcctctatgaggagaagaacctctccgggattaatgccgttgacgaggagatgcgcaaggtggatgccgctgcgtcaaagctgcgctcagaggccagcgctgtgatcgatggcggtgtctacgagtccaaccagaacgacgtgtggtgcgggctgcaggtgtactacaatctcggggaactgaagacagcagtggaggggcttgtgggaaagcacaaggcagcgggtgcaaagagtgtgtctgtcgcactggacatgaaggcgatatcaatgactgctggcgttggaggtggtcctggaggggtgcagaggagtggtacgccgcagattggtgggagtaagaaggctgcagaggcactatgggataggatgaggcagtgcatggatgagctccaccgagcagtgactgctgcttggcagttgcagactgtgctcactaagaagcgtgtgccattcacacaaatgctttttcttgaggaggtttggcaggagggtgagcctcttataacagagagagtttgggatgcaattgtcaaggcctttgcaagtcagatgaagactacctttacggcttcaagctttgtgaaagaaatatttactcttgggtatccaagactgttttcgatggttgaaaacctccttgagaggatttcaagagatactgatgtaaagggcacccttccagctctcactcctgaaggaaaagatcatatgatttcagccattgagatgttccagacagcctttttggctctgtgtcatagtcggctatctgattatgtcaacagcatatttccaatgtcaaaccgtggaactataccttcaaaggatcagatctcaagattggtttctcgcatacaagaagaaatcgaagtagtgagaactcatgggcatttgcttgttcttgttctacgtgaaattggaaagaccttgcttcttttagcacagagagcagaatatcagatctctactggccccgaagctcgacaagttaccggcacagcgactgcagcccaactaaaaaattttgctctgtgtcttcaccttcaggagtgacttccctgttccaagcgatgcttgatcgtctcgagtcatgcatcctgaaaatgcatgagcaggactttgcaggtcagggaatggatgcatcaatggataacaatgcatcagcttacatggaagagcttcagaaatgtgctgtccacttccgcagcgagttcttatcgaagctgttgccttcatcatcctctcgatcagaaaccatatgtaccatcatggttagaaggatggcctcaagggtactcatattttttataaggcatgcttctcttgtcaggccactctcagaagcagggaagttgagaatggcacgggacatggctgagctggagcttgctgttggtcagaatctgtttccagtggagcagctgggggcaccataccgggcactacgggcattccgtcctgtcttgttcctggaaacatctcagcttgacaagtttccgctccttcaggacttgccgcctagtgtgatcctccaccatctgtattctcgagggcctgatgaactgcagtcgccattacagcgcaacaagctcacacctttgcagtactctctgtggcttgattcacaaggcaaggaccagatctggaagggggtcaaagcaaccctagatgactacgagatgagggtcagatctcgaggagacaaggaattcagtccggtgtatcctctcatgcttcagattggatcttcattgtctcagcccaacacctaacatgtctctggttcaatcttgcatctgtatcatcttgtaggcattgatttttgaggggtcgggtgaagcttcggcatagtctatacacatgaaataggggatttgtgtttgttcctgaaaataatggttagcgtacattgtcttgatgttctgctagtttctgtatctttttgtaactctgatccgtgaaatatttgaaaaaggtgtcgtttcacaaatacatcagcgtcgtggaaggaggtaaatatagaggttaaaaaaggcgagaagacctcttgtgatcaacttcatccaatttcgtattttttttgctagacatagttgcttgattcgagtaggaccatacaataaaacaaaactagttagttgttagatgagtgctctctttctagataggtttaaattccaacagatgtatatttttttaatattttccgc

SEQ ID NO: 62880 - DNA, 659 bp, Zea Mays
gcggcccatgccggagccagagcaaggttcctcctccgcgaacaaaaccttccccttggtcagcacccgcaccgcgggcctccgccgcggcgcgggcgacgcggacgctgacaccgacgccgcgggcctccacctcgcgggggacgccgacgccgaaacggtcgccgcaggccgcccacggcgctcggccttggcgtcagagctgctggtgccccgcatgtagctgggcaccgacgccggcgccggggacatggccgcgccgccgcggttccacgggcagccctcgtccaggaagccgcccctgggcttggacgggggcgtcaggagcgggtccttgggcttctttttcggcgcctccttgctccgcaccatggctggtggctgctgctttcttcttcagcgacgggggcggcgagttcctgtgtttcttcgcttctcgcagcttaatcctcagccggatttctccttggcttgttgggatcaacggtttctctcgcgacgttcttgtcttgctgatactggaggcttgcttgtgcttgttggcttcttgcgttgaagggcggcacgaaagcaaggcaaagcaaagcaaagcaaaggtgatgtgaactgggggaggaagggaggcgggggaaggaaggaagagggaaggggagggatag

SEQ ID NO: 62881 - DNA, 774 bp, Zea Mays
gttgctcctgcatcctcgtcggtggccatcgccgaccatcagcccgacgaggtcgtatgcgctccatcttgtctcacgtgcccgccgccgaccgctgccccggtgaggttgtccgcatttctctcgtcacgtgcaccgctgatccaaccgtcagcgcttcgctcgtagcgggccgccgtcggtggttcggtctaatcgtgcgcatgtctactttttggcgagacgactcaagcttggccccgataaatgacgacatgccaggttgtgagagacctcagtcggaagttcgcgttcatcctgtatgttatcatgtcgaagtccacatttatcgctgatgacgttgacgatagcatccatttcttatggggtgtcgactcgaaaaccatcttgtgttctctaatggtattgggatcctcaagacagactgtgacaacttgtacgcgccattccctaaagaaaatcaaaaccggagtgaaatggcatgccatgttcttcgtggcccggatgtggccgtcgggatgacgatgtcgtcggatatcgtcttgaggctcgggacgatcctcttggtgagcagcgcgcacaccggcacgccaaagaggatggcgaggatgatgtcgacgacgaccttgccgaagtgaagttgtcatcttgaggattgcctgggtgatgttctccatcaatccaatgcgattttcatagaggaatcgttgtttgcatacaacacacatattgtttggacaatctcttccatttcttcagctaacttgatttttg

SEQ ID NO: 62882 - DNA, 671 bp, Zea Mays
cttggttgaggcctgctgcatctctgttcgtctgtcccagatctcagtatcaagttgatgtttacctcctgcctcagtctgcatttccaaccggaggcctatatttcaagaataaaaaatgggtcaaggagacaaagggcaagcatgtcattatacataataactacatcactgggtttgagaagaagataaagcggttccgggatcatgggttgtggttggtagatgagcacagcgatgagtcaccgcttggcagaatctgagcgaccaaggctgaaacacatctcttcttgctgcagcatcacaattttgtaattggtatttgactattgaaggcagtatccatctaaaccaaacggtgtatgcagcagtcaaaaatcaaatccattcgcagaagatattacttgccaacatcttttttttggctgtatgtcaagcgcttgtagagtatcctttaccatgtggccatgatgattgttttttattgtatttgttctttactgaaaatggtgtatttgagagcagttgagatcttaggatgtggcgaaacagagccttagtacattggctgatgattcacttattgtatagcataaagtttgatagcttgcatcaccattgctgaaagaaaattgtacttttttgcctctatatcaatgattcgtgaaata

SEQ ID NO: 62883 - DNA, 3036 bp, Zea Mays
ctcctgcgtggatcacgttgtctcctctttctcttgcgctgtcccactatcgatgagcttggctgcttctccaaggttggctgcgcgctcaaaccgtcttcaacagttgcctcttggaccacctctcctaatattgtagttcgtttaggggatacagtcctcttcgctggcgatttcttctctcacactacaaggaggggaactctacgagctcgcgctcgttgcctgccatcccacttcctctctccacctcgtctttggaagtctccaaagcgattgtgcagtctggcaggacaacctggaggattcttcgccgaacgagttttccgagcgcggaggtcagtaccacgttcatcatcgtcaccgccgttcttcactttcctccggtgattcgttctcactcgtcgacggaagggtgcgcatcgatccacagcgtgacctctcctacccgatctggttctttggatctcaaactactcaggtacgaatgtacgatttggttgctttgtacttcgtgttcctttgtcccgggcaaatccgttgaagaactacaacgattttggcttgattcggttggaatctagttgatatgtgtgtagggaactagggattacagatcagtgtgttaggttcgcacgattcatcgattaggccataatagttgacatagtatatgtttattccatggcaacgatacaaatattagttagggttagggactgtgtgcaccttcagttcgtaaacataggaagaaaagtatgtcaaactgttgtaaattggtttacaatgttttcatatatttactgaacctcgaatgtaaagctagatagtgatatgtcacttaaccatgcattgagctaacaaacaactttatttatgcagtttgaaaccttattagatgtcttcaactaattgttgttatatattcttttgctcttatattctttgttgcgaattcatttcattatacttgtacccatgcttcttgtttgttgacacatgtaacaattacatagtctatcgaaaacatactacaaactgggtgaatgcattaaacccttttgcctgtcaatttatctagtatgaaatgattcggaattattgaactacttttaccacatccgcattacctcctccttatcattttgttaggtgaaatttgtttccttgagtacttgaaattgaaccatcagtccacctttgcacctaatactttgacatatgatctatgtctagccaaggagttactcccttaggataggaatcaagatgagcatccaagatgccaaactgctgcaaaccttggccctcaatcttagatccatagtggaaactagcgcatgcaaaattagaagtttgctagaagatgctttcatgcaattgggtgatgagcattaccttatcaatgttctacttgctatccaacaagaagtcgaggtgatggagcaggataggtctactagtgacgctgagatggaggggaccgaggaagaactgaaagctatggagctcgtcgacataaaatcttttagcaccccttcctcccatggattgtatgagcctagtgacgctaactcatacgactcggttaggtctaataggtataacatttggaacctgtaagtaagcctgttgttgtctctatgtagaagtcttcgtccaaataaagaggagaggctgctgcttccgtggcgtgatacgagagaacggggcgagatagcgcaatgggagggaattagagttagagcctagagttatgtgagagagcaagccagagtgatggaggtagagtagggatggggagacttggaccacatattgattacaaagaaatgtacagtatatattaaaaaagtgttggcgaacgacgatggtgtaaaggctagcaaattgccttataattactatttatgttgagtatagaatattaagaaaaagacatgtgtgccctattggtttgtttagcgtgaatataagtttagaaataataattatgattcgaatttttatttatatataattttaacttttttattatttaaatgtgaggaaaaacgttgcagcttatttttctattgacatggccttcttggaaactggaatgaacccccgagttttaatggccttcaatttttttgctactccgtagtctccgccactgcgccacaccaccgcgtcgcagcaatgccgccgccgcgacgaaagcggaaggcggcctcgtacgagccacggcggcgctcgccatcccgcctggagtttcgtgccacagtggacggcgcgtggtacgaggcacgcgtggctgtgcagtgcggcgcgctgcgggtcatgtacgaggagttcctcgaggagcaggacgagtggtacgaccccgccgggctcgcgacttcctccgcgtgggacgtagtcaagctccgcgccaggtttcgtgtgccgtccacacccctggaagacacccagtgccgcgatctccaagccggcgcacgactctgcgtctcctgctcgctcgacggcggtgacctcaagttctacgacgccatcctcgattccgtgtatccagcggctcacgagatcgttgacggcatggagcggtgcgcctgccgtttcgcggtgcagtggtcggatggaccgcgcgctgggagcatggaggaggtcggcattgagcgggtttgctgcgtgcagtcctcgccggtgcaagacccagtgcttatggagttcctggacggcgtgaccaagctggccggggatgccaacgtggaaacagtgtctcaggagatccacgtcgcgccggtagtcaaaggcggcgtccctgcaaacgccctgcaaacgcgtcaccgtgatttcaacggaaaatttggtccagcaagtaggcaagcggtttgatgtgcgtggttctgaggttggctatttggtgcctctgattttgtgttgctttaacaatctgatcatgcacataaatcttctcttccaaattctctatccacttggtttgagttcggccgttaaaatactaactaatgtttcgttcatggatcatgg

SEQ ID NO: 62884 - DNA, 1153 bp, Zea Mays
gtcgcatagtctcctgcgtggatcacgttgtctcctctttctcttgcgctgtcccactatcgatgagcttggctgcttctccaagtcctcttcgctggcgatttcttctctcacactacaaggaggggaactctacgagctcgcgctcgttgcctgccatcccacttcctctctccacctcgtctttggaagtctccaaagcgattgtgcagtctggcaggacaacctggaggattcttcgccgaacgagttttccgagcgcggagtctccgccactgcgccacaccaccgcgtcgcagcaatgccgccgccgcgacgaaagcggaaggcggcctcgtacgagccacggcggcgctcgccatcccgcctggagtttcgtgccacagtggacggcgcgtggtacgaggcacgcgtggctgtgcagtgcggcgcgctgcgggtcatgtacgaggagttcctcgaggagcaggacgagtggtacgaccccgccgggctcgcgacttcctccgcgtgggacgtagtcaagctccgcgccaggtttcgtgtgccgtccacacccctggaagacacccagtgccgcgatctccaagccggcgcacgactctgcgtctcctgctcgctcgacggcggtgacctcaagttctacgacgccatcctcgattccgtgtatccagcggctcacgagatcgttgacggcatggagcggtgcgcctgccgtttcgcggtgcagtggtcggatggaccgcgcgctgggagcatggaggaggtcggcattgagcgggtttgctgcgtgcagtcctcgccggtgcaagacccagtgcttatggagttcctggacggcgtgaccaagctggccggggatgccaacgtggaaacagtgtctcaggagatccacgtcgcgccggtagtcaaaggcggcgtccctgcaaacgccctgcaaacgcgtcaccgtgatttcaacggaaaatttggtccagcaagtaggcaagcggtttgatgtgcgtggttctgaggttggctatttggtgcctctgattttgtgttgctttaacaatctgatcatgcacataaatcttctcttccaaattctctatccacttggtttgagttcggccgttaaaatactaactaatgtttcgttcatggatcatgg

SEQ ID NO: 62885 - DNA, 1239 bp, Zea Mays
ggcttctcgccttctctagactctagccctccatttatgtcgcatagtctcctgcgtggatcacgttgtctcctctttctcttgcgctgtcccactatcgatgagcttggctgcttctccaagtcctcttcgctggcgatttcttctctcacactacaaggaggggaactctacgagctcgcgctcgttgcctgccatcccacttcctctctccacctcgtctttggaagtctccaaagcgattgtgcagtctggcaggacaacctggaggattcttcgccgaacgagttttccgagcgcggagcgtgacctctcctacccgatctggttctttggatctcaaactactcagtctccgccactgcgccacaccaccgcgtcgcagcaatgccgccgccgcgacgaaagcggaaggcggcctcgtacgagccacggcggcgctcgccatcccgcctggagtttcgtgccacagtggacggcgcgtggtacgaggcacgcgtggctgtgcagtgcggcgcgctgcgggtcatgtacgaggagttcctcgaggagcaggacgagtggtacgaccccgccgggctcgcgacttcctccgcgtgggacgtagtcaagctccgcgccaggtttcgtgtgccgtccacacccctggaagacacccagtgccgcgatctccaagccggcgcacgactctgcgtctcctgctcgctcgacggcggtgacctcaagttctacgacgccatcctcgattccgtgtatccagcggctcacgagatcgttgacggcatggagcggtgcgcctgccgtttcgcggtgcagtggtcggatggaccgcgcgctgggagcatggaggaggtcggcattgagcgggtttgctgcgtgcagtcctcgccggtgcaagacccagtgcttatggagttcctggacggcgtgaccaagctggccggggatgccaacgtggaaacagtgtctcaggagatccacgtcgcgccggtagtcaaaggcggcgtccctgcaaacgccctgcaaacgcgtcaccgtgatttcaacggaaaatttggtccagcaagtaggcaagcggtttgatgtgcgtggttctgaggttggctatttggtgcctctgattttgtgttgctttaacaatctgatcatgcacataaatcttctcttccaaattctctatccacttggtttgagttcggccgttaaaatactaactaatgtttcgttcatggatcatgg

SEQ ID NO: 62886 - DNA, 1850 bp, Zea Mays
aaataagaattgtttaagctgttttttatgagtctagagatttgttgtaggacgaaacgagttctttgtcctgggcctttgtcactcttctctgtgtaacgacttcctccctttcctgccgcaccacgcaatcaccggggcggaggcggctgccggcgagcacttgggcgtctccggccaccgcctgcctcgttgtggctccccgttgactcccgcgatttgttacccgctggcgctgccgcacacagctcaaaaggagtagcagcgcccctggttgccggttggagcgtcaaggatgagcgggaggaagaatgcgggcaaggtttccccctggttgctcgtcctcatctgtttagggtgcttctttgtgacctacaacctcctgacgatgcccagccggggacgggatgggccgcgcaagttcctcggcggcggcggggatcgccactcaactgcctcgttggggtcaggctctgattcggaccccgcgaagcggttccacgtcgcgcttacggcgacggacgcactgtacagtcagtggcagtcgcggataatgcactactggtataaggagatgagggaccgacctggttccgacatgggtggcttcactaggatccttcactcgggcaagcctgatggattgatggatgagatacccaccatggtggttgatccccttcctgaaggcaaggatcagggatatattgtcttaaataggccttgggcttttgtccagtggatccagaaagcaaagatcgtagaagagtatatattaatggcagagccagatcatgtctttgtgaagcctttgccaaacttatctcatggtgatgagccagcggcatttccgtttttctacatcaaaccgactgagaatgagaagatattgaggaagtttttcccagaagaaaaagggcctatttcaaatattgatcctattggcaactctccggttataatcaagaaggctcagcttgagaagattgctccaacctggatgaatgtttcattaaaaatgaaagaggatcaggagacagacaaagcattcggatgggtcttggaaatgtacgcatacgctgttgctagtgcactgcacggtgtgcaccatagtctccataaagattttatgattcagcctccttgggacctgaaaacggacaacacattcatcatccattatacgtatggatgcgattattcaatgaagatcttaccttcaatctccaccaccaagaaatctttcactgccccctccaggagttcctgaaagtgtggtcacccttgtgaagatggtcaatgaggccaccgcaaacattccggggtgggaggacgatagatgattgatggtctggctgagttgtagtttattccagcacccagctggactgtggccacatttctatagtttaacataggttagtgtccgggaagaaaaaagatatattaacgttgatctaggagtttgatcattttttgtattgtaagacagaaatatagggttttggttactctggtccatgttgctgtgttgtaaagcagtgatgtagtttagattcccccaagccatgccttgagagatttgtttagtagtatcgtcttgggaaaacttctgccgggtattgacaacatcctgctgagttctgactgctgagtactatgactggaaaccacctaagccttcagaattaatccaaatatacttggacttgcactttcctacatataggtgtaatatggtttgctttgaaacctatgttttaatttgttgtataacattatttttgcaatgctcataatacaaatgttgtctcaaggcgagcctttgcgcacttggagctagggctgga

SEQ ID NO: 62887 - DNA, 1833 bp, Zea Mays
aaaaactataaaataagaattgtttaagctgttttttatgagtctagagatttgttgtaggacgaaacgagttctttgtcctgggcctttgtcactcttctctgtgtaacgacttcctccctttcctgccgcaccacgcaatcaccggggcggaggcggctgccggcgagcacttgggcgtctccggccaccgcctgcctcgttgtggctccccgttgactcccgcgatttgttacccgctggcgctgccgcacacagctcaaaaggagtagcagcgcccctggttgccggttggagcgtcaaggatgagcgggaggaagaatgcgggcaagccggggacgggatgggccgcgcaagttcctcggcggcggcggggatcgccactcaactgcctcgttggggtcaggctctgattcggaccccgcgaagcggttccacgtcgcgcttacggcgacggacgcactgtacagtcagtggcagtcgcggataatgcactactggtataaggagatgagggaccgacctggttccgacatgggtggcttcactaggatccttcactcgggcaagcctgatggattgatggatgagatacccaccatggtggttgatccccttcctgaaggcaaggatcagggatatattgtcttaaataggccttgggcttttgtccagtggatccagaaagcaaagatcgtagaagagtatatattaatggcagagccagatcatgtctttgtgaagcctttgccaaacttatctcatggtgatgagccagcggcatttccgtttttctacatcaaaccgactgagaatgagaagatattgaggaagtttttcccagaagaaaaagggcctatttcaaatattgatcctattggcaactctccggttataatcaagaaggctcagcttgagaagattgctccaacctggatgaatgtttcattaaaaatgaaagaggatcaggagacagacaaagcattcggatgggtcttggaaatgtacgcatacgctgttgctagtgcactgcacggtgtgcaccatagtctccataaagattttatgattcagcctccttgggacctgaaaacggacaacacattcatcatccattatacgtatggatgcgattattcaatgaagggtcagcttacttatgggaaaatcggtgaatggcgttttgacaaaagatcttaccttcaatctccaccaccaagaaatctttcactgccccctccaggagttcctgaaagtgtggtcacccttgtgaagatggtcaatgaggccaccgcaaacattccggggtgggaggacgatagatgattgatggtctggctgagttgtagtttattccagcacccagctggactgtggccacatttctatagtttaacataggttagtgtccgggaagaaaaaagatatattaacgttgatctaggagtttgatcattttttgtattgtaagacagaaatatagggttttggttactctggtccatgttgctgtgttgtaaagcagtgatgtagtttagattcccccaagccatgccttgagagatttgtttagtagtatcgtcttgggaaaacttctgccgggtattgacaacatcctgctgagttctgactgctgagtactatgactggaaaccacctaagccttcagaattaatccaaatatacttggacttgcactttcctacatataggtgtaatatggtttgctttgaaacctatgttttaatttgttgtataacattatttttgcaatgctcataatacaaatgttgtctcaaggcgagcctttgcgcacttggagctagggctgga

SEQ ID NO: 62888 - DNA, 1424 bp, Zea Mays
aaataagaattgtttaagctgttttttatgagtctagagatttgttgtaggacgaaacgagttctttgtcctgggcctttgtcactcttctctgtgtaacgacttcctccctttcctgccgcaccacgcaatcaccggggcggaggcggctgccggcgagcacttgggcgtctccggccaccgcctgcctcgttgtgatccaactaggaactcacccagcgctatctcccggcaggctccccgttgactcccgcgatttgttacccgctggcgctgccgcacacagctcaaaaggagtagcagcgcccctggttgccggttggagcgtcaaggatgagcgggaggaagaatgcgggcaaggtttccccctggttgctcgtcctcatctgtttagggtgcttctttgtgacctacaacctcctgacgatgcccagccggggacgggatgggccgcgcaagttcctcggcggcggcggggatcgccactcaactgcctcgttggggtcaggctctgattcggaccccgcgaagcggttccacgtcgcgcttacggcgacggacgcactgtacagtcagtggcagtcgcggataatgcactactggtataaggagatgagggaccgacctggttccgacatgggtggcttcactaggatccttcactcgggcaagcctgatggattgatggatgagatacccaccatggtggttgatccccttcctgaaggcaaggatcagggatatattgtcttaaataggccttgggcttttgtccagtggatccagaaagcaaagatcgtagaagagtatatattaatggcagagccagatcatgtctttgtgaagcctttgccaaacttatctcatggtgatgagccagcggcatttccgtttttctacatcaaaccgactgagaatgagaagatattgaggaagtttttcccagaagaaaaagggcctatttcaaatattgatcctattggcaactctccggttataatcaagaaggctcagcttgagaagattgctccaacctggatgaatgtttcattaaaaatgaaagaggatcaggagacagacaaagcattcggatgggtcttggaaatgtacgcatacgctgttgctagtgcactgcacggtgtgcaccatagtctccataaagattttatgattcagcctccttgggacctgaaaacggacaacacattcatcatccattatacgtatggatgcgattattcaatgaagggtcagcttacttatgggaaaatcggtgaatggcgttttgacaaaagatcttaccttcaatctccaccaccaagaaatctttcactgccccctccaggagttcctgaaagtgtgtcatcagtatatattcatgctattgtaatatgagttcagcaccgaaagctttagggtctttt

SEQ ID NO: 62889 - DNA, 2541 bp, Zea Mays
aaaccctacaagctacagctgacactgaggcaccgagcagtccaagtccgccgccagccatcaagtgtccatgtccatctaggtctagcggtcgggctctacgccgtccaactgcagtggtccaaggtcgccgaccgacctcgtagcaggcaacagacagcgcgcagacctcgccgccggtcgacacggcgacagcgacccaggaatcgagcaacatgcctgatactgatgatatagtagacatggaattggaaagagaatctatgggtactgctactcaatttgagcaagcaactgtggaaacaacagctgatcagtcacaaacaatacaaggtaaatctagtggaactgaaggaaatgctaatttcgtagacattgagaatgaaactgagaaaaaggaggcaagaaaggagatggtaccaaggtcaagtatgtgggatcatttcattaagatcaaagatgacaagggtaggctaaagtctgctaagtgcaaatattgtcagcgtatccttaaggctgattccaatcagcatggtacatcttcattaaataaacattttaatgtctgcaagcgcaaccccaataaatttgataaagacccaaagcaaggtactttgcaagcaacgggaggggaagctcctagcacttggaggtttgatcaaaattcattgagggatgcatttgctgaaatgctaatataagatgagctgccctttgcttttggtgagaagtcgggcttcagaaaatttatgtcaaaagcttgcccacggttccaagtgccatctagaagaacttgtactagggacattgtgcgcacatacttccaagagagggccaagctaaagaagttcttcaaagactcttgtcaaagagttagtctaacaacagattgttggacctcccaacaacaagatggaattcaacatatctaatgttgaaggctgcaattgtgtatgagaaggtattcttgaggttggctgaagacgacattagctatgttttggagctatctgaggtgagaggaggacatgatcaccctaatgaggatgatttggagaatgccaagaagatggctgaatttctagagcatttctatgatctcactattcgcatctcctctagccttcatgtcactattaacaccttctttcatgagattggagagatccgcttgttgattcaatcatggattgatagtgtggatcctttgcgagtttcaatgggcttcagaatgaaagagaaatatgacaagtattggggagtttggaatgagccggataaggacagagggaaaggaaagggtaaggaaaaggagaacattaatctattgatttttgttgctgcatttcttgatccaaggtacaagttatctttgtaccataagattaccgttgaagagatctttggtgaggacagaggacaactagtttggtctgctattaagacatgtatccgagaactgttcacagaatatagaaatatttatgcaccaattgaagaatcaactgaagaaacagattcaactcaagcaaaaggtggtccaggagggaagcttaaacaagttattgccaacaaaatgaagatgactaatagtagtaacaacactaccaaatcagaactggacaaatatgtatctgaagattgtgaagatacagaaaaaagatcgatattctcgtttggtggaaggacaatgcacacagattgccagttttggctcacatggcccaagatatccttgctataccaatatcaacagtagcttcagagtccattttcagcacaagtggacgtatattggatgattttcgtacttcccttacacctttcatgttggaggcccttgtatgtacccaagattggctaagaaggtctactcccattgacatacaagagaatatcgaggaattagccattatagaaaaagagctaattgaagaatttggaaatggtggcaaaggaaaaagaactgaggttacttccacttccaagtcttaagcaacacaacagtgagctgtggactgtggtgcatgtctggcttattggtgattgtctgtctgtccctgtgtctccttcgttggtggcagactagcggctgtatggtatggctgtgtctctacatgagagatgagattgtttccctctgtagactggtcactgctgtagcctgtagatgtgtagtggtgtgtccgtgtgttccaagtgctggagagtggtgtgaagtgtgctggtgcagactgcagtggtgctaccgtgctagtgtgctactgtgtgccaagccaagtgttatcttgctggacaagtgctggagacttggtgttctggacaagtgcggaagtgccgtgtgtggacagtggagaactggagagtagcatagcacatcctctgttttgaattcatatcaattatcatctatttaggttgtggagtactggagtctaaagtctaacagttcctaagaacctgatgtattttattgtatcttattttccctgtgtgtatttaccaatgacctgtgtatgtttcatgagggtagtgaactag

SEQ ID NO: 62890 - DNA, 2822 bp, Zea Mays
gccaggctcccacgtacaggcaagcgggcagcaatacggggcaaaccctacaagctacagctgacactgaggcaccgagcagtccaagtccgccgccagccatcaagtgtccatgtccatctaggtctagcggtcgggctctacgccgtccaactgcagtggtccaaggtcgccgaccgacctcgtagcaggcaacagacagcgcgcagacctcgccgccggtcgacacggcgacagcgacccaggaatcgagcaacgtacgcatttctgttcctatctctctatctcgtaattgagccgcacacatttctgtctcttacagtcagtaacttatagtcagtaacttagtaagttagtatgcatttctaactctctatttcgtaatcgagcagcacacatttctatctaagttagtatgcatttctatttatatgttgtcttatagtcagtaacttagtaagcagtaacttatatatatgtctgaggttttttgtagatgcctgatactgatgatatagtagacatggaattggaaagagaatctatgggtactgctactcaatttgagcaagcaactgtggaaacaacagctgatcagtcacaaacaatacaaggtaaatctagtggaactgaaggaaatgctaatttcgtagacattgagaatgaaactgagaaaaaggaggcaagaaaggagatggtaccaaggtcaagtatgtgggatcatttcattaagatcaaagatgacaagggtaggctaaagtctgctaagtgcaaatattgtcagcgtatccttaaggctgattccaatcagcatggtacatcttcattaaataaacattttaatgtctgcaagcgcaaccccaataaatttgataaagacccaaagcaaggtactttgcaagcaacgggaggggaagctcctagcacttggaggtttgatcaaaattcattgagggatgcatttgctgaaatgctaatataagatgagctgccctttgcttttggtgagaagtcgggcttcagaaaatttatgtcaaaagcttgcccacggttccaagtgccatctagaagaacttgtactagggacattgtgcgcacatacttccaagagagggccaagctaaagaagttcttcaaagactcttgtcaaagagttagtctaacaacagattgttggacctcccaacaacaagatggaattcaacatatctaatgttgaaggctgcaattgtgtatgagaaggtattcttgaggttggctgaagacgacattagctatgttttggagctatctgaggtgagaggaggacatgatcaccctaatgaggatgatttggagaatgccaagaagatggctgaatttctagagcatttctatgatctcactattcgcatctcctctagccttcatgtcactattaacaccttctttcatgagattggagagatccgcttgttgattcaatcatggattgatagtgtggatcctttgcgagtttcaatgggcttcagaatgaaagagaaatatgacaagtattggggagtttggaatgagccggataaggacagagggaaaggaaagggtaaggaaaaggagaacattaatctattgatttttgttgctgcatttcttgatccaaggtacaagttatctttgtaccataagattaccgttgaagagatctttggtgaggacagaggacaactagtttggtctgctattaagacatgtatccgagaactgttcacagaatatagaaatatttatgcaccaattgaagaatcaactgaagaaacagattcaactcaagcaaaaggtggtccaggagggaagcttaaacaagttattgccaacaaaatgaagatgactaatagtagtaacaacactaccaaatcagaactggacaaatatgtatctgaagattgtgaagatacagaaaaaagatcgatattctcgtttggtggaaggacaatgcacacagattgccagttttggctcacatggcccaagatatccttgctataccaatatcaacagtagcttcagagtccattttcagcacaagtggacgtatattggatgattttcgtacttcccttacacctttcatgttggaggcccttgtatgtacccaagattggctaagaaggtctactcccattgacatacaagagaatatcgaggaattagccattatagaaaaagagctaattgaagaatttggaaatggtggcaaaggaaaaagaactgaggttacttccacttccaagtcttaagcaacacaacagtgagctgtggactgtggtgcatgtctggcttattggtgattgtctgtctgtccctgtgtctccttcgttggtggcagactagcggctgtatggtatggctgtgtctctacatgagagatgagattgtttccctctgtagactggtcactgctgtagcctgtagatgtgtagtggtgtgtccgtgtgttccaagtgctggagagtggtgtgaagtgtgctggtgcagactgcagtggtgctaccgtgctagtgtgctactgtgtgccaagccaagtgttatcttgctggacaagtgctggagacttggtgttctggacaagtgcggaagtgccgtgtgtggacagtggagaactggagagtagcatagcacatcctctgttttgaattcatatcaattatcatctatttaggttgtggagtactggagtctaaagtctaacagttcctaagaacctgatgtattttattgtatcttattttccctgtgtgtatttaccaatgacctgtgtatgtttcatgagggtagtgaactag

SEQ ID NO: 62891 - DNA, 721 bp, Zea Mays
gcaaattaaaatttgaaacatgcgccgatatgcgccgtcgatagagtaatcggacggctaggtagtaccacatgccttctcgtcacaaatcgactagggcgtctgagactctgagacacaggaacagaaccctctctgcgccgccgccgccgttgcagtcgcggccacatcgtcgcctatccatccccaccgctcccactgccacgattcacaagaggtgtcgagatgtctcagaacaacccctcccagctcctcccctcagagctgatcgatcggtgcatcgggtccaagatctgggtgatcatgaagggggacaaggagctcgttggcaccctctgcggctttgatgtctacgtcaatatggtgctggaggacgtcaccgagtatgaatacactgctgaagggcgccgcattacaaaacttgaccagatcctcctaaacggcaacaacatagccattttggttcctggtggttcaccacccgatgtgtaatgagcttttgctccccagagtaaccattcgaggcgaaggcatctccatggactttgcacgttattttggcatggaagctgccttctgtatcgaacttactgacctgaagtagtgtgcttgcatagctgtggttatatgattggctatgctaattctgtgtatgtctgctcgccatcattgtactgcaatgtgaattccagaattttatcaagagaagtgggaatgagtt

SEQ ID NO: 62892 - DNA, 1557 bp, Zea Mays
ttttaatgaagaggttcgtgcacgcactgtgttcaacgcaattccaattttctatccgagtgatgagtgactgtgcacatacatcgtactacaggtgggacccgcttactagatcagattctaacatcctgttcgtggagtcgtctcggcggcggcggaacaagccgggaacctaccgcaaagggcgccaccgatgctaaagccacagacgtcgtggacagcttccctccctctccttctcatccgccgctgctcgagaaccgcggccagtccatctcctgccggtgaccggccgctctcctttgtcccggtctgcaagcggcggatgagcacgctggcgcatcccaggtttgcccctctccctacggagcaaactgaatcccaaacagatggcggggctgcacggtaccagttccggctggtctcttacaacatcttggcccaggtttatgttaagagtacgctttttcctcattccccatctgcgtgcctcaagtggaaatctcgatcgggagctattcttacagaactaaagagctttgatgctgacttcatgtgcatacaggagttggatgaatatgataccttctataagaaaaacatggaaaactctggatattcaagtatttacattcagcgatctggagacaaacgagatggctgtggtatattctataaacctaaaagtgcagaactggtgcagaaagaagtaatactgtacaatgatttagtagaaaaatatgttcctagtgataatgtaaatagtgctctggaaaataattcttcagcagaagaagacaagaatgcaaagccagataatagcaagcgtggagatccaaatgatccacgcgttagattgaagcgggactgtgttggtttactcgcggctttcaagcttagtgatccttgtgatcaaattttgattgtggcaaacacacatatttattgggacccacaatggatcgatgtaaagttggctcaggcaaaatatcttctttcgagagtatctcagtttgagcaactcatctcaaataaatataattgtaaaccttcagtgatcattgctggtgacttcaattcgacacctggtgacaaggatctacggacgaagctccaatcaagttacgcagcctttatgctgcgaatggaggggagccagagtacacaaactacactcctggttttaccggaacactggactacatattcttgtcggatggtagttcgataaaacctactagcctacttcgtttgccgcgaggggattctgaggatgtgaaaggaggcttgcccaactttcgacatcctagcgatcatctcccaattggtgctgattttctggtagtcaacatctagtgcaggtgttgattgctttttcaacagaaatagtaaatgccgttgaataatttgtgttgttggctcaagtttcagagtttaaatgtaatatctcaaggaacaagcgtttcttttcttgtagagcaattaacaatgcgaattttattcatcaattttaatataataggagtattgtctatgggcattgaagggtttgttctt

SEQ ID NO: 62893 - DNA, 1516 bp, Zea Mays
ttttaatgaagaggttcgtgcacgcactgtgttcaacgcaattccaattttctatccgagtgatgagtgactgtgcacatacatcgtactacaggtgggacccgcttactagatcagattctaacatcctgttcgtggagtcgtctcggcggcggcggaacaagccgggaacctaccgcaaagggcgccaccgatgctaaagccacagacgtcgtggacagcttccctccctctccttctcatccgccgctgctcgagaaccgcggccagtccatctcctgccgggtctgcaagcggcggatgagcacgctggcgcatcccaggggctgcacggtaccagttccggctggtctcttacaacatcttggcccaggtttatgttaagagtacgctttttcctcattccccatctgcgtgcctcaagtggaaatctcgatcgggagctattcttacagaactaaagagctttgatgctgacttcatgtgcatacaggagttggatgaatatgataccttctataagaaaaacatggaaaactctggatattcaagtatttacattcagcgatctggagacaaacgagatggctgtggtatattctataaacctaaaagtgcagaactggtgcagaaagaagtaatactgtacaatgatttagtagaaaaatatgttcctagtgataatgtaaatagtgctctggaaaataattcttcagcagaagaagacaagaatgcaaagccagataatagcaagcgtggagatccaaatgatccacgcgttagattgaagcgggactgtgttggtttactcgcggctttcaagcttagtgatccttgtgatcaaattttgattgtggcaaacacacatatttattgggacccacaatggatcgatgtaaagttggctcaggcaaaatatcttctttcgagagtatctcagtttgagcaactcatctcaaataaatataattgtaaaccttcagtgatcattgctggtgacttcaattcgacacctggtgacaaggtatacaattaccttttatctgccaacctaggatctacggacgaagctccaatcaagttacgcagcctttatgctgcgaatggaggggagccagagtacacaaactacactcctggttttaccggaacactggactacatattcttgtcggatggtagttcgataaaacctactagcctacttcgtttgccgcgaggggattctgaggatgtgaaaggaggcttgcccaactttcgacatcctagcgatcatctcccaattggtgctgattttctggtagtcaacatctagtgcaggtgttgattgctttttcaacagaaatagtaaatgccgttgaataatttgtgttgttggctcaagtttcagagtttaaatgtaatatctcaaggaacaagcgtttcttttcttgtagagcaattaacaatgcgaattttattcatcaattttaatataataggagtattgtctatgggcattgaagggtttgttctt

SEQ ID NO: 62894 - DNA, 1376 bp, Zea Mays
ttcatgtcctttctgggtgttgcataaagtggcacaaagtgtttttgaagcaggtttaaagaggtttatgcatgagccaggatatatccttgaatacacagacttcttgtgtcgtttaaatgacgatagaaatgtacgtgctttgtttgagagggcactgagcttacttcctcccgaggaatccacagaggtatggagacgatttgcacaatttgaacagaactatggggatttatcaagcatgcttaaggttgaacaaagaaggaaagaggctctatctaggacatctgaagatgccttatctgcatcggaaaacacacttcatgacatagtttctcgatacagttacatggatctttggccatgctcatcaaaagaattggattatctagcgagacaagagtggcttgcgaaaaacattgttaagaaggttgagaaaccagctatgttaaatagcggtagcatgctagacaaaggtgctgcaggatttagtgcgagtgcgaggttattaccacaatctgccaaagttgttcgtcctgagacttctcaaatggttatttatgatccaagacagatgaaaggcccagagtttgcagcaactagcagtgggtacacgaaggaggttgaagccacgctcaaagtgctatcgccgtcgatggtgtcctttattaagaatttgcctgctattgaaggaccatcgccggatatcgatgtggtgctcagcgtgctgctgcagagcacattgccagttgcacagagtgctgggaaagcaggtggcgtgagtgagctctcaggcgttggaaaaacgggactgaaccagaatggatctgtccatagacctccaagggagagaaggaaggacgtggagaggcaaggggcgcaggaggaagaggatgcgtcggcggtgcagagcagggcagctgtgccacgagacatcttcaggcttcggcagattcagaggagccgtggcctgggtgtgggtggtgccgccgtttcgcagtctgggtcctcggcattttctttctcgggcggtggaagcgccttctctggggaccactcagctagcacagattagcctactcaccagacatgttcaacagctcagctcaaagctcaactgcgagtagtgagctcaaaggctacctccagcagatttatatcacattccttttctcatcccctatttcaaacatcactttgcaaacaatatcatctatagtttcatgtcccctattttacactacatgctggagacagtctaaggacataatgacatactagtagggtgcccgtgcgttgctacggcaacttaaaaattgatacaaaacaataacgcaatataattacaatctttgattgatgattttgtagctaac

SEQ ID NO: 62895 - DNA, 2309 bp, Zea Mays
ctcacttgcaccatatcgactttgcgggcgctgttacatcaactttatcaggagaattaacgataaaaggggctctgagggtcttgatgagacgaagaaggcttttgatttcatgctcaactacgttgggaatgatgcagcttctggccctgtttggatggagtatattaatttcctcaagtccatgccggttgtgacgccccatgaagagtcgcatcgcatgactactgttcgtaaagtgtaccagaaggcaattttagttccaactaatcatgtagagcagttgtggaaggattacgagaacttcgaaaattctgttagccgcaccttggcaaaaggcttgttatctgaataccaaccaaagtttaacagtgctaaggctgtatatagagagcgaaaaaagtacattgatgatattgattggaatgtactggccaccccccctacaggctcgtacaaggaagagcaacagtgtatggcatggaaaagactcttggtatttgaaaaggggaaccctcaaagaattgatgctacaacagctaataggcgtatcacctttacttatgagcaatgcctgatgtatctatatcatcatcctgatatatggtacgattatgctatgtggcatgtgaagaatggttctatggattctgcatcaaaaatatttcagcgagctctaaaagcaatccatgattctgaagtacttaagtatgcctttgctgaaatggaagagtccagaggggcgatacagactgctaagacagtatacgaatctcttctaggtgaaaatgctagtgagacctcacttgcaaatattcagtttattcgatttctaaggagaactgaaggcactgaagcagcccgtaagtactttttggatgctcggaagtcaccaagctgcacttatcatttgtatgttgcttatgctacaatggcattctgcgttgacaaggatgcaaaggtggcacaaagtgtttttgaagcaggtttaaagaggtttatgcatgagccaggatatatccttgaatacacagacttcttgtgtcgtttaaatgacgatagaaatgtacgtgctttgtttgagagggcactgagcttacttcctcccgaggaatccacagaggtatggagacgatttgcacaatttgaacagaactatggggatttatcaagcatgcttaaggttgaacaaagaaggaaagaggctctatctaggacatctgaagatgccttatctgcatcggaaaacacacttcatgacatagtttctcgatacagttacatggatctttggccatgctcatcaaaagaattggattatctagcgagacaagagtggcttgcgaaaaacattgttaagaaggttgagaaaccagctatgttaaatagcggtagcatgctagacaaaggtgctgcaggatttagtgcgagtgcgaggttattaccacaatctgccaaagttgttcgtcctgagacttctcaaatggttatttatgatccaagacagatgaaaggcccagagtttgcagcaactagcagtgggtacacgaaggaggttgaagccacgctcaaagtgctatcgccgtcgatggtgtcctttattaagaatttgcctgctattgaaggaccatcgccggatatcgatgtggtgctcagcgtgctgctgcagagcacattgccagttgcacagagtgctgggaaagcaggtggcgtgagtgagctctcaggcgttggaaaaacgggactgaaccagaatggatctgtccatagacctccaagggagagaaggaaggacgtggagaggcaaggggcgcaggaggaagaggatgcgtcggcggtgcagagcagggcagctgtgccacgagacatcttcaggcttcggcagattcagaggagccgtggcctgggtgtgggtggtgccgccgtttcgcagtctgggtcctcggcattttctttctcgggcggtggaagcgccttctctggggaccactcagctagcacagattagcctactcaccagacatgttcaacagctcagctcaaagctcaactgcgagtagtgagctcaaaggctacctccagcagatttatatcacattccttttctcatcccctatttcaaacatcactttgcaaacaatatcatctatagtttcatgtcccctattttacactacatgctggagacagtctaaggacataatgacatactagtagggtgcccgtgcgttgctacggcaacttaaaaattgatacaaaacaataacgcaatataattacaatctttgattgatgattttgtagctaac

SEQ ID NO: 62896 - DNA, 2658 bp, Zea Mays
acaaagataaccttgcgccgcctcctaagaagatcaagactacccagccaggttctacagaccctcaaaaccttaatcgttagatcatcgccgttctcatgaagaattccggaggaggcgccgcccatggcgatggcggcgacatctacaatgtccgggccgccgagatcctcgccaacgaggccctcttctattgatttcagctgctccccatcaatgaggccgccccaatctacgagaatctgctcgccactttccccacggccgccaaatactggaagcagtatgtcgaagcctacatggccaccaacaacgatgaagccgccaagcagattttcagcagatgcctgctcaactgccttcacattagtctatggcgctgttacatcaactttatcaggagaattaacgataaaaggggctctgagggtcttgatgagacgaagaaggcttttgatttcatgctcaactacgttgggaatgatgcagcttctggccctgtttggatggagtatattaatttcctcaagtccatgccggttgtgacgccccatgaagagtcgcatcgcatgactactgttcgtaaagtgtaccagaaggcaattttagttccaactaatcatgtagagcagttgtggaaggattacgagaacttcgaaaattctgttagccgcaccttggcaaaaggcttgttatctgaataccaaccaaagtttaacagtgctaaggctgtatatagagagcgaaaaaagtacattgatgatattgattggaatgtactggccaccccccctacaggctcgtacaaggaagagcaacagtgtatggcatggaaaagactcttggtatttgaaaaggggaaccctcaaagaattgatgctacaacagctaataggcgtatcacctttacttatgagcaatgcctgatgtatctatatcatcatcctgatatatggtacgattatgctatgtggcatgtgaagaatggttctatggattctgcatcaaaaatatttcagcgagctctaaaagcaatccatgattctgaagtacttaagtatgcctttgctgaaatggaagagtccagaggggcgatacagactgctaagacagtatacgaatctcttctaggtgaaaatgctagtgagacctcacttgcaaatattcagtttattcgatttctaaggagaactgaaggcactgaagcagcccgtaagtactttttggatgctcggaagtcaccaagctgcacttatcatttgtatgttgcttatgctacaatggcattctgcgttgacaaggatgcaaaggtggcacaaagtgtttttgaagcaggtttaaagaggtttatgcatgagccaggatatatccttgaatacacagacttcttgtgtcgtttaaatgacgatagaaatgtacgtgctttgtttgagagggcactgagcttacttcctcccgaggaatccacagaggtatggagacgatttgcacaatttgaacagaactatggggatttatcaagcatgcttaaggttgaacaaagaaggaaagaggctctatctaggacatctgaagatgccttatctgcatcggaaaacacacttcatgacatagtttctcgatacagttacatggatctttggccatgctcatcaaaagaattggattatctagcgagacaagagtggcttgcgaaaaacattgttaagaaggttgagaaaccagctatgttaaatagcggtagcatgctagacaaaggtgctgcaggatttagtgcgagtgcgaggttattaccacaatctgccaaagttgttcgtcctgagacttctcaaatggttatttatgatccaagacagatgaaaggcccagagtttgcagcaactagcagtgggtacacgaaggaggttgaagccacgctcaaagtgctatcgccgtcgatggtgtcctttattaagaatttgcctgctattgaaggaccatcgccggatatcgatgtggtgctcagcgtgctgctgcagagcacattgccagttgcacagagtgctgggaaagcaggtggcgtgagtgagctctcaggcgttggaaaaacgggactgaaccagaatggatctgtccatagacctccaagggagagaaggaaggacgtggagaggcaaggggcgcaggaggaagaggatgcgtcggcggtgcagagcagggcagctgtgccacgagacatcttcaggcttcggcagattcagaggagccgtggcctgggtgtgggtggtgccgccgtttcgcagtctgggtcctcggcattttctttctcgggcggtggaagcgccttctctggggaccactcagctagcacagattagcctactcaccagacatgttcaacagctcagctcaaagctcaactgcgagtagtgagctcaaaggctacctccagcagatttatatcacattccttttctcatcccctatttcaaacatcactttgcaaacaatatcatctatagtttcatgtcccctattttacactacatgctggagacagtctaaggacataatgacatactagtagggtgcccgtgcgttgctacggcaacttaaaaattgatacaaaacaataacgcaatataattacaatctttgattgatgattttgtagctaac

SEQ ID NO: 62897 - DNA, 2591 bp, Zea Mays
tcagctcaacaaagataaccttgcgccgcctcctaagaagatcaagactacccagccaggttctacagaccctcaaaaccttaatcgttagatcatcgccgttctcatgaagaattccggaggaggcgccgcccatggcgatggcggcgacatctacaatgtccgggccgccgagatcctcgccaacgaggccctcctgctccccatcaatgaggccgccccaatctacgagaatctgctcgccactttccccacggccgccaaatactggaagcagtatgtcgaagcctacatggccaccaacaacgatgaagccgccaagcagattttcagcagatgcctgctcaactgccttcacattagtctatggcgctgttacatcaactttatcaggagaattaacgataaaaggggctctgagggtcttgatgagacgaagaaggcttttgatttcatgctcaactacgttgggaatgatgcagcttctggccctgtttggatggagtatattaatttcctcaagtccatgccggttgtgacgccccatgaagagtcgcatcgcatgactactgttcgtaaagtgtaccagaaggcaattttagttccaactaatcatgtagagcagttgtggaaggattacgagaacttcgaaaattctgttagccgcaccttggcaaaaggcttgttatctgaataccaaccaaagtttaacagtgctaaggctgtatatagagagcgaaaaaagtacattgatgatattgattggaatgtactggccaccccccctacaggctcgtacaaggaagagcaacagtgtatggcatggaaaagactcttggtatttgaaaaggggaaccctcaaagaattgatgctacaacagctaataggcgtatcacctttacttatgagcaatgcctgatgtatctatatcatcatcctgatatatggtacgattatgctatgtggcatgtgaagaatggttctatggattctgcatcaaaaatatttcagcgagctctaaaagcaatccatgattctgaagtacttaagtatgcctttgctgaaatggaagagtccagaggggcgatacagactgctaagacagtatacgaatctcttctaggtgaaaatgctagtgagacctcacttgcaaatattcagtttattcgatttctaaggagaactgaaggcactgaagcagcccgtaagtactttttggatgctcggaagtcaccaagctgcacttatcatttgtatgttgcttatgctacaatggcattctgcgttgacaaggatgcaaaggtggcacaaagtgtttttgaagcaggtttaaagaggtttatgcatgagccaggatatatccttgaatacacagacttcttgtgtcgtttaaatgacgatagaaatgtacgtgctttgtttgagagggcactgagcttacttcctcccgaggaatccacagaggttgaacaaagaaggaaagaggctctatctaggacatctgaagatgccttatctgcatcggaaaacacacttcatgacatagtttctcgatacagttacatggatctttggccatgctcatcaaaagaattggattatctagcgagacaagagtggcttgcgaaaaacattgttaagaaggttgagaaaccagctatgttaaatagcggtagcatgctagacaaaggtgctgcaggatttagtgcgagtgcgaggttattaccacaatctgccaaagttgttcgtcctgagacttctcaaatggttatttatgatccaagacagatgaaaggcccagagtttgcagcaactagcagtgggtacacgaaggaggttgaagccacgctcaaagtgctatcgccgtcgatggtgtcctttattaagaatttgcctgctattgaaggaccatcgccggatatcgatgtggtgctcagcgtgctgctgcagagcacattgccagttgcacagagtgctgggaaagcaggtggcgtgagtgagctctcaggcgttggaaaaacgggactgaaccagaatggatctgtccatagacctccaagggagagaaggaaggacgtggagaggcaaggggcgcaggaggaagaggatgcgtcggcggtgcagagcagggcagctgtgccacgagacatcttcaggcttcggcagattcagaggagccgtggcctgggtgtgggtggtgccgccgtttcgcagtctgggtcctcggcattttctttctcgggcggtggaagcgccttctctggggaccactcagctagcacagattagcctactcaccagacatgttcaacagctcagctcaaagctcaactgcgagtagtgagctcaaaggctacctccagcagatttatatcacattccttttctcatcccctatttcaaacatcactttgcaaacaatatcatctatagtttcatgtcccctattttacactacatgctggagacagtctaaggacataatgacatactagtagggtgcccgtgcgttgctacggcaacttaaaaattgatacaaaacaataacgcaatataattacaatctttgattgatgattttgtagctaac

SEQ ID NO: 62898 - DNA, 2457 bp, Zea Mays
gatcagctcaacaaagataaccttgcgccgcctcctaagaagatcaagactacccagccaggttctacagaccctcaaaaccttaatcgttagatcatcgccgttctcatgaagaattccggaggaggcgccgcccatggcgatggcggcgacatctacaatgtccgggccgccgagatcctcgccaacgaggccctcctgctccccatcaatgaggccgccccaatctacgagaatctgctcgccactttccccacggccgccaaatactggaagcagtatgtcgaagcctacatggccaccaacaacgatgaagccgccaagcagattttcagcagatgcctgctcaactgccttcacattagtctatggcgctgttacatcaactttatcaggagaattaacgataaaaggggctctgagggtcttgatgagacgaagaaggcttttgatttcatgctcaactacgttgggaatgatgcagcttctggccctgtttggatggagtatattaatttcctcaagtccatgccggttgtgacgccccatgaagagtcgcatcgcatgactactgttcgtaaagtgtaccagaaggcaattttagttccaactaatcatgtagagcagttgtggaaggattacgagaacttcgaaaattctgttagccgcaccttggcaaaaggcttgttatctgaataccaaccaaagtttaacagtgctaaggctgtatatagagagcgaaaaaagtacattgatgatattgattggaatgtactggccaccccccctacaggctcgtacaaggaagagcaacagtgtatggcatggaaaagactcttggtatttgaaaaggggaaccctcaaagaattgatgctacaacagctaataggcgtatcacctttacttatgagcaaattctgaagtacttaagtatgcctttgctgaaatggaagagtccagaggggcgatacaggtccatgagcttcccttgaacactgacaaactataatatctcttaggccaatcttattttctcatatacactttcctgtgcagactgctaagacagtatacgaatctcttctaggtgaaaatgctagtgagacctcacttgcaaatattcagtttattcgatttctaaggagaactgaaggcactgaagcagcccgtggcacaaagtgtttttgaagcaggtttaaagaggtttatgcatgagccaggatatatccttgaatacacagacttcttgtgtcgtttaaatgacgatagaaatgtacgtgctttgtttgagagggcactgagcttacttcctcccgaggaatccacagaggttgaacaaagaaggaaagaggctctatctaggacatctgaagatgccttatctgcatcggaaaacacacttcatgacatagtttctcgatacagttacatggatctttggccatgctcatcaaaagaattggattatctagcgagacaagagtggcttgcgaaaaacattgttaagaaggttgagaaaccagctatgttaaatagcggtagcatgctagacaaaggtgctgcaggatttagtgcgagtgcgaggttattaccacaatctgccaaagttgttcgtcctgagacttctcaaatggttatttatgatccaagacagatgaaaggcccagagtttgcagcaactagcagtgggtacacgaaggaggttgaagccacgctcaaagtgctatcgccgtcgatggtgtcctttattaagaatttgcctgctattgaaggaccatcgccggatatcgatgtggtgctcagcgtgctgctgcagagcacattgccagttgcacagagtgctgggaaagcaggtggcgtgagtgagctctcaggcgttggaaaaacgggactgaaccagaatggatctgtccatagacctccaagggagagaaggaaggacgtggagaggcaaggggcgcaggaggaagaggatgcgtcggcggtgcagagcagggcagctgtgccacgagacatcttcaggcttcggcagattcagaggagccgtggcctgggtgtgggtggtgccgccgtttcgcagtctgggtcctcggcattttctttctcgggcggtggaagcgccttctctggggaccactcagctagcacagattagcctactcaccagacatgttcaacagctcagctcaaagctcaactgcgagtagtgagctcaaaggctacctccagcagatttatatcacattccttttctcatcccctatttcaaacatcactttgcaaacaatatcatctatagtttcatgtcccctattttacactacatgctggagacagtctaaggacataatgacatactagtagggtgcccgtgcgttgctacggcaacttaaaaattgatacaaaacaataacgcaatataattacaatctttgattgatgattttgtagctaac

SEQ ID NO: 62899 - DNA, 2492 bp, Zea Mays
agatcagctcaacaaagataaccttgcgccgcctcctaagaagatcaagactacccagccaggttctacagaccctcaaaaccttaatcgttagatcatcgccgttctcatgaagaattccggaggaggcgccgcccatggcgatggcggcgacatctacaatgtccgggccgccgagatcctcgccaacgaggccctcctgctccccatcaatgaggccgccccaatctacgagaatctgctcgccactttccccacggccgccaaatactggaagcagtatgtcgaagcctacatggccaccaacaacgatgaagccgccaagcagattttcagcagatgcctgctcaactgccttcacattagtctatggcgctgttacatcaactttatcaggagaattaacgataaaaggggctctgagggtcttgatgagacgaagaaggcttttgatttcatgctcaactacgttgggaatgatgcagcttctggccctgtttggatggagtatattaatttcctcaagtccatgccggttgtgacgccccatgaagagtcgcatcgcatgactactgttcgtaaagtgtaccagaaggcaattttagttccaactaatcatgtagagcagttgtggaaggattacgagaacttcgaaaattctgttagccgcaccttggcaaaaggcttgttatctgaataccaaccaaagtttaacagtgctaaggctgtatatagagagcgaaaaaagtacattgatgatattgattggaatgtactggccaccccccctacaggctcgtacaaggaagagcaacagtgtatggcatggaaaagactcttggtatttgaaaatgcctgatgtatctatatcatcatcctgatatatggtacgattatgctatgtggcatgtgaagaatggttctatggattctgcatcaaaaatatttcagcgagctctaaaagcaatccatgattctgaagtacttaagtatgcctttgctgaaatggaagagtccagaggggcgatacagactgctaagacagtatacgaatctcttctaggtgaaaatgctagtgagacctcacttgcaaatattcagtttattcgatttctaaggagaactgaaggcactgaagcagcccgtggcacaaagtgtttttgaagcaggtttaaagaggtttatgcatgagccaggatatatccttgaatacacagacttcttgtgtcgtttaaatgacgatagaaatgtacgtgctttgtttgagagggcactgagcttacttcctcccgaggaatccacagaggtatggagacgatttgcacaatttgaacagaactatggggatttatcaagcatgcttaaggttgaacaaagaaggaaagaggctctatctaggacatctgaagatgccttatctgcatcggaaaacacacttcatgacatagtttctcgatacagttacatggatctttggccatgctcatcaaaagaattggattatctagcgagacaagagtggcttgcgaaaaacattgttaagaaggttgagaaaccagctatgttaaatagcggtagcatgctagacaaaggtgctgcaggatttagtgcgagtgcgaggttattaccacaatctgccaaagttgttcgtcctgagacttctcaaatggttatttatgatccaagacagatgaaaggcccagagtttgcagcaactagcagtgggtacacgaaggaggttgaagccacgctcaaagtgctatcgccgtcgatggtgtcctttattaagaatttgcctgctattgaaggaccatcgccggatatcgatgtggtgctcagcgtgctgctgcagagcacattgccagttgcacagagtgctgggaaagcaggtggcgtgagtgagctctcaggcgttggaaaaacgggactgaaccagaatggatctgtccatagacctccaagggagagaaggaaggacgtggagaggcaaggggcgcaggaggaagaggatgcgtcggcggtgcagagcagggcagctgtgccacgagacatcttcaggcttcggcagattcagaggagccgtggcctgggtgtgggtggtgccgccgtttcgcagtctgggtcctcggcattttctttctcgggcggtggaagcgccttctctggggaccactcagctagcacagattagcctactcaccagacatgttcaacagctcagctcaaagctcaactgcgagtagtgagctcaaaggctacctccagcagatttatatcacattccttttctcatcccctatttcaaacatcactttgcaaacaatatcatctatagtttcatgtcccctattttacactacatgctggagacagtctaaggacataatgacatactagtagggtgcccgtgcgttgctacggcaacttaaaaattgatacaaaacaataacgcaatataattacaatctttgattgatgattttgtagctaac

SEQ ID NO: 62900 - DNA, 2499 bp, Zea Mays
agatcagctcaacaaagataaccttgcgccgcctcctaagaagatcaagactacccagccaggttctacagaccctcaaaaccttaatcgttagatcatcgccgttctcatgaagaattccggaggaggcgccgcccatggcgatggcggcgacatctacaatgtccgggccgccgagatcctcgccaacgaggccctcctgctccccatcaatgaggccgccccaatctacgagaatctgctcgccactttccccacggccgccaaatactggaagcagtatgtcgaagcctacatggccaccaacaacgatgaagccgccaagcagattttcagcagatgcctgctcaactgccttcacattagtctatggcgctgttacatcaactttatcaggagaattaacgataaaaggggctctgagggtcttgatgagacgaagaaggcttttgatttcatgctcaactacgttgggaatgatgcagcttctggccctgtttggatggagtatattaatttcctcaagtccatgccggttgtgacgccccatgaagagtcgcatcgcatgactactgttcgtaaagtgtaccagaaggcaattttagttccaactaatcatgtagagcagttgtggaaggattacgagaacttcgaaaattctgttagccgcaccttggcaaaaggcttgttatctgaataccaaccaaagtttaacagtgctaaggctgtatatagagagcgaaaaaagtacattgatgatattgattggaatgtactggccaccccccctacaggctcgtacaaggaagagcaacagtgtatggcatggaaaagactcttggtatttgaaaaattctgaagtacttaagtatgcctttgctgaaatggaagagtccagaggggcgatacagactgctaagacagtatacgaatctcttctaggtgaaaatgctagtgagacctcacttgcaaatattcagtttattcgatttctaaggagaactgaaggcactgaagcagcccgtaagtactttttggatgctcggaagtcaccaagctgcacttatcatttgtatgttgcttatgctacaatggcattctgcgttgacaaggatgcaaaggtggcacaaagtgtttttgaagcaggtttaaagaggtttatgcatgagccaggatatatccttgaatacacagacttcttgtgtcgtttaaatgacgatagaaatgtacgtgctttgtttgagagggcactgagcttacttcctcccgaggaatccacagaggtatggagacgatttgcacaatttgaacagaactatggggatttatcaagcatgcttaaggttgaacaaagaaggaaagaggctctatctaggacatctgaagatgccttatctgcatcggaaaacacacttcatgacatagtttctcgatacagttacatggatctttggccatgctcatcaaaagaattggattatctagcgagacaagagtggcttgcgaaaaacattgttaagaaggttgagaaaccagctatgttaaatagcggtagcatgctagacaaaggtgctgcaggatttagtgcgagtgcgaggttattaccacaatctgccaaagttgttcgtcctgagacttctcaaatggttatttatgatccaagacagatgaaagagtgggaaatcaccgtggattcttgggcaggcccagagtttgcagcaactagcagtgggtacacgaaggaggttgaagccacgctcaaagtgctatcgccgtcgatggtgtcctttattaagaatttgcctgctattgaaggaccatcgccggatatcgatgtggtgctcagcgtgctgctgcagagcacattgccagttgcacagagtgctgggaaagcaggtggcgtgagtgagctctcaggcgttggaaaaacgggactgaaccagaatggatctgtccatagacctccaagggagagaaggaaggacgtggagaggcaaggggcgcaggaggaagaggatgcgtcggcggtgcagagcagggcagctgtgccacgagacatcttcaggcttcggcagattcagaggagccgtggcctgggtgtgggtggtgccgccgtttcgcagtctgggtcctcggcattttctttctcgggcggtggaagcgccttctctggggaccactcagctagcacagattagcctactcaccagacatgttcaacagctcagctcaaagctcaactgcgagtagtgagctcaaaggctacctccagcagatttatatcacattccttttctcatcccctatttcaaacatcactttgcaaacaatatcatctatagtttcatgtcccctattttacactacatgctggagacagtctaaggacataatgacatactagtagggtgcccgtgcgttgctacggcaacttaaaaattgatacaaaacaataacgcaatataattacaatctttgattgatgattttgtagctaac

SEQ ID NO: 62901 - DNA, 2566 bp, Zea Mays
atccacttatttacatgttgacgaccaactttcagatcagctcaacaaagataaccttgcgccgcctcctaagaagatcaagactacccagccaggttctacagaccctcaaaaccttaatcgttagatcatcgccgttctcatgaagaattccggaggaggcgccgcccatggcgatggcggcgacatctacaatgtccgggccgccgagatcctcgccaacgaggccctcctgctccccatcaatgaggccgccccaatctacgagaatctgctcgccactttccccacggccgccaaatactggaagcagtatgtcgaagcctacatggccaccaacaacgatgaagccgccaagcagattttcagcagatgcctgctcaactgccttcacattagtctatggcgctgttacatcaactttatcaggagaattaacgataaaaggggctctgagggtcttgatgagacgaagaaggcttttgatttcatgctcaactacgttgggaatgatgcagcttctggccctgtttggatggagtatattaatttcctcaagtccatgccggttgtgacgccccatgaagagtcgcatcgcatgactactgttcgtaaagtgtaccagaaggcaattttagttccaactaatcatgtagagcagttgtggaaggattacgagaacttcgaaaattctgttagccgcaccttggcaaaaggcttgttatctgaataccaaccaaagtttaacagtgctaaggctgtatatagagagcgaaaaaagtacattgatgatattgattggaatgtactggccaccccccctacaggctcgtacaaggaagagcaacagtgtatggcatggaaaagactcttggtatttgaaaaggggaaccctcaaagaattgatgctacaacagctaataggcgtatcacctttacttatgagcaaattctgaagtacttaagtatgcctttgctgaaatggaagagtccagaggggcgatacagactgctaagacagtatacgaatctcttctaggtgaaaatgctagtgagacctcacttgcaaatattcagtttattcgatttctaaggagaactgaaggcactgaagcagcccgtaagtactttttggatgctcggaagtcaccaagctgcacttatcatttgtatgttgcttatgctacaatggcattctgcgttgacaaggatgcaaaggtggcacaaagtgtttttgaagcaggtttaaagaggtttatgcatgagccaggatatatccttgaatacacagacttcttgtgtcgtttaaatgacgatagaaatgtacgtgctttgtttgagagggcactgagcttacttcctcccgaggaatccacagaggtatggagacgatttgcacaatttgaacagaactatggggatttatcaagcatgcttaaggttgaacaaagaaggaaagaggctctatctaggacatctgaagatgccttatctgcatcggaaaacacacttcatgacatagtttctcgatacagttacatggatctttggccatgctcatcaaaagaattggattatctagcgagacaagagtggcttgcgaaaaacattgttaagaaggttgagaaaccagctatgttaaatagcggtagcatgctagacaaaggtgctgcaggatttagtgcgagtgcgaggttattaccacaatctgccaaagttgttcgtcctgagacttctcaaatggttatttatgatccaagacagatgaaaggcccagagtttgcagcaactagcagtgggtacacgaaggaggttgaagccacgctcaaagtgctatcgccgtcgatggtgtcctttattaagaatttgcctgctattgaaggaccatcgccggatatcgatgtggtgctcagcgtgctgctgcagagcacattgccagttgcacagagtgctgggaaagcaggtggcgtgagtgagctctcaggcgttggaaaaacgggactgaaccagaatggatctgtccatagacctccaagggagagaaggaaggacgtggagaggcaaggggcgcaggaggaagaggatgcgtcggcggtgcagagcagggcagctgtgccacgagacatcttcaggcttcggcagattcagaggagccgtggcctgggtgtgggtggtgccgccgtttcgcagtctgggtcctcggcattttctttctcgggcggtggaagcgccttctctggggaccactcagctagcacagattagcctactcaccagacatgttcaacagctcagctcaaagctcaactgcgagtagtgagctcaaaggctacctccagcagatttatatcacattccttttctcatcccctatttcaaacatcactttgcaaacaatatcatctatagtttcatgtcccctattttacactacatgctggagacagtctaaggacataatgacatactagtagggtgcccgtgcgttgctacggcaacttaaaaattgatacaaaacaataacgcaatataattacaatctttgattgatgattttgtagctaac

SEQ ID NO: 62902 - DNA, 2691 bp, Zea Mays
aataactcacttctcagtaactacgatgctttcttaaaaaggcattgaacttcaatagtattaacttttattttatattagccatgttacttgacacttcttatccacttatttacatgttgacgaccaactttcagatcagctcaacaaagataaccttgcgccgcctcctaagaagatcaagactacccagccaggttctacagaccctcaaaaccttaatcgttagatcatcgccgttctcatgaagaattccggaggaggcgccgcccatggcgatggcggcgacatctacaatgtccgggccgccgagatcctcgccaacgaggccctcctgctccccatcaatgaggccgccccaatctacgagaatctgctcgccactttccccacggccgccaaatactggaagcagtatgtcgaagcctacatggccaccaacaacgatgaagccgccaagcagattttcagcagatgcctgctcaactgccttcacattagtctatggcgctgttacatcaactttatcaggagaattaacgataaaaggggctctgagggtcttgatgagacgaagaaggcttttgatttcatgctcaactacgttgggaatgatgcagcttctggccctgtttggatggagtatattaatttcctcaagtccatgccggttgtgacgccccatgaagagtcgcatcgcatgactactgttcgtaaagtgtaccagaaggcaattttagttccaactaatcatgtagagcagttgtggaaggattacgagaacttcgaaaattctgttagccgcaccttggcaaaaggcttgttatctgaataccaaccaaagtttaacagtgctaaggctgtatatagagagcgaaaaaagtacattgatgatattgattggaatgtactggccaccccccctacaggctcgtacaaggaagagcaacagtgtatggcatggaaaagactcttggtatttgaaaaggggaaccctcaaagaattgatgctacaacagctaataggcgtatcacctttacttatgagcaatgcctgatgtatctatatcatcatcctgatatatggtacgattatgctatgtggcatgtgaagaatggttctatggattctgcatcaaaaatatttcagcgagctctaaaagcaatccatgattctgaagtacttaagtatgcctttgctgaaatggaagagtccagaggggcgatacagactgctaagacagtatacgaatctcttctaggtgaaaatgctagtgagacctcacttgcaaatattcagtttattcgatttctaaggagaactgaaggcactgaagcagcccgtggcacaaagtgtttttgaagcaggtttaaagaggtttatgcatgagccaggatatatccttgaatacacagacttcttgtgtcgtttaaatgacgatagaaatgtacgtgctttgtttgagagggcactgagcttacttcctcccgaggaatccacagaggtatggagacgatttgcacaatttgaacagaactatggggatttatcaagcatgcttaaggttgaacaaagaaggaaagaggctctatctaggacatctgaagatgccttatctgcatcggaaaacacacttcatgacatagtttctcgatacagttacatggatctttggccatgctcatcaaaagaattggattatctagcgagacaagagtggcttgcgaaaaacattgttaagaaggttgagaaaccagctatgttaaatagcggtagcatgctagacaaaggtgctgcaggatttagtgcgagtgcgaggttattaccacaatctgccaaagttgttcgtcctgagacttctcaaatggttatttatgatccaagacagatgaaaggcccagagtttgcagcaactagcagtgggtacacgaaggaggttgaagccacgctcaaagtgctatcgccgtcgatggtgtcctttattaagaatttgcctgctattgaaggaccatcgccggatatcgatgtggtgctcagcgtgctgctgcagagcacattgccagttgcacagagtgctgggaaagcaggtggcgtgagtgagctctcaggcgttggaaaaacgggactgaaccagaatggatctgtccatagacctccaagggagagaaggaaggacgtggagaggcaaggggcgcaggaggaagaggatgcgtcggcggtgcagagcagggcagctgtgccacgagacatcttcaggcttcggcagattcagaggagccgtggcctgggtgtgggtggtgccgccgtttcgcagtctgggtcctcggcattttctttctcgggcggtggaagcgccttctctggggaccactcagctagcacagattagcctactcaccagacatgttcaacagctcagctcaaagctcaactgcgagtagtgagctcaaaggctacctccagcagatttatatcacattccttttctcatcccctatttcaaacatcactttgcaaacaatatcatctatagtttcatgtcccctattttacactacatgctggagacagtctaaggacataatgacatactagtagggtgcccgtgcgttgctacggcaacttaaaaattgatacaaaacaataacgcaatataattacaatctttgattgatgattttgtagctaac

SEQ ID NO: 62903 - DNA, 2684 bp, Zea Mays
ctacatgggcatcatcattatataatatataagttagtggagatcagcacacatgcatgacatattgacatgataataaaaataactcacttctcagtaactacgatgctttcttaaaaaggcattgaacttcaatagtattaacttttattttatattagccatgttacttgacacttcttatccacttatttacatgttgacgaccaactttcagatcagctcaacaaagataaccttgcgccgcctcctaagaagatcaagactacccagccaggttctacagaccctcaaaaccttaatcgttagatcatcgccgttctcatgaagaattccggaggaggcgccgcccatggcgatggcggcgacatctacaatgtccgggccgccgagatcctcgccaacgaggccctcctgctccccatcaatgaggccgccccaatctacgagaatctgctcgccactttccccacggccgccaaatactggaagcagtatgtcgaagcctacatggccaccaacaacgatgaagccgccaagcagattttcagcagatgcctgctcaactgccttcacattagtctatggcgctgttacatcaactttatcaggagaattaacgataaaaggggctctgagggtcttgatgagacgaagaaggcttttgatttcatgctcaactacgttgggaatgatgcagcttctggccctgtttggatggagtatattaatttcctcaagtccatgccggttgtgacgccccatgaagagtcgcatcgcatgactactgttcgtaaagtgtaccagaaggcaattttagttccaactaatcatgtagagcagttgtggaaggattacgagaacttcgaaaattctgttagccgcaccttggcaaaaggcttgttatctgaataccaaccaaagtttaacagtgctaaggctgtatatagagagcgaaaaaagtacattgatgatattgattggaatgtactggccaccccccctacaggctcgtacaaggaagagcaacagtgtatggcatggaaaagactcttggtatttgaaaaattctgaagtacttaagtatgcctttgctgaaatggaagagtccagaggggcgatacagactgctaagacagtatacgaatctcttctaggtgaaaatgctagtgagacctcacttgcaaatattcagtttattcgatttctaaggagaactgaaggcactgaagcagcccgtaagtactttttggatgctcggaagtcaccaagctgcacttatcatttgtatgttgcttatgctacaatggcattctgcgttgacaaggatgcaaaggtggcacaaagtgtttttgaagcaggtttaaagaggtttatgcatgagccaggatatatccttgaatacacagacttcttgtgtcgtttaaatgacgatagaaatgtacgtgctttgtttgagagggcactgagcttacttcctcccgaggaatccacagaggtatggagacgatttgcacaatttgaacagaactatggggatttatcaagcatgcttaaggttgaacaaagaaggaaagaggctctatctaggacatctgaagatgccttatctgcatcggaaaacacacttcatgacatagtttctcgatacagttacatggatctttggccatgctcatcaaaagaattggattatctagcgagacaagagtggcttgcgaaaaacattgttaagaaggttgagaaaccagctatgttaaatagcggtagcatgctagacaaaggtgctgcaggatttagtgcgagtgcgaggttattaccacaatctgccaaagttgttcgtcctgagacttctcaaatggttatttatgatccaagacagatgaaaggcccagagtttgcagcaactagcagtgggtacacgaaggaggttgaagccacgctcaaagtgctatcgccgtcgatggtgtcctttattaagaatttgcctgctattgaaggaccatcgccggatatcgatgtggtgctcagcgtgctgctgcagagcacattgccagttgcacagagtgctgggaaagcaggtggcgtgagtgagctctcaggcgttggaaaaacgggactgaaccagaatggatctgtccatagacctccaagggagagaaggaaggacgtggagaggcaaggggcgcaggaggaagaggatgcgtcggcggtgcagagcagggcagctgtgccacgagacatcttcaggcttcggcagattcagaggagccgtggcctgggtgtgggtggtgccgccgtttcgcagtctgggtcctcggcattttctttctcgggcggtggaagcgccttctctggggaccactcagctagcacagattagcctactcaccagacatgttcaacagctcagctcaaagctcaactgcgagtagtgagctcaaaggctacctccagcagatttatatcacattccttttctcatcccctatttcaaacatcactttgcaaacaatatcatctatagtttcatgtcccctattttacactacatgctggagacagtctaaggacataatgacatactagtagggtgcccgtgcgttgctacggcaacttaaaaattgatacaaaacaataacgcaatataattacaatctttgattgatgattttgtagctaac

SEQ ID NO: 62904 - DNA, 1877 bp, Zea Mays
ctcaacaaagataaccttgcgccgcctcctaagaagatcaagactacccagccaggttctacagaccctcaaaaccttaatcgttagatcatcgccgttctcatgaagaattccggaggaggcgccgcccatggcgatggcggcgacatctacaatgtccgggccgccgagatcctcgccaacgaggccctcctgctccccatcaatgaggccgccccaatctacgagaatctgctcgccactttccccacggccgccaaatactggaagcagtatgtcgaagcctacatggccaccaacaacgatgaagccgccaagcagattttcagcagatgcctgctcaactgccttcacattagtctatggcgctgttacatcaactttatcaggagaattaacgataaaaggggctctgagggtcttgatgagacgaagaaggcttttgatttcatgctcaactacgttgggaatgatgcagcttctggccctgtttggatggagtatattaatttcctcaagtccatgccggttgtgacgccccatgaagagtcgcatcgcatgactactgttcgtaaagtgtaccagaaggcaattttagttccaactaatcatgtagagcagttgtggaaggattacgagaacttcgaaaattctgttagccgcaccttggcaaaaggcttgttatctgaataccaaccaaagtttaacagtgctaaggctgtatatagagagcgaaaaaagtacattgatgatattgattggaatgtactggccaccccccctacaggctcgtacaaggaagagcaacagtgtatggcatggaaaagactcttggtatttgaaaaggggaaccctcaaagaattgatgctacaacagctaataggcgtatcacctttacttatgagcaatgcctgatgtatctatatcatcatcctgatatatggtacgattatgctatgtggcatgtgaagaatggttctatggattctgcatcaaaaatatttcagcgagctctaaaagcaatccatgattctgaagtacttaagtatgcctttgctgaaatggaagagtccagaggggcgatacagactgctaagacagtatacgaatctcttctaggtgaaaatgctagtgagacctcacttgcaaatattcagtttattcgatttctaaggagaactgaaggcactgaagcagcccgtaagtactttttggatgctcggaagtcaccaagctgcacttatcatttgtatgttgcttatgctacaatggcattctgcgttgacaaggatgcaaaggtggcacaaagtgtttttgaagcaggtttaaagaggtttatgcatgagccaggatatatccttgaatacacagacttcttgtgtcgtttaaatgacgatagaaatgtacgtgctttgtttgagagggcactgagcttacttcctcccgaggaatccacagaggtatggagacgatttgcacaatttgaacagaactatggggatttatcaagcatgcttaaggttgaacaaagaaggaaagaggctctatctaggacatctgaagatgccttatctgcatcggaaaacacacttcatgacatagtttctcgatacagttacatggatctttggccatgctcatcaaaagaattggattatctagcgagacaagagtggcttgcgaaaaacattgttaagaaggttgagaaaccagctatgttaaatagcggtagcatgctagacaaaggtgctgcaggatttagtgcgagtgcgaggttattaccacaatctgccaaagttgttcgtcctgagacttctcaaatggttatttatgatccaagacagatgaaagagtgggaaatcaccgtggattcttg

SEQ ID NO: 62905 - DNA, 1233 bp, Zea Mays
ttcagatcagctcaacaaagataaccttgcgccgcctcctaagaagatcaagactacccagccaggttctacagaccctcaaaaccttaatcgttagatcatcgccgttctcatgaagaattccggaggaggcgccgcccatggcgatggcggcgacatctacaatgtccgggccgccgagatcctcgccaacgaggccctcctgctccccatcaatgaggccgccccaatctacgagaatctgctcgccactttccccacggccgccaaatactggaagcagtatgtcgaagcctacatggccaccaacaacgatgaagccgccaagcagattttcagcagatgcctgctcaactgccttcacattagtctatggcgctgttacatcaactttatcaggagaattaacgataaaaggggctctgagggtcttgatgagacgaagaaggcttttgatttcatgctcaactacgttgggaatgatgcagcttctggccctgtttggatggagtatattaatttcctcaagtccatgccggttgtgacgccccatgaagagtcgcatcgcatgactactgttcgtaaagtgtaccagaaggcaattttagttccaactaatcatgtagagcagttgtggaaggattacgagaacttcgaaaattctgttagccgcaccttggcaaaaggcttgttatctgaataccaaccaaagtttaacagtgctaaggctgtatatagagagcgaaaaaagtacattgatgatattgattggaatgtactggccaccccccctacaggctcgtacaaggaagagcaacagtgtatggcatggaaaagactcttggtatttgaaaaggggaaccctcaaagaattgatgctacaacagctaataggcgtatcacctttacttatgagcaatgcctgatgtatctatatcatcatcctgatatatggtacgattatgctatgtggcatgtgaagaatggttctatggattctgcatcaaaaatatttcagcgagctctaaaagcaatccatgattctgaagtacttaagtatgcctttgctgaaatggaagagtccagaggggcgatacagactgctaagacagtatacgaatctcttctaggtgaaaatgctagtgagacctcacttgcaaatattcagtttattcgatttctaaggagaactgaaggcactgaagcagcccgtcccaatatttttaatagtga

SEQ ID NO: 62906 - DNA, 897 bp, Zea Mays
cagaggttcaaagcaagcagtctcaaaatcaagtgatggcttccgtataagagggacttttcagggtctcttgctcatcattcggtgccaacgatggagacaactctttgctggcttgagccttaactatgccaaggcttaatgactcaaatgtcaaggagataaagagcaagacaaagaaaaagaaaaatgcagtgtctggcgtaggatcatcttcatccaaaggaaaggcaattgcaggtaaaaggggagaaaaatccaagagggaatataacagcagtggtattcaagaagcagagagaaataaactgtttttctttgagggctcttcatataattttgacttggaggatctattgagggctttggctgaagtccttggaaaaggaagttatgggactacgtacaaagctgttctggaggatggaacaacagtggtggtcaagagattgaaagaagtggtggcgggaaagagggaatttgaacagcagatggagctaattggcaaggtttgccagcatcaaaacactgtcccattgcatgcttactactactccaaggatgagaagctcttggtgtatgactatgtcccactaggtagcctttgtgctgctttgcatggtaacaaagctgttggaagaaccccattggactgggagaccagggtgaagataactctgggcacaacacgcggaatggcttaccttcactccgtgggtagcggcgggaagttcattcacgggaacatcaagtcaagcaacatccttctctcacaggaactcggcgcctgtgtcaccgagttcggccttgcccagctcatgtccacgccccacgtccacccactgcacacggaatggcttaccttcactcggtgtggctcaatcgagggggagtcac

SEQ ID NO: 62907 - DNA, 944 bp, Zea Mays
aagcagtctcaaaatcaagtgatggcttccgtataagagggacttttcagggtctcttgctcatcattcggtgccaacgatggagacaactctttgctggcttgagccttaactatgccaaggaaagaaaaatgcagtgtctggcgtaggatcatcttcatccaaaggaaaggcaattgcaggtaaaaggggagaaaaatccaagagggaatataacagcagtggtattcaagaagcagagagaaataaactgtttttctttgagggctcttcatataattttgacttggaggatctattgagggctttggctgaagtccttggaaaaggaagttatgggactacgtacaaagctgttctggaggatggaacaacagtggtggtcaagagattgaaagaagtggtggcgggaaagagggaatttgaacagcagatggagctaattggcaaggtttgccagcatcaaaacactgtcccattgcatgcttactactactccaaggatgagaagctcttggtgtatgactatgtcccactaggtagcctttgtgctgctttgcatggtaacaaagctgttggaagaaccccattggactgggagaccagggtgaagataactctgggcacaacacgcggaatggcttaccttcactccgtgggtagcggcgggaagttcattcacgggaacatcaagtcaagcaacatccttctctcacaggaactcggcgcctgtgtcaccgagttcggccttgcccagctcatgtccacgccccacgtccacccactgcacacggaatggcttaccttcactcggtgtggctcaagtatgaacgcttatgcttttctggattaattgaaatgtctttcatcttctatgactatgcatgtgtttttcaagcaatacttggtactcgagcatcagagatcataaagcttgctccttt

SEQ ID NO: 62908 - DNA, 1595 bp, Zea Mays
tccttctctatggtatcttgtttgaatgtgaaaggagttaactccttgggaaggttcgagtcttaattatcactaaattttgagatgtttccctggtatttggcaaagagcaacatatgttatatatacacagttgtgatgcactcacaactgcagattttcattaacagataccctataaaatctgtataccactttaccattctaaatgtcttggaaagaagacagttgagaatgtaccatagctacagattataagttattaagtcaactatatcatctaaagtaactatatggattcatgctttaaaatgctttggttccattcagataccattacaatgtagtagatgccaaacctcatcaacactctactaaatcaatcttatatgttacaaaaacaggatttgagcctagctcagttggtgggagatatgggcgtgcaccccccattagctaaagtcctctttttgcaatgtacctagttcctcctaggttggtttagtttactgtaagggccttcttattttatataaaacagcaaacaacactatagaaaagcattaaactgaagtagaataaggacatggacaaacattaggaagaacaagatgactgacactcaacttatatgcggacaaaaaaattgaaaaaagaacataaacgcaaaaatagtcaaaatgggataagtggtcttaaaacagataacatgtagataccttgtacacatcattctttgtgcaaatcagtatgtgtaattcatttgaatgagtggcctcaaaagtcaaaaataaaacaaaaaacagtagttcatctttgggttgtatggagacaatttattcctcaaaagaaaaagggaagcattgtgtgcaaatcaatctgtgtagttcatcttcgggtaagtattgcacagaccagaaccacctcttctgcaaggaaaaaggaaacacaagaagtataggtttcgtagttatctcctaatcatccattgctctcattttacatgtgcataactgcatatgcttaaagaaaagttagctccattttgaatataacaaccctgaagtaaagggaaaaataatattagactgatgaaagcaccatggcagcacaaatatgccaaatagatccactgtcagccttcaggcacaaactcaaccaacgaaaaaattatatccttactgccatcggtggagctaacttttttcattagttaggagatatctctctccgcacttcttaatcagcttactccgcactgccatcgattccttactgctaatgaaaatcatgatttgagagctctctccgcactgccatcggttccttactgccaatgaaaatcatgaaaccggagccttcaggcacaaaccggagctctctccacacaaactcaaccatgattaggagattggagctctcaaaccgcaacacgcgcttccttactgcgcggagagagctccaattccttactgccatttcaacttcttaaatttaattaattagatcgaaccgatgaaattggcatgtagatttgtctcggaaaacaaatgacaaaatatatttataacaaatatattataataaaactcggc

SEQ ID NO: 62909 - DNA, 2801 bp, Zea Mays
caacttgaaaccagttattcctgtctaaatgactttgaatgttgcatttgcagcaatatacccatgacatatacatttaaatgataaaagataatatgataagcatctgaagatgaaatatatccatgacatatacattttaaaatttaggacaaggatttcatattgaaagatgccagcaaattattcaatgagaattaagatcagttggcattctaacttgtacacatagaatcagttatgaaatgaaatgacgtgccgcaaaaactaattctaaacaaaatctgctccttctctatagagcattgaatttaactatcaacctatatcaccctccatttggtggcaacaagtagctctcacttttgagtacttctgtgcctaacgaccacaatgtcgataacaatgacttcttgccttctcagagatttaaacaccccatgaatgcaacccaacactaatctattgatatgtcaaggacagacataacaagaaacaacttttatttaggtggcaccatatgtatcttcaagaagtaagcaggattggtgtggcctagcaagcggttgcaggccttcacatgtgcacacagtgatgttggaatcatggcctgcgctcctagagatgggtaagtatttcattaaaataccatgaagttgctccccctgtggtgtatgttcattattctgctggtgttcttcgagagctctgttttatatgataagccgttcactaagtgaatatgtttcactgccttctaatagccttggctgccatagtctcctgcacaaatgtacatcatccgataaaaaattgaagggcgagggaaacagaaaaataaagatggaaccaatccaagtcccttctcttcaccaaccataattgagcgcagggactgcagttctatgtcttttataggaatgaaaataggaggggattaaggagtgagcgcttacatttggtggagccgaacatggctgccgatgcttagtgaagctagcgttccgttgacgggactcagcctgcctcatgaattatatttaaattccaggctagtacttgacacaaatatgaaccatgaacttggtatggattcgtgttgcttgctcgagcattttgcacacttgaaaaagagtttgacaagtttcataatccctatttggtagtattagctcccctacatatgtgctagatgtttggattgaggtttacaaatatgttgatctagtctctaagcttatacattgtttgtaggattatacttttatattaaaattataatgatgcatgaatattttatgagaacaaaaatagctgatccgaccatccatcaaggattcaacgtccatggtcaacccacaaggacctctctcactggtagctgctgacaaagtaaagctacgctgctactgttcctagcaaattgatgggatgaccaaacaaagctgatgggtagcattttgaggagatagcatgtatttttttaaaaaattgaatgtaataaacaaaatggaagaatacatcccattgcaacaataattcttcatattataatatagtttgctctaaattgagaggttgatgttgtcttaagtataattgttctgtatttattgtaataactcaatatatttgtactaatactccatttattttataaatgtaagtcttctatctttctcttattaacattaactaagtctatagggcattgactaagtctatagaaattacatcgataattacaaaattaaaatagtttttattaaatccaccatggcatagattatcatagttctgtcatctagtgttgtgtactttctattttaaattataagcatagcaccaagtagaacgatttataatttaaaacgggagcagtatatatttgtataactttctagatagtttgacttacgctaaaagtaaaataattaggactcctatgttattggaacggatgggtattatttaggatttttgtaaggctggttgtcctatataatttgtagtcattcactgttctctatttctaatcggatacagaacaatttacactatcaagaagggaaacatcaaagaaaaagttacagtaaaatacaatgttacctgcaaagaatttccttcatggtaaaaatgaattgctgttatgttttacttggtcaggaaaagaacacaatgatgaggacaatagcaggattgcaaccactgcagtgtagcctgctctcgcgcttgtgagccttaccacaccgctcgctgggttcgccgccttctgagccttccttttaagcacatttatctcaaatttatttattaactatatttctattatcagattagaaggcctactaaacctgctacatttgtccttcctcccaaaaaagaactgtaaccatccaaagctcccacacaattcatgttgcagaccgctagaaaaacatgaatgaaacaaaagaagaaaacatgcacaaaatccagtgaaagtaagaaaggctgagacacttctaaatcagctttggatttgtggtaaatcttagcaaagggaatacttaataaatagacaacaacaacaaggtacaaagaggcagaggctgtacctagaatcagcagcgatggaagcggagctatcaccatcaccagttctatcagctaagtctcccaatatctctagtagctgtctgggtaggcaatctataaggtggcctaggttggctacacaacgaacttattaattgtttgaaagcacaagttaccataccttcaggtgcgacggagtctgctgatgcagacatggatgcagc

SEQ ID NO: 62910 - DNA, 1656 bp, Zea Mays
tgctcgctagctgatctgcctgtgcagtagtagtagcaagagcatcaaggacttccaggcgctgctacaccagggctacagccggacgacgacgacggcgtcggcgtcgtcgtcgtcgcccacgccactactccctcttgcgccgccaacccggccgtgcccgcgctcggccaacaagccgaagatgctcatcttcatccgcaagcagaaccgggtgctgctgaacctgccgcaggtggtgacggcgtgccggcgggcggggttcgcgccgcacgtgatgaacctgcggcggcagaccccgctggccgcgatccacgcggcgctggcgtcggcggacgccatggtggcggtgcacggcgcggccgtcacccacttcctcttcatgcgcccgggctccgtgctcctgcagatcgtgcccgtgggcctcgactgggcggccgacgccttctacggcaagcccgcgcagcagctcggcctcgactacctcgagtacagggtggcgcccgaggagagctcgctggccgccgagtacgggctcaacagcaccgtggtgcggaccccctgggtcatcagcagccgcggctggtgggagatgaagaaggtctacatggaccgccagaacgtcaccgtcaacgtcaagcgcttcgccgacctgctcagggcggcgcgtgctcgcctcaggaacaccacggcgtgcgccgccaagcccgcagcgccgctcaggtagacgctagctgctgattgggcttgggttaggtgtcaattactttagtcacacttgccgatttctttgtgctttcgtcctctttttggccgggggataaaaaaggagacgaggtcctgtaaatatgattgggggtacggttggctgagagattggtgggggatctatccatcgcctcctttcgcggtgcattcgtttggttcttggtgttgctggagggagcagcagaaggtgaagaataataatttatggcagggacggctctcctgaaacactttgttcacagtagatcataggggtatcagctctttttatttcgttgccctttctttcttttttttcttttttttttggttttctcattctttgggtgtccagatgatgtataagggcatgtacagtggtgtttaatgtggaggctcttaaggtgtttaagggggttatttgcaaaaaaatcttagagccgtctctccgcgaagagacgcctctggctcgtaaaccaagtagcaacagacgcctcacttcccactgtacgaatttgttgtctgttctatcgatctgatgctatacaaatacatttaattctgtatttattaatagactacgtttgtagacactccattgtacaatacagtctcttagttgtctcctgtgcttagagaaccgttttggtgtctctccactgtacatgccctaagaaactacattctgtaacaaagatcaatagaaatccagactcttttacagatcctcttccagcatggcacgagccaaaagaggcggcacgaaattacaatgcagttcttgtgagaccttttggagttctgatgagatagatgcaaaagaggaagttgggaggtccacatggagaagatgttttgtcggtttgtgtttttcaccctagtgaaacaccgaggctatgtagcagcatg

SEQ ID NO: 62911 - DNA, 2359 bp, Zea Mays
gtttctccttgtcctccgtgtgggcccgctgttctgtattcttcttcttcttcattccttccaccgctcacctcttctcctccccagtccccactcatcaaactccgcccccatgaatatgatcgggagaagctgctagcatcatctctcgcctccacttcgtcacctcctcgccattctattctatccttcccgccagctgcatatatccccgcgcccaattcggtccccggtgtgtgaggccagctgttttagctcagcgcgcggcgtggcagcaaaaaaaaaaaaaggagagcaaggagagcgccggcgccggcgaagcatgcggcggtgagagagagagagaggaggaggaagggaacggagagaacgagagccggaggacgatgcagctgccgcagcatcatcagaagccctccgcccactcctgctgctcgtcgtggatccggaggtccccgccgccgtcgccgccgccgcacaagagagcgggcggcgtcgggaggagccggtatgcctgccgcctcgtgcccctgctggtgctcaccgtgtacagcgtcgtcaccgtgcttcgcatccccagctcctccctcgtcgtgtccaccgccgattcagagcgcgtggaaaggcgggaggacctggaggcgctcaagacccacctgccgtcgaaccagaacggcctggaggcccgcgaggagacgcggtcggtcgcctccctcccctgctccgccttcatcagcggcaagagcatcaaggacttccaggcgctgctacaccagggctacagccggacgacgacgacggcgtcggcgtcgtcgtcgtcgcccacgccactactccctcttgcgccgccaacccggccgtgcccgcgctcggccaacaagccgaagatgctcatcttcatccgcaagcagaaccgggtgctgctgaacctgccgcaggtggtgacggcgtgccggcgggcggggttcgcgccgcacgtgatgaacctgcggcggcagaccccgctggccgcgatccacgcggcgctggcgtcggcggacgccatggtggcggtgcacggcgcggccgtcacccacttcctcttcatgcgcccgggctccgtgctcctgcagatcgtgcccgtgggcctcgactgggcggccgacgccttctacggcaagcccgcgcagcagctcggcctcgactacctcgagtacagggtggcgcccgaggagagctcgctggccgccgagtacgggctcaacagcaccgtggtgcggaccccctgggtcatcagcagccgcggctggtgggagatgaagaaggtctacatggaccgccagaacgtcaccgtcaacgtcaagcgcttcgccgacctgctcagggcggcgcgtgctcgcctcaggaacaccacggcgtgcgccgccaagcccgcagcgccgctcaggtagacgctagctgctgattgggcttgggttaggtgtcaattactttagtcacacttgccgatttctttgtgctttcgtcctctttttggccgggggataaaaaaggagacgaggtcctgtaaatatgattgggggtacggttggctgagagattggtgggggatctatccatcgcctcctttcgcggtgcattcgtttggttcttggtgttgctggagggagcagcagaaggtgaagaataataatttatggcagggacggctctcctgaaacactttgttcacagtagatcataggggtatcagctctttttatttcgttgccctttctttcttttttttcttttttttttggttttctcattctttgggtgtccagatgatgtataagggcatgtacagtggtgtttaatgtggaggctcttaaggtgtttaagggggttatttgcaaaaaaatcttagagccgtctctccgcgaagagacgcctctggctcgtaaaccaagtagcaacagacgcctcacttcccactgtacgaatttgttgtctgttctatcgatctgatgctatacaaatacatttaattctgtatttattaatagactacgtttgtagacactccattgtacaatacagtctcttagttgtctcctgtgcttagagaaccgttttggtgtctctccactgtacatgccctaagaaactacattctgtaacaaagatcaatagaaatccagactcttttacagatcctcttccagcatggcacgagccaaaagaggcggcacgaaattacaatgcagttcttgtgagaccttttggagttctgatgagatagatgcaaaagaggaagttgggaggtccacatggagaagatgttttgtcggtttgtgtttttcaccctagtgaaacaccgaggctatgtagcagcatg

SEQ ID NO: 62912 - DNA, 5614 bp, Zea Mays
aaaaagtgggcggagcggggagaagagcaacgcgcgctttgcttgtcgtccttccgcagcctccccagtccccaccggccaccggcatcaaggcatcaccaccaatctttcggaagttcccacgctgctctgagtgctctctcgtctcccctccccaaacccccaccccgacgcccagatctaccctccccatttacagcttcctctccggccccgcgccctagggcacggcgtcgcctgaacctgtcggcgccggcgcgatgcgagtaccatgctgctcgttatgcaacgtcagatatgacgaggaggagcggacgccgctgctcctccactgcggacatggattctgccgcgcgtgcctctcccgcatgctagcggcagcccccggagccacgctgccgtgcccgcgatgccgccatctgaccgccgtaggcaactcggtctctgcgctgcggaagaacttccccattctctctctcctctccacatccccctcatccccgtctttcctccactccgactcggggtcatcctctgacggctccgaagacgaggacgacttcttcgcgcgccccagtcgccgccccgcgcccgcgcccgctgccgcaccgcccggatgcagcttcttcgacctcgcctcgcacccggacctcaagctcgcccgtcgcatcgggagcggcccgcccgggcccgccgggcaggaggtgtgggccggcacgctgtctcgtggcggtggggtcaagcggtgcaagcaccaggtggcagtgaagagggtgcccctggccgcaggggacgggctcgaggttgttcaagaggaggtggagcggctgaggcgcgcctccacatggtgtcggaacgtgtgcacattccatggtgctgtgagggtgggcggccacctctgtttcgtgatggatcgctatgtggggtctgtgcaggcggagatgcggcagaatggtggacgccttacgctggagcagattctcaggtatggagcagatattgctcgtggaatagcagaactccatgcagcgggtattgtttgtatgagcataaagccgtcaaacattcttttggatgcacatggacatgcattcgtttcggattacggtctttcagcaattctgaagaaccttactagtaggagagtacctgatgactccagtgctggcattgatgctacactgcttagccccaattatacagctcctgaggcatggggaccactgaagaagtcactgaatatgttttgggatagtgcaaacggtatatcaccagagtcagatgcatggagttttggttgcacgcttgtggaaatgtgtactggtgctgttccatgggctggactgagtgcagaggaaatatgtaagtctgttgtaaaagaaaagaagccaccgcctcaatattcaagagtagtaggtgtaggacttcctggggagctgtggaagatgattggtgaatgcttgcaattccgagcttcaagaagaccatccttccaggacatgctgaaaacttttcttcggcatcttctggacataccacggagcccacctgctagtcccgaaattgattttgcaaatgaaaacttgcccaatggcatgcaacctccaacaacctccatcttagagatggttcatgataatccaaatgccttgcatcatcttgtatgcgaaggagatgctgctggtgttagggatctacttgcaaaagctgcatcagagagaaacgatagtttaatccgttctctcttagaagcacaaaatacagatgggctcactgccctacatttagcatgccgccgaggctcggcagagcttgtggaagctattgttgcttaccaagagaatgtagatatattagataaggatgaagaccctcctatagtatttgctttggctgctggctctccacgatgtgttcgtgcacttgtaggcaggtctgctagtataaattctaggcttagagaaggcctgggtcctactcttgcccatgtctgtgctcatcatggtcagccggagtgcatgcaggagctgctgatggctggagctgatcctaacgcagtagacggggaaggtgaatctgtgctgcatattgccgtggccaggagatataccgattgtgctattgttatactggaaaatggaggctgcagatcgatgggcatatcaaattctcaacataaaacgccattgcatttatgtattgagacatggaacacagctgtggtaagaagatgggttgaagttgcatctttagaggatatagcagaaacgattgatgtacccagccctgttggtacagctttatgcatggcagcagctcttaaaaaggagcatgagaaagagggtcgagagttagtaagaatattgcttgctgctggtgctgattctacggcacaagatgatccacactgtagaactgcattacatactgcagcaatgatcgatgatgtggagctggttaagattatactggaagcaggagttgatgttaatataagaaatgctcaaaatacaaccccactgcatgttgcacttaatagaggtgcaaactcatgtgttggcttgcttttagcagctggtgcaaactgcaacatacaggatgatgatggtgacaatgcttttcacatagctgctgatgcagcaaaaatgatacgtgaaaacctggcttggattgctcaaatgctactacagccgtcacctgctgttgatgtgagaaaccaccgaggttggacactacgagactttcttgagaggcttccacgagaatggatttatgaagaattgatggaaacacttgaagataaaggagtccatctctcaccaaccatatatgaggttgcagattgggtgaaatttagaagaactgttacttcacctgcttttggctggcaaggtgcaggacctagaagcattggttttgtccagtctgttgttgacaatgaccaccttgctgtgtcattttgtactggagaagcccatgttttgacaagtgaagttatcaaagttattccattaaataggggccaacatgtgcaactcaagcctggtgtttcggaacctagtatttatctggatgctgagataattgaattagtaggtatactgaactggagatctaccatgtgtcttttatttggatggcgcggtcaatcacgggatagcattgggacagttctctgtgttgatgacgatggaatcttgagggttggtttcccaggagcttctaggggatggagagctgatcctgctgaaattgaaagggttgaagaatataaggttggtaactgggttcggattcgtccctcactgacggttgctgtacatggcatggagtcgattactcctggaagtgttgggattgtatactccatcagaccagatagcagtcttctattgggcctttgctatttgtccaatccatggctgtgtgaaccagaggaggttgaacacgtcgacccattcaagattggggaccaagtatgtgtaaagaggtctgttgcagagcccagatatgcatggggtggtgagactcatcacagtgttgggaaaataattgacatcgagagtgatggtctgctcatcattgatattcctaatcgggctgcgccatggcaagcagatccatcggacatggaaaagattgagaactttaaggttggcgattggattagagtcaaagcaacagttccttcacccaaatatggttgggaggatgtgactcgtaatagtattgggattgttcatagtctacaagatgatggggatgttggtgttgctttctgcttcagaagcaggctttttctttgctcggttgcagatgtcgagaaggcacagccatttgaagtaggggagaaggttcatgtgtcaccttccatatctgagccacgcctcgggtggttaagtgaaactgcagctactattggagccatatcaaggattgacatggatgggactttaaatatcaaggtttctggccgaaaaggcttgtggaaggttgctcctggtgacgctgagaggctttcagcatttgaagttggagattgggtccgcctgaaaccaagtattgggagcaggcctacctatgactggaatagtgttgggagaataagcattgcagtagtccatagcattcaggactctggttacttggagttagcaggttgtttcaggaatgggaaatggttaacccataatacagacattgagaaagtgcagaccttaaaaattggtcagcatgttcgattccgtgctggaatttcagagcctagatggggatggagagatgcgaaccctgattctagaggcgtcatcgctggtgtacatgctgatggagaggtaagggttgccttctttggtgtgcctggattgtggagaggcgaccctgcagatcttgaaattgagaatatctttgaggttggagagtgggttaggctgacgaacgatgtggaacaatggagatcgctcaaacctggtagcattggtgtggtgcatggggtgggatatcaaggtgatgcttgggatggaaccattcatgttgctttttgtggtgagcaggaaaggtggattgggccttctagccagcttgaaggagttagcaagtttgttgttgggcagcgtgttcgaatcagaggctgtatccgccagccaagatttggttggtccaaccataatcattcaagtatagggacaatctcatctattgacgcagatgggaagctgaggattcatacaccagctggtgccagggcttggttgatagacccagcagaggtggaagaagtggaggaggaggaagtctgtgttggggattgggtaaaggttaaggactccgttggaaccccagtttatcaatggggtgatgtgaaccacagcagcataggggtggtccaccgggctgatgatggagagctctggattgctttctgcttctgcgagaggctatggttatgcaaagcatgggaggtggaaaaagtgaggcccttcagacaaggtgacaaagtaaggatacgacctggtcttgtatcccccagatggggttgggggatggagacctacgcgagcaaaggcgaggttgtaggtgtggatgcaaatggaaagctgaggataaagtttcggtggagggatagactttggattggggaccctgctgatattgttcttgatgatgtccacttattgacggaggcttctaatggcttggctttttgttcataggcttgtggtattctttcgataccatatctgatatattgcacccatccattttgcagcatttcaaatttagcaaaatcttaacctgcagtggacttgcaagttgcacataactatcatcgcatcggcatgccagggtgtatttcatgttgataaccggggaatgagaagacaacgatagtgtagagctggtgcaccactggcgtcaaaccccgggcttgtcgtgccctcagggcgggtcagtattcgatcacgccccagaccagctttattgaatctactattctttcaatatattttcgtccaaaagacaataaacataaattgagacatggattaagcctcgcactgcagactgcccccaccaacgtcacgggcgttctcctgtagtgcgtgcaacaaac

SEQ ID NO: 62913 - DNA, 5670 bp, Zea Mays
ctcgttgcaatttgcaagcgcacgaaccaggaaaaaagtgggcggagcggggagaagagcaacgcgcgctttgcttgtcgtccttccgcagcctccccagtccccaccggccaccggcatcaaggcatcaccaccaatctttcggaagttcccacgctgctctgagtgctctctcgtctcccctccccaaacccccaccccgacgcccagatctaccctccccatttacagcttcctctccggccccgcgccctagggcacggcgtcgcctgaacctgtcggcgccggcgcgatgcgagtaccatgctgctcgttatgcaacgtcagatatgacgaggaggagcggacgccgctgctcctccactgcggacatggattctgccgcgcgtgcctctcccgcatgctagcggcagcccccggagccacgctgccgtgcccgcgatgccgccatctgaccgccgtaggcaactcggtctctgcgctgcggaagaacttccccattctctctctcctctccacatccccctcatccccgtctttcctccactccgactcggggtcatcctctgacggctccgaagacgaggacgacttcttcgcgcgccccagtcgccgccccgcgcccgcgcccgctgccgcaccgcccggatgcagcttcttcgacctcgcctcgcacccggacctcaagctcgcccgtcgcatcgggagcggcccgcccgggcccgccgggcaggaggtgtgggccggcacgctgtctcgtggcggtggggtcaagcggtgcaagcaccaggtggcagtgaagagggtgcccctggccgcaggggacgggctcgaggttgttcaagaggaggtggagcggctgaggcgcgcctccacatggtgtcggaacgtgtgcacattccatggtgctgtgagggtgggcggccacctctgtttcgtgatggatcgctatgtggggtctgtgcaggcggagatgcggcagaatggtggacgccttacgctggagcagattctcaggtatggagcagatattgctcgtggaatagcagaactccatgcagcgggtattgtttgtatgagcataaagccgtcaaacattcttttggatgcacatggacatgcattcgtttcggattacggtctttcagcaattctgaagaaccttactagtaggagagtacctgatgactccagtgctggcattgatgctacactgcttagccccaattatacagctcctgaggcatggggaccactgaagaagtcactgaatatgttttgggatagtgcaaacggtatatcaccagagtcagatgcatggagttttggttgcacgcttgtggaaatgtgtactggtgctgttccatgggctggactgagtgcagaggaaatatgtaagtctgttgtaaaagaaaagaagccaccgcctcaatattcaagagtagtaggtgtaggacttcctggggagctgtggaagatgattggtgaatgcttgcaattccgagcttcaagaagaccatccttccaggacatgctgaaaacttttcttcggcatcttctggacataccacggagcccacctgctagtcccgaaattgattttgcaaatgaaaacttgcccaatggcatgcaacctccaacaacctccatcttagagatggttcatgataatccaaatgccttgcatcatcttgtatgcgaaggagatgctgctggtgttagggatctacttgcaaaagctgcatcagagagaaacgatagtttaatccgttctctcttagaagcacaaaatacagatgggctcactgccctacatttagcatgccgccgaggctcggcagagcttgtggaagctattgttgcttaccaagagaatgtagatatattagataaggatgaagaccctcctatagtatttgctttggctgctggctctccacgatgtgttcgtgcacttgtaggcaggtctgctagtataaattctaggcttagagaaggcctgggtcctactcttgcccatgtctgtgctcatcatggtcagccggagtgcatgcaggagctgctgatggctggagctgatcctaacgcagtagacggggaaggtgaatctgtgctgcatattgccgtggccaggagatataccgattgtgctattgttatactggaaaatggaggctgcagatcgatgggcatatcaaattctcaacataaaacgccattgcatttatgtattgagacatggaacacagctgtggtaagaagatgggttgaagttgcatctttagaggatatagcagaaacgattgatgtacccagccctgttggtacagctttatgcatggcagcagctcttaaaaaggagcatgagaaagagttccataaggtccaggattactggacaatcatgttcttccatctattccagaccctgttcgttctaatagtaaaattacttctacttgcagagggtcgagagttagtaagaatattgcttgctgctggtgctgattctacggcacaagatgatccacactgtagaactgcattacatactgcagcaatgatcgatgatgtggagctggttaagattatactggaagcaggagttgatgttaatataagaaatgctcaaaatacaaccccactgcatgttgcacttaatagaggtgcaaactcatgtgttggcttgcttttagcagctggtgcaaactgcaacatacaggatgatgatggtgacaatgcttttcacatagctgctgatgcagcaaaaatgatacgtgaaaacctggcttggattgctcaaatgctactacagccgtcacctgctgttgatgtgagaaaccaccgaggttggacactacgagactttcttgagaggcttccacgagaatggatttatgaagaattgatggaaacacttgaagataaaggagtccatctctcaccaaccatatatgaggttgcagattgggtgaaatttagaagaactgttacttcacctgcttttggctggcaaggtgcaggacctagaagcattggttttgtccagtctgttgttgacaatgaccaccttgctgtgtcattttgtactggagaagcccatgttttgacaagtgaagttatcaaagttattccattaaataggggccaacatgtgcaactcaagcctggtgtttcggaacctagatttggatggcgcggtcaatcacgggatagcattgggacagttctctgtgttgatgacgatggaatcttgagggttggtttcccaggagcttctaggggatggagagctgatcctgctgaaattgaaagggttgaagaatataaggttggtaactgggttcggattcgtccctcactgacggttgctgtacatggcatggagtcgattactcctggaagtgttgggattgtatactccatcagaccagatagcagtcttctattgggcctttgctatttgtccaatccatggctgtgtgaaccagaggaggttgaacacgtcgacccattcaagattggggaccaagtatgtgtaaagaggtctgttgcagagcccagatatgcatggggtggtgagactcatcacagtgttgggaaaataattgacatcgagagtgatggtctgctcatcattgatattcctaatcgggctgcgccatggcaagcagatccatcggacatggaaaagattgagaactttaaggttggcgattggattagagtcaaagcaacagttccttcacccaaatatggttgggaggatgtgactcgtaatagtattgggattgttcatagtctacaagatgatggggatgttggtgttgctttctgcttcagaagcaggctttttctttgctcggttgcagatgtcgagaaggcacagccatttgaagtaggggagaaggttcatgtgtcaccttccatatctgagccacgcctcgggtggttaagtgaaactgcagctactattggagccatatcaaggattgacatggatgggactttaaatatcaaggtttctggccgaaaaggcttgtggaaggttgctcctggtgacgctgagaggctttcagcatttgaagttggagattgggtccgcctgaaaccaagtattgggagcaggcctacctatgactggaatagtgttgggagaataagcattgcagtagtccatagcattcaggactctggttacttggagttagcaggttgtttcaggaatgggaaatggttaacccataatacagacattgagaaagtgcagaccttaaaaattggtcagcatgttcgattccgtgctggaatttcagagcctagatggggatggagagatgcgaaccctgattctagaggcgtcatcgctggtgtacatgctgatggagaggtaagggttgccttctttggtgtgcctggattgtggagaggcgaccctgcagatcttgaaattgagaatatctttgaggttggagagtgggttaggctgacgaacgatgtggaacaatggagatcgctcaaacctggtagcattggtgtggtgcatggggtgggatatcaaggtgatgcttgggatggaaccattcatgttgctttttgtggtgagcaggaaaggtggattgggccttctagccagcttgaaggagttagcaagtttgttgttgggcagcgtgttcgaatcagaggctgtatccgccagccaagatttggttggtccaaccataatcattcaagtatagggacaatctcatctattgacgcagatgggaagctgaggattcatacaccagctggtgccagggcttggttgatagacccagcagaggtggaagaagtggaggaggaggaagtctgtgttggggattgggtaaaggttaaggactccgttggaaccccagtttatcaatggggtgatgtgaaccacagcagcataggggtggtccaccgggctgatgatggagagctctggattgctttctgcttctgcgagaggctatggttatgcaaagcatgggaggtggaaaaagtgaggcccttcagacaaggtgacaaagtaaggatacgacctggtcttgtatcccccagatggggttgggggatggagacctacgcgagcaaaggcgaggttgtaggtgtggatgcaaatggaaagctgaggataaagtttcggtggagggatagactttggattggggaccctgctgatattgttcttgatgatgtccacttattgacggaggcttctaatggcttggctttttgttcataggcttgtggtattctttcgataccatatctgatatattgcacccatccattttgcagcatttcaaatttagcaaaatcttaacctgcagtggacttgcaagttgcacataactatcatcgcatcggcatgccagggtgtatttcatgttgataaccggggaatgagaagacaacgatagtgtagagctggtgcaccactggcgtcaaaccccgggcttgtcgtgccctcagggcgggtcagtattcgatcacgccccagaccagctttattgaatctactattctttcaatatattttcgtccaaaagacaataaacataaattgagacatggattaagcctcgcactgcagactgcccccaccaacgtcacgggcgttctcctgtagtgcgtgcaacaaac

SEQ ID NO: 62914 - DNA, 5384 bp, Zea Mays
atgcgagtaccatgctgctcgttatgcaacgtcagatatgacgaggaggagcggacgccgctgctcctccactgcggacatggattctgccgcgcgtgcctctcccgcatgctagcggcagcccccggagccacgctgccgtgcccgcgatgccgccatctgaccgccgtaggcaactcggtctctgcgctgcggaagaacttccccattctctctctcctctccacatccccctcatccccgtctttcctccactccgactcggggtcatcctctgacggctccgaagacgaggacgacttcttcgcgcgccccagtcgccgccccgcgcccgcgcccgctgccgcaccgcccggatgcagcttcttcgacctcgcctcgcacccggacctcaagctcgcccgtcgcatcgggagcggcccgcccgggcccgccgggcaggaggtgtgggccggcacgctgtctcgtggcggtggggtcaagcggtgcaagcaccaggtggcagtgaagagggtgcccctggccgcaggggacgggctcgaggttgttcaagaggaggtggagcggctgaggcgcgcctccacatggtgtcggaacgtgtgcacattccatggtgctgtgagggtgggcggccacctctgtttcgtgatggatcgctatgtggggtctgtgcaggcggagatgcggcagaatggtggacgccttacgctggagcagattctcaggtatggagcagatattgctcgtggaatagcagaactccatgcagcgggtattgtttgtatgagcataaagccgtcaaacattcttttggatgcacatggacatgcattcgtttcggattacggtctttcagcaattctgaagaaccttactagtaggagagtacctgatgactccagtgctggcattgatgctacactgcttagccccaattatacagctcctgaggcatggggaccactgaagaagtcactgaatatgttttgggatagtgcaaacggtatatcaccagagtcagatgcatggagttttggttgcacgcttgtggaaatgtgtactggtgctgttccatgggctggactgagtgcagaggaaatatgtaagtctgttgtaaaagaaaagaagccaccgcctcaatattcaagagtagtaggtgtaggacttcctggggagctgtggaagatgattggtgaatgcttgcaattccgagcttcaagaagaccatccttccaggacatgctgaaaacttttcttcggcatcttctggacataccacggagcccacctgctagtcccgaaattgattttgcaaatgaaaacttgcccaatggcatgcaacctccaacaacctccatcttagagatggttcatgataatccaaatgccttgcatcatcttgtatgcgaaggagatgctgctggtgttaggtttgtctctggcaactcttgtatggttgcatgtatatcatataatatttcgcactaaaccttttgcaaataccagggatctacttgcaaaagctgcatcagagagaaacgatagtttaatccgttctctcttagaagcacaaaatacagatgggctcactgccctacatttagcatgccgccgaggctcggcagagcttgtggaagctattgttgcttaccaagagaatgtagatatattagataaggatgaagaccctcctatagtatttgctttggctgctggctctccacgatgtgttcgtgcacttgtaggcaggtctgctagtataaattctaggcttagagaaggcctgggtcctactcttgcccatgtctgtgctcatcatggtcagccggagtgcatgcaggtatgtcatcatgtccacctcatatcgtttaagcttgctggttcctattttttagattctgtatgtgttatgcaggagctgctgatggctggagctgatcctaacgcagtagacggggaaggtgaatctgtgctgcatattgccgtggccaggagatataccgattgtgctattgttatactggaaaatggaggctgcagatcgatgggcatatcaaattctcaacataaaacgccattgcatttatgtattgagacatggaacacagctgtggtaagaagatgggttgaagttgcatctttagaggatatagcagaaacgattgatgtacccagccctgttggtacagctttatgcatggcagcagctcttaaaaaggagcatgagaaagagggtcgagagttagtaagaatattgcttgctgctggtgctgattctacggcacaagatgatccacactgtagaactgcattacatactgcagcaatgatcgatgatgtggagctggttaagattatactggaagcaggagttgatgttaatataagaaatgctcaaaatacaaccccactgcatgttgcacttaatagaggatgatgatggtgacaatgcttttcacatagctgctgatgcagcaaaaatgatacgtgaaaacctggcttggattgctcaaatgctactacagccgtcacctgctgttgatgtgagaaaccaccgaggttggacactacgagactttcttgagaggcttccacgagaatggatttatgaagaattgatggaaacacttgaagataaaggagtccatctctcaccaaccatatatgaggttgcagattgggtgaaatttagaagaactgttacttcacctgcttttggctggcaaggtgcaggacctagaagcattggttttgtccagtctgttgttgacaatgaccaccttgctgtgtcattttgtactggagaagcccatgttttgacaagtgaagttatcaaagttattccattaaataggggccaacatgtgcaactcaagcctggtgtttcggaacctagtatttatctggatgctgagataattgaattagtaggtatactgaactggagatctaccatgtgtcttttatttggatggcgcggtcaatcacgggatagcattgggacagttctctgtgttgatgacgatggaatcttgagggttggtttcccaggagcttctaggggatggagagctgatcctgctgaaattgaaagggttgaagaatataaggttggtaactgggttcggattcgtccctcactgacggttgctgtacatggcatggagtcgattactcctggaagtgttgggattgtatactccatcagaccagatagcagtcttctattgggcctttgctatttgtccaatccatggctgtgtgaaccagaggaggttgaacacgtcgacccattcaagattggggaccaagtatgtgtaaagaggtctgttgcagagcccagatatgcatggggtggtgagactcatcacagtgttgggaaaataattgacatcgagagtgatggtctgctcatcattgatattcctaatcgggctgcgccatggcaagcagatccatcggacatggaaaagattgagaactttaaggttggcgattggattagagtcaaagcaacagttccttcacccaaatatggttgggaggatgtgactcgtaatagtattgggattgttcatagtctacaagatgatggggatgttggtgttgctttctgcttcagaagcaggctttttctttgctcggttgcagatgtcgagaaggcacagccatttgaagtaggggagaaggttcatgtgtcaccttccatatctgagccacgcctcgggtggttaagtgaaactgcagctactattggagccatatcaaggattgacatggatgggactttaaatatcaaggtttctggccgaaaaggcttgtggaaggttgctcctggtgacgctgagaggctttcagcatttgaagttggagattgggtccgcctgaaaccaagtattgggagcaggcctacctatgactggaatagtgttgggagaataagcattgcagtagtccatagcattcaggactctggttacttggagttagcaggttgtttcaggaatgggaaatggttaacccataatacagacattgagaaagtgcagaccttaaaaattggtcagcatgttcgattccgtgctggaatttcagagcctagatggggatggagagatgcgaaccctgattctagaggcgtcatcgctggtgtacatgctgatggagaggtaagggttgccttctttggtgtgcctggattgtggagaggcgaccctgcagatcttgaaattgagaatatctttgaggttggagagtgggttaggctgacgaacgatgtggaacaatggagatcgctcaaacctggtagcattggtgtggtgcatggggtgggatatcaaggtgatgcttgggatggaaccattcatgttgctttttgtggtgagcaggaaaggtggattgggccttctagccagcttgaaggagttagcaagtttgttgttgggcagcgtgttcgaatcagaggctgtatccgccagccaagatttggttggtccaaccataatcattcaagtatagggacaatctcatctattgacgcagatgggaagctgaggattcatacaccagctggtgccagggcttggttgatagacccagcagaggtggaagaagtggaggaggaggaagtctgtgttggggattgggtaaaggttaaggactccgttggaaccccagtttatcaatggggtgatgtgaaccacagcagcataggggtggtccaccgggctgatgatggagagctctggattgctttctgcttctgcgagaggctatggttatgcaaagcatgggaggtggaaaaagtgaggcccttcagacaaggtgacaaagtaaggatacgacctggtcttgtatcccccagatggggttgggggatggagacctacgcgagcaaaggcgaggttgtaggtgtggatgcaaatggaaagctgaggataaagtttcggtggagggatagactttggattggggaccctgctgatattgttcttgatgatgtccacttattgacggaggcttctaatggcttggctttttgttcataggcttgtggtattctttcgataccatatctgatatattgcacccatccattttgcagcatttcaaatttagcaaaatcttaacctgcagtggacttgcaagttgcacataactatcatcgcatcggcatgccagggtgtatttcatgttgataaccggggaatgagaagacaacgatagtgtagagctggtaaccatcacctagttttttcttctttggtttacatgtataattatgcctcctgacacctttttgggtttcagtgtatcatataccagtgtacaggttcggacctgaacattaatttaattgatagtggtcttgtatgtttacttga

SEQ ID NO: 62915 - DNA, 5413 bp, Zea Mays
ctttgcttgtcgtccttccgcagcctccccagtccccaccggccaccggcatcaaggcatcaccaccaatctttcggaagttcccacgctgctctgagtgctctctcgtctcccctccccaaacccccaccccgacgcccagatctaccctccccatttacagcttcctctccggccccgcgccctagggcacggcgtcgcctgaacctgtcggcgccggcgcgatgcgagtaccatgctgctcgttatgcaacgtcagatatgacgaggaggagcggacgccgctgctcctccactgcggacatggattctgccgcgcgtgcctctcccgcatgctagcggcagcccccggagccacgctgccgtgcccgcgatgccgccatctgaccgccgtaggcaactcggtctctgcgctgcggaagaacttccccattctctctctcctctccacatccccctcatccccgtctttcctccactccgactcggggtcatcctctgacggctccgaagacgaggacgacttcttcgcgcgccccagtcgccgccccgcgcccgcgcccgctgccgcaccgcccggatgcagcttcttcgacctcgcctcgcacccggacctcaagctcgcccgtcgcatcgggagcggcccgcccgggcccgccgggcaggaggtgtgggccggcacgctgtctcgtggcggtggggtcaagcggtgcaagcaccaggtggcagtgaagagggtgcccctggccgcaggggacgggctcgaggttgttcaagaggaggtggagcggctgaggcgcgcctccacatggtgtcggaacgtgtgcacattccatggtgctgtgagggtgggcggccacctctgtttcgtgatggatcgctatgtggggtctgtgcaggcggagatgcggcagaatggtggacgccttacgctggagcagattctcaggtatggagcagatattgctcgtggaatagcagaactccatgcagcgggtattgtttgtatgagcataaagccgtcaaacattcttttggatgcacatggacatgcattcgtttcggattacggtctttcagcaattctgaagaaccttactagtaggagagtacctgatgactccagtgctggcattgatgctacactgcttagccccaattatacagctcctgaggcatggggaccactgaagaagtcactgaatatgttttgggatagtgcaaacggtatatcaccagagtcagatgcatggagttttggttgcacgcttgtggaaatgtgtactggtgctgttccatgggctggactgagtgcagaggaaatatgtaagtctgttgtaaaagaaaagaagccaccgcctcaatattcaagagtagtaggtgtaggacttcctggggagctgtggaagatgattggtgaatgcttgcaattccgagcttcaagaagaccatccttccaggacatgctgaaaacttttcttcggcatcttctggacataccacggagcccacctgctagtcccgaaattgattttgcaaatgaaaacttgcccaatggcatgcaacctccaacaacctccatcttagagatggttcatgataatccaaatgccttgcatcatcttgtatgcgaaggagatgctgctggtgttagggatctacttgcaaaagctgcatcagagagaaacgatagtttaatccgttctctcttagaagcacaaaatacagatgggctcactgccctacatttagcatgccgccgaggctcggcagagcttgtggaagctattgttgcttaccaagagaatgtagatatattagataaggatgaagaccctcctatagtatttgctttggctgctggctctccacgatgtgttcgtgcacttgtaggcaggtctgctagtataaattctaggcttagagaaggcctgggtcctactcttgcccatgtctgtgctcatcatggtcagccggagtgcatgcaggagctgctgatggctggagctgatcctaacgcagtagacggggaaggtgaatctgtgctgcatattgccgtggccaggagatataccgattgtgctattgttatactggaaaatggaggctgcagatcgatgggcatatcaaattctcaacataaaacgccattgcatttatgtattgagacatggaacacagctgtggtaagaagatgggttgaagttgcatctttagaggatatagcagaaacgattgatgtacccagccctgttggtacagctttatgcatggcagcagctcttaaaaaggagcatgagaaagagggtcgagagttagtaagaatattgcttgctgctggtgctgattctacggcacaagatgatccacactgtagaactgcattacatactgcagcaatgatcgatgatgtggagctggttaagattatactggaagcaggagttgatgttaatataagaaatgctcaaaatacaaccccactgcatgttgcacttaatagaggtgcaaactcatgtgttggcttgcttttagcagctggtgcaaactgcaacatacagctgctgatgcagcaaaaatgatacgtgaaaacctggcttggattgctcaaatgctactacagccgtcacctgctgttgatgtgagaaaccaccgaggttggacactacgagactttcttgagaggcttccacgagaatggatttatgaagaattgatggaaacacttgaagataaaggagtccatctctcaccaaccatatatgaggttgcagattgggtgaaatttagaagaactgttacttcacctgcttttggctggcaaggtgcaggacctagaagcattggttttgtccagtctgttgttgacaatgaccaccttgctgtgtcattttgtactggagaagcccatgttttgacaagtgaagttatcaaagttattccattaaataggggccaacatgtgcaactcaagcctggtgtttcggaacctagatttggatggcgcggtcaatcacgggatagcattgggacagttctctgtgttgatgacgatggaatcttgagggttggtttcccaggagcttctaggggatggagagctgatcctgctgaaattgaaagggttgaagaatataaggttggtaactgggttcggattcgtccctcactgacggttgctgtacatggcatggagtcgattactcctggaagtgttgggattgtatactccatcagaccagatagcagtcttctattgggcctttgctatttgtccaatccatggctgtgtgaaccagaggaggttgaacacgtcgacccattcaagattggggaccaagtatgtgtaaagaggtctgttgcagagcccagatatgcatggggtggtgagactcatcacagtgttgggaaaataattgacatcgagagtgatggtctgctcatcattgatattcctaatcgggctgcgccatggcaagcagatccatcggacatggaaaagattgagaactttaaggttggcgattggattagagtcaaagcaacagttccttcacccaaatatggttgggaggatgtgactcgtaatagtattgggattgttcatagtctacaagatgatggggatgttggtgttgctttctgcttcagaagcaggctttttctttgctcggttgcagatgtcgagaaggcacagccatttgaagtaggggagaaggttcatgtgtcaccttccatatctgagccacgcctcgggtggttaagtgaaactgcagctactattggagccatatcaaggattgacatggatgggactttaaatatcaaggtttctggccgaaaaggcttgtggaaggttgctcctggtgacgctgagaggctttcagcatttgaagttggagattgggtccgcctgaaaccaagtattgggagcaggcctacctatgactggaatagtgttgggagaataagcattgcagtagtccatagcattcaggactctggttacttggagttagcaggttgtttcaggaatgggaaatggttaacccataatacagacattgagaaagtgcagaccttaaaaattggtcagcatgttcgattccgtgctggaatttcagagcctagatggggatggagagatgcgaaccctgattctagaggcgtcatcgctggtgtacatgctgatggagaggtaagggttgccttctttggtgtgcctggattgtggagaggcgaccctgcagatcttgaaattgagaatatctttgaggttggagagtgggttaggctgacgaacgatgtggaacaatggagatcgctcaaacctggtagcattggtgtggtgcatggggtgggatatcaaggtgatgcttgggatggaaccattcatgttgctttttgtggtgagcaggaaaggtggattgggccttctagccagcttgaaggagttagcaagtttgttgttgggcagcgtgttcgaatcagaggctgtatccgccagccaagatttggttggtccaaccataatcattcaagtatagggacaatctcatctattgacgcagatgggaagctgaggattcatacaccagctggtgccagggcttggttgatagacccagcagaggtggaagaagtggaggaggaggaagtctgtgttggggattgggtaaaggttaaggactccgttggaaccccagtttatcaatggggtgatgtgaaccacagcagcataggggtggtccaccgggctgatgatggagagctctggattgctttctgcttctgcgagaggctatggttatgcaaagcatgggaggtggaaaaagtgaggcccttcagacaaggtgacaaagtaaggatacgacctggtcttgtatcccccagatggggttgggggatggagacctacgcgagcaaaggcgaggttgtaggtgtggatgcaaatggaaagctgaggataaagtttcggtggagggatagactttggattggggaccctgctgatattgttcttgatgatgtccacttattgacggaggcttctaatggcttggctttttgttcataggcttgtggtattctttcgataccatatctgatatattgcacccatccattttgcagcatttcaaatttagcaaaatcttaacctgcagtggacttgcaagttgcacataactatcatcgcatcggcatgccagggtgtatttcatgttgataaccggggaatgagaagacaacgatagtgtagagctggtaaccatcacctagttttttcttctttggtttacatgtataattatgcctcctgacacctttttgggtttcagtgtatcatataccagtgtacaggttcggacctgaacattaatttaattgatagtggtcttgtatgtttacttga

SEQ ID NO: 62916 - DNA, 5444 bp, Zea Mays
ctttgcttgtcgtccttccgcagcctccccagtccccaccggccaccggcatcaaggcatcaccaccaatctttcggaagttcccacgctgctctgagtgctctctcgtctcccctccccaaacccccaccccgacgcccagatctaccctccccatttacagcttcctctccggccccgcgccctagggcacggcgtcgcctgaacctgtcggcgccggcgcgatgcgagtaccatgctgctcgttatgcaacgtcagatatgacgaggaggagcggacgccgctgctcctccactgcggacatggattctgccgcgcgtgcctctcccgcatgctagcggcagcccccggagccacgctgccgtgcccgcgatgccgccatctgaccgccgtaggcaactcggtctctgcgctgcggaagaacttccccattctctctctcctctccacatccccctcatccccgtctttcctccactccgactcggggtcatcctctgacggctccgaagacgaggacgacttcttcgcgcgccccagtcgccgccccgcgcccgcgcccgctgccgcaccgcccggatgcagcttcttcgacctcgcctcgcacccggacctcaagctcgcccgtcgcatcgggagcggcccgcccgggcccgccgggcaggaggtgtgggccggcacgctgtctcgtggcggtggggtcaagcggtgcaagcaccaggtggcagtgaagagggtgcccctggccgcaggggacgggctcgaggttgttcaagaggaggtggagcggctgaggcgcgcctccacatggtgtcggaacgtgtgcacattccatggtgctgtgagggtgggcggccacctctgtttcgtgatggatcgctatgtggggtctgtgcaggcggagatgcggcagaatggtggacgccttacgctggagcagattctcaggtatggagcagatattgctcgtggaatagcagaactccatgcagcgggtattgtttgtatgagcataaagccgtcaaacattcttttggatgcacatggacatgcattcgtttcggattacggtctttcagcaattctgaagaaccttactagtaggagagtacctgatgactccagtgctggcattgatgctacactgcttagccccaattatacagctcctgaggcatggggaccactgaagaagtcactgaatatgttttgggatagtgcaaacggtatatcaccagagtcagatgcatggagttttggttgcacgcttgtggaaatgtgtactggtgctgttccatgggctggactgagtgcagaggaaatatgtaagtctgttgtaaaagaaaagaagccaccgcctcaatattcaagagtagtaggtgtaggacttcctggggagctgtggaagatgattggtgaatgcttgcaattccgagcttcaagaagaccatccttccaggacatgctgaaaacttttcttcggcatcttctggacataccacggagcccacctgctagtcccgaaattgattttgcaaatgaaaacttgcccaatggcatgcaacctccaacaacctccatcttagagatggttcatgataatccaaatgccttgcatcatcttgtatgcgaaggagatgctgctggtgttagggatctacttgcaaaagctgcatcagagagaaacgatagtttaatccgttctctcttagaagcacaaaatacagatgggctcactgccctacatttagcatgccgccgaggctcggcagagcttgtggaagctattgttgcttaccaagagaatgtagatatattagataaggatgaagaccctcctatagtatttgctttggctgctggctctccacgatgtgttcgtgcacttgtaggcaggtctgctagtataaattctaggcttagagaaggcctgggtcctactcttgcccatgtctgtgctcatcatggtcagccggagtgcatgcaggagctgctgatggctggagctgatcctaacgcagtagacggggaaggtgaatctgtgctgcatattgccgtggccaggagatataccgattgtgctattgttatactggaaaatggaggctgcagatcgatgggcatatcaaattctcaacataaaacgccattgcatttatgtattgagacatggaacacagctgtggtaagaagatgggttgaagttgcatctttagaggatatagcagaaacgattgatgtacccagccctgttggtacagctttatgcatggcagcagctcttaaaaaggagcatgagaaagagggtcgagagttagtaagaatattgcttgctgctggtgctgattctacggcacaagatgatccacactgtagaactgcattacatactgcagcaatgatcgatgatgtggagctggttaagattatactggaagcaggagttgatgttaatataagaaatgctcaaaatacaaccccactgcatgttgcacttaatagaggtgcaaactcatgtgttggcttgcttttagcagctggtgcaaactgcaacatacaggatgatgatggtgacaatgcttttcacatagctgctgatgcagcaaaaatgatacgtgaaaacctggcttggattgctcaaatgctactacagccgtcacctgctgttgatgtgagaaaccaccgaggttggacactacgagactttcttgagaggcttccacgagaatggatttatgaagaattgatggaaacacttgaagataaaggagtccatctctcaccaaccatatatgaggttgcagattgggtgaaatttagaagaactgttacttcacctgcttttggctggcaaggtgcaggacctagaagcattggttttgtccagtctgttgttgacaatgaccaccttgctgtgtcattttgtactggagaagcccatgttttgacaagtgaagttatcaaagttattccattaaataggggccaacatgtgcaactcaagcctggtgtttcggaacctagatttggatggcgcggtcaatcacgggatagcattgggacagttctctgtgttgatgacgatggaatcttgagggttggtttcccaggagcttctaggggatggagagctgatcctgctgaaattgaaagggttgaagaatataaggttggtaactgggttcggattcgtccctcactgacggttgctgtacatggcatggagtcgattactcctggaagtgttgggattgtatactccatcagaccagatagcagtcttctattgggcctttgctatttgtccaatccatggctgtgtgaaccagaggaggttgaacacgtcgacccattcaagattggggaccaagtatgtgtaaagaggtctgttgcagagcccagatatgcatggggtggtgagactcatcacagtgttgggaaaataattgacatcgagagtgatggtctgctcatcattgatattcctaatcgggctgcgccatggcaagcagatccatcggacatggaaaagattgagaactttaaggttggcgattggattagagtcaaagcaacagttccttcacccaaatatggttgggaggatgtgactcgtaatagtattgggattgttcatagtctacaagatgatggggatgttggtgttgctttctgcttcagaagcaggctttttctttgctcggttgcagatgtcgagaaggcacagccatttgaagtaggggagaaggttcatgtgtcaccttccatatctgagccacgcctcgggtggttaagtgaaactgcagctactattggagccatatcaaggattgacatggatgggactttaaatatcaaggtttctggccgaaaaggcttgtggaaggttgctcctggtgacgctgagaggctttcagcatttgaagttggagattgggtccgcctgaaaccaagtattgggagcaggcctacctatgactggaatagtgttgggagaataagcattgcagtagtccatagcattcaggactctggttacttggagttagcaggttgtttcaggaatgggaaatggttaacccataatacagacattgagaaagtgcagaccttaaaaattggtcagcatgttcgattccgtgctggaatttcagagcctagatggggatggagagatgcgaaccctgattctagaggcgtcatcgctggtgtacatgctgatggagaggtaagggttgccttctttggtgtgcctggattgtggagaggcgaccctgcagatcttgaaattgagaatatctttgaggttggagagtgggttaggctgacgaacgatgtggaacaatggagatcgctcaaacctggtagcattggtgtggtgcatggggtgggatatcaaggtgatgcttgggatggaaccattcatgttgctttttgtggtgagcaggaaaggtggattgggccttctagccagcttgaaggagttagcaagtttgttgttgggcagcgtgttcgaatcagaggctgtatccgccagccaagatttggttggtccaaccataatcattcaagtatagggacaatctcatctattgacgcagatgggaagctgaggattcatacaccagctggtgccagggcttggttgatagacccagcagaggtggaagaagtggaggaggaggaagtctgtgttggggattgggtaaaggttaaggactccgttggaaccccagtttatcaatggggtgatgtgaaccacagcagcataggggtggtccaccgggctgatgatggagagctctggattgctttctgcttctgcgagaggctatggttatgcaaagcatgggaggtggaaaaagtgaggcccttcagacaaggtgacaaagtaaggatacgacctggtcttgtatcccccagatggggttgggggatggagacctacgcgagcaaaggcgaggttgtaggtgtggatgcaaatggaaagctgaggataaagtttcggtggagggatagactttggattggggaccctgctgatattgttcttgatgatgtccacttattgacggaggcttctaatggcttggctttttgttcataggcttgtggtattctttcgataccatatctgatatattgcacccatccattttgcagcatttcaaatttagcaaaatcttaacctgcagtggacttgcaagttgcacataactatcatcgcatcggcatgccagggtgtatttcatgttgataaccggggaatgagaagacaacgatagtgtagagctggtaaccatcacctagttttttcttctttggtttacatgtataattatgcctcctgacacctttttgggtttcagtgtatcatataccagtgtacaggttcggacctgaacattaatttaattgatagtggtcttgtatgtttacttga

SEQ ID NO: 62917 - DNA, 1577 bp, Zea Mays
agcaaaaaaatgccccacactcccacggtcccacccggcgtggcggctggcgtacccgtccccactcgtcgcccatcttccgtgacgtcaccccattctccatcggttcccttcctcgcctcggttcgcgggtacccgagtcgcagacgcacctcaatcgcaaccttttggactcgaaggggggcaatagacagcagggaaagaactgagcgaggagattcccaaggatctcgtcggacgctagaggaagggacgggggacaggcgatggcgggggacgccggcagcggggtggactgggagagcctggcggaggccacctccggggcaatcggctcgctcgtcagcaccaccgtgctctacccgctcgacatctgcaagaccaagttccaggccgagcttcagacgcaccagggcgcgcagaaatatagatgtgttctgggaagcgatttataaaaggcaatttttgtccctatatcagggccttaacacgaagaacattcagtcttttgtttcctcgtttttttatttttatgggtatagctattttaaaagactctacctggagaagagtggagcaaagtctattggaacaacagccaatttgttagttgcagctgctgctggtgcttgcaatgcaatcgtgacacagccattagatacagcaacttctagaatgcagacgagtgcctttggaaagtctaaagggctgagggaaactcttgcagaaggtacttggatggaagcatttgatggcttaggcatttccattatattgacttgcaatccttctattcagtacactgcatttgatcagctcaagaaaaggataattcagaggcagcgacgcaaaaatgcagcatcggcagaggataattccatagtgtctctttctgctttctcagcttttctgcttggtgccgtctcaaaaagtattgctacagtattgacttatccattaatcaggtgcaaggtgatgattcaggctgcagaccctgatgaggatgatgacgttgattctgaaaggccaagcaagtcaagaacaccaaaaacaatgctaggtgccttgcatgctatctggagcaaggaaggcattccaggcttcttcaaaggcctgaatgctcagatccttaaagcagttctgagctccgccttgctgctgatgataaaggagaagatctcgaagttcacatgggtctcgttgcttgccctgcggcggtatcttttcgtttctcagaagaggatcaagagtgtaactgtataaatactagctccaaacatagcgacatcgtgcttctgtagatgttatgccaaggaattaatctgaggaataatgagcagaaatactgaagcaagagagtgtgtaaagtgtgtatgtgtgatcgatagcatcagagggctcttcaataagtttgttcattcttttttcccctctgaatctctgatagctagtgacacaggtgttgcacggatctgaaactggactgtacttttggctttggttgtctgtaatgtgtaaaatgaattgattggcacataccaagaggggttgtaagtcttgtgatatcacaccaacta

SEQ ID NO: 62918 - DNA, 1492 bp, Zea Mays
agcaaaaaaatgccccacactcccacggtcccacccggcgtggcggctggcgtacccgtccccactcgtcgcccatcttccgtgacgtcaccccattctccatcggttcccttcctcgcctcggttcgcgggtacccgagtcgcagacgcacctcaatcgcaaccttttggactcgaaggggggcaatagacagcagggaaagaactgagcgaggagattcccaaggatctcgtcggacgctagaggaagggacgggggacaggcgatggcgggggacgccggcagcggggtggactgggagagcctggcggaggccacctccggggcaatcggctcgctcgtcagcaccaccgtgctctacccgctcgacatctgcaagaccaagttccaggccgagcttcagacgcaccagggcgcgcagaaatataggaacctttcagatgtgttctgggaagcgatttataaaagactctacctggagaagagtggagcaaagtctattggaacaacagccaatttgttagttgcagctgctgctggtgcttgcaatgcaatcgtgacacagccattagatacagcaacttctagaatgcagacgagtgcctttggaaagtctaaagggctgagggaaactcttgcagaaggtacttggatggaagcatttgatggcttaggcatttccattatattgacttgcaatccttctattcagtacactgcatttgatcagctcaagaaaaggataattcagaggcagcgacgcaaaaatgcagcatcggcagaggataattccatagtgtctctttctgctttctcagcttttctgcttggtgccgtctcaaaaagtattgctacagtattgacttatccattaatcaggtgcaaggtgatgattcaggctgcagaccctgatgaggatgatgacgttgattctgaaaggccaagcaagtcaagaacaccaaaaacaatgctaggtgccttgcatgctatctggagcaaggaaggcattccaggcttcttcaaaggcctgaatgctcagatccttaaagcagttctgagctccgccttgctgctgatgataaaggagaagatctcgaagttcacatgggtctcgttgcttgccctgcggcggtatcttttcgtttctcagaagaggatcaagagtgtaactgtataaatactagctccaaacatagcgacatcgtgcttctgtagatgttatgccaaggaattaatctgaggaataatgagcagaaatactgaagcaagagagtgtgtaaagtgtgtatgtgtgatcgatagcatcagagggctcttcaataagtttgttcattcttttttcccctctgaatctctgatagctagtgacacaggtgttgcacggatctgaaactggactgtacttttggctttggttgtctgtaatgtgtaaaatgaattgattggcacataccaagaggggttgtaagtcttgtgatatcacaccaacta

SEQ ID NO: 62919 - DNA, 2064 bp, Zea Mays
ctctttgccatggattgaaactagagctttcaactgagctcgcctaaaaagtgcagactcattgtgcccaagagcacagtccaggacctgaggagaaaagcagatgtcaatgcaaccaaccaatagaccataaatcaagtaaaaagaaataaacaagagattactgaaataaaaaatccaaaaatgcatgttataaaatatgcaatcacgtcatcttttactaaacgcacagacatatactatattaatgtctccataaatcatagtacagacagccactgaatttgtaacttcgatattcgacctcaatgaggttgatacatcatgttagaatctgcattaaatcgcctgtactgaattgtataagaaattaaatgcagattttcaatgacaggaattttgcatgtagtctacagtagcagagcaacttatcagttatcacaagtgcctttagtaacaaaagcttgatacctgatacccaaaaggagatataaaacttctatcagctaactctaagttaatacaaagtgttaagatggaacttccaattacatatgtgctgtcggacagtatgtaagatattatcatcactcgttacgatcttcataaaatgcagttcacaagataggttaataatcttcacaaaaagtagcaaaagaaaagcgcatacgcaactgatcactatggaaaaggaagtgagaagtgagaattagcatgcactctttgaggattataatgtgacgacacgggataaggttacaagttacaaagaaagagttcactgaccatttaagcatcaaccaaatctgaaaaatatgaaacagttctgtagtgtgctgaatgttctacaatacaatagcatattttttatggctcctataaaaagataatgttccttttcaagaaccaagatcggtaggttgatgctttatttaaggaatcagtaaattgatacataccaacagaaacagacaagaaataaggaacacatatcaacataagaagaaagtaacttctattagaaggaaacccaagtataaaatttgtatcgagtattcaataaatgtaccaccaagcaaattatttgtataaatataaatagcaacttttatacgtttgcagtttgcgttaattcattttccttggaggtaaaatgttatggtcgctagatcggtgagggattggagagggaattcgatggttggagctggcggtggaggtgtcgcggtactgttcatgtgtgaacagtctcgcggttactattcacagggcgccggccggggcctctgcccacgaccgagtaagagggggcttttcccttctaattcctgattgctttatttctcatccattgattatataaataacccgaccggccgcccctatctagctagagatccttatctccttaaaactctcaacaaactaccaactgataaccttcctagataatctcaactaatctcctaaacaatctcaactaatcttctaatcttatctctaactatccttatctaatccctttggagggcccatgattgctgctgccgcagcccctccgtgggcctccttaggccctgacataaaacaacattgcttcctgtgtgtaactaatgaaacaacaaatgtattttttctgagtattaaacacatttaacatcatatagaaactggcaatgttgaaattttgtttgaataagagataaataacaaaaaaaaactagccttagctatgaggactataggtcatcaaatatccatgcaagcaactggagtcttcaagaacagccgaaaccaaaatagcagtctgcaagctacataatttttaagacggtaacgcgactaatcccctttttaccttttaagcaataaagcgtaaggcgaggcgacgccttaaatatattgaaaatagaaaaaatattgatatttcaggacaaaaaatcaataaagaagagaaaaaagatacaaaaaagaaactgaaaaaaggttaccaatccaggcagcccataaatcagcttagctatcccatcaaaatgaggttaacactccccaggtaacaccttc

SEQ ID NO: 62920 - DNA, 310 bp, Zea Mays
atgactaatgtccatgacaccaaaagctcctgttggaatttacaacaacgagttcatctatatttacctcttgttataatagcaagaaccataggctcttccggcttgattccatgcgttttatcggctacgtttttagagttacctcctcttttcaagaagaggttcgacaaggttcacttgttttgatgagtttgaatcaccctcagtaggtttcttgagaattccaggaggctgctgtccttggcgattctgtgctccctgaaggttctacaaaatcaacagggttagttggtaattctgaaccagt

SEQ ID NO: 62921 - DNA, 2223 bp, Zea Mays
cgccccccgagccgagcgttcccctcgttgccgcgggccggccggaggtaggattccttcaaattcccgctgcgtgcgacggcacgccggcggtcgccgctatgtccccctctctcgtgctggtgcactcactcccgctcccttctcgccgcgcgctccccatccagctgccccgccgcctcgcccccaaacacccgtcccagtggtcgctccgcacgcctcgacgtctcgctgtctttgccagggcttcggcgtccgttgtggtgtcgccgcacggcgagggaggtggtggcacggcggcggggcggaagagcacggggtataggaaccggttcctggacctggcgcggctgggggccgtggcggagggcgcggcggaggccttcttccgcagcgagatccggcggcggctggccgtcactgccgcgctcatcgtgctcagccgcgtggggtacttcatcccgctccccgggttcgaccgccgcctcatcccagactcttacctcagcttctccgcgctccctgcagatgaccttggcgatttctcctcagaattgaagctttcttttttccagctggggatcagtcatcaaatttcagcatctattgtcatgcagatggtggctttctttgtggtttgcaactgtggctgcttttactgtgtcatgcttttccctgcagtattcagtatatgctgcaagttacagggtcaagcatgtaattataacaagtcttctgcttgttcttggtgcaatgtcaatgacatggatttgtgacaccattacagaatttggatttggacatggctcatctttgattatctgtgtgggaattttgactggctacacagatacactacacaagatgataactcagttttcagggaatttttcctattgttggccttacatcttgggagtagctggaatttttatgatactcaccatgggggctgtgttggtgactgaaggatgcaggaagataaagcttcagtactatggattcaaattagcatctggtgcagggaatgaaagcagcccagttacagaggttgagccatatatccccttcaacatcaatccaactggaatgcagcccttgcttacaacctcatacttactagcttttccaagtatcatggccagtatttttgcctcacccttttgggaaaacttgagggaaattttgaatccaaagacttcaactggtggtagtccctgggtttattacttgacatatgctttccttgtcttcatcttcaatatttttgatattgctaacttacccaaagagatatctgattacctgaataagatgtgtgcgagggtaccaaggataaagcctggaagagcaacagtagactatcttacaaagatacaaacatcaacacgtttctggggaggtctactgctaagcttgcttgcaacttcctctttattgcttgaccgatatctcaggcaaataaatgaagggttgtcaataggattcacatcagtcttgattattgtgggctcaattattgagcttagaagatcatatcaagcgtacaatgtgatgccagcactgagcaaagttttgaggagatatggtgcttaagagtatgtaagctgatacgttggtgatgatggcaccatccactagctcgtggtgttgcaaggtcgattggtctttagaaacagcatggatatgatgagaagtttaccgctcaagcttctgttagattaaaaggtggaaggaacatggctttacaatcacatcggactttatcgacaaggtgaactgaggaagcaacaaacatgcccaacaacatggctgtgtgtatttgttggaagtgatctaaaatcttccatgtcctaatcgccatactggatcacatagctaatctgttgggttctataaattctccaccgttcaaatgctccgaaaggaagggcctttggataagtttctctttttttccctttttttgtttgggtgtgcacacattgttggacgggctgtagttgaatgagtagagtgtacgcctcgggctgaagatgagtcggattcaacgacgaacatttttgttgtgcccgcgaatggccaatatttcgctttcatgtacaactctgatcggatggagattgcttttttttatgcgggtagttagtcaatggtgtacggcttaacagtcgcggaagcacattcacgtcgtcttcgtttaggtcacattgcagatcgaac

SEQ ID NO: 62922 - DNA, 2196 bp, Zea Mays
cgccccccgagccgagcgttcccctcgttgccgcgggccggccggaggtaggattccttcaaattcccgctgcgtgcgacggcacgccggcggtcgccgctatgtccccctctctcgtgctggtgcactcactcccgctcccttctcgccgcgcgctccccatccagctgccccgccgcctcgcccccaaacacccgtcccagtggtcgctccgcacgcctcgacgtctcgctgtctttgccagggcttcggcgtccgttgtggtgtcgccgcacggcgagggaggtggtggcacggcggcggggcggaagagcacggggtataggaaccggttcctggacctggcgcggctgggggccgtggcggagggcgcggcggaggccttcttccgcagcgagatccggcggcggctggccgtcactgccgcgctcatcgtgctcagccgcgtggggtacttcatcccgctccccgggttcgaccgccgcctcatcccagactcttacctcagcttctccgcgctccctgcagatgaccttggcgatttctcctcagaattgaagctttcttttttccagctggggatcagtcatcaaatttcagcatctattgtcatgcaggttctctgtcatgttcttccatcacttgaaaagctccgcaaggaaggattagatggccatgagaagttaaaaggctatatatggtggctttctttgtggtttgcaactgtggctgcttttactgtgtcatgcttttccctgcagtattcagtatatgctgcaagttacagggtcaagcatgtaattataacaagtcttctgcttgttcttggtgcaatgtcaatgacatggatttgtgacaccattacagaatttggatttggacatggctcatctttgattatctgtgtgggaattttgactggctacacagatacactacacaagatgataactcagttttcagggaatttttcctattgttggccttacatcttgggagtagctggaatttttatgatactcaccatgggggctgtgttggtgactgaaggatgcaggaagataaagcttcagtactatggattcaaattagcatctggtgcagggaatgaaagcagcccagttacagaggttgagccatatatccccttcaacatcaatccaactggaatgcagcccttgcttacaacctcatacttactagcttttccaagtatcatggccagtatttttgcctcacccttttgggaaaacttgagggaaattttgaatccaaagacttcaactggtggtagtccctgggtttattacttgacatatgctttccttgtcttcatcttcaatatttttgatattgctaacttacccaaagagatatctgattacctgaataagatgtgtgcgagggtaccaaggataaagcctggaagagcaacagtagactatcttacaaagatacaaacatcaacacgtttctggggtgggctcaattattgagcttagaagatcatatcaagcgtacaatgtgatgccagcactgagcaaagttttgaggagatatggtgcttaagagtatgtaagctgatacgttggtgatgatggcaccatccactagctcgtggtgttgcaaggtcgattggtctttagaaacagcatggatatgatgagaagtttaccgctcaagcttctgttagattaaaaggtggaaggaacatggctttacaatcacatcggactttatcgacaaggtgaactgaggaagcaacaaacatgcccaacaacatggctgtgtgtatttgttggaagtgatctaaaatcttccatgtcctaatcgccatactggatcacatagctaatctgttgggttctataaattctccaccgttcaaatgctccgaaaggaagggcctttggataagtttctctttttttccctttttttgtttgggtgtgcacacattgttggacgggctgtagttgaatgagtagagtgtacgcctcgggctgaagatgagtcggattcaacgacgaacatttttgttgtgcccgcgaatggccaatatttcgctttcatgtacaactctgatcggatggagattgcttttttttatgcgggtagttagtcaatggtgtacggcttaacagtcgcggaagcacattcacgtcgtcttcgtttaggtcacattgcagatcgaac

SEQ ID NO: 62923 - DNA, 2256 bp, Zea Mays
cgccccccgagccgagcgttcccctcgttgccgcgggccggccggaggtaggattccttcaaattcccgctgcgtgcgacggcacgccggcggtcgccgctatgtccccctctctcgtgctggtgcactcactcccgctcccttctcgccgcgcgctccccatccagctgccccgccgcctcgcccccaaacacccgtcccagtggtcgctccgcacgcctcgacgtctcgctgtctttgccagggcttcggcgtccgttgtggtgtcgccgcacggcgagggaggtggtggcacggcggcggggcggaagagcacggggtataggaaccggttcctggacctggcgcggctgggggccgtggcggagggcgcggcggaggccttcttccgcagcgagatccggcggcggctggccgtcactgccgcgctcatcgtgctcagccgcgtgggatgaccttggcgatttctcctcagaattgaagctttcttttttccagctggggatcagtcatcaaatttcagcatctattgtcatgcaggttctctgtcatgttcttccatcacttgaaaagctccgcaaggaaggattagatggccatgagaagttaaaaggctatatgtgtgtctagttgtctatctatcttgaaccatggtggctttctttgtggtttgcaactgtggctgcttttactgtgtcatgcttttccctgcagtattcagtatatgctgcaagttacagggtcaagcatgtaattataacaagtcttctgcttgttcttggtgcaatgtcaatgacatggatttgtgacaccattacagaatttggatttggacatggctcatctttgattatctgtgtgggaattttgactggctacacagatacactacacaagatgataactcagttttcagggaatttttcctattgttggccttacatcttgggagtagctggaatttttatgatactcaccatgggggctgtgttggtgactgaaggatgcaggaagataaagcttcagtactatggattcaaattagcatctggtgcagggaatgaaagcagcccagttacagaggttgagccatatatccccttcaacatcaatccaactggaatgcagcccttgcttacaacctcatacttactagcttttccaagtatcatggccagtatttttgcctcacccttttgggaaaacttgagggaaattttgaatccaaagacttcaactggtggtagtccctgggtttattacttgacatatgctttccttgtcttcatcttcaatatttttgatattgctaacttacccaaagagatatctgattacctgaataagatgtgtgcgagggtaccaaggataaagcctggaagagcaacagtagactatcttacaaagatacaaacatcaacacgtttctggggaggtctactgctaagcttgcttgcaacttcctctttattgcttgaccgatatctcaggcaaataaatgaagggttgtcaataggattcacatcagtcttgattattgtgggctcaattattgagcttagaagatcatatcaagcgtacaatgtgatgccagcactgagcaaagttttgaggagatatggtgcttaagagtatgtaagctgatacgttggtgatgatggcaccatccactagctcgtggtgttgcaaggtcgattggtctttagaaacagcatggatatgatgagaagtttaccgctcaagcttctgttagattaaaaggtggaaggaacatggctttacaatcacatcggactttatcgacaaggtgaactgaggaagcaacaaacatgcccaacaacatggctgtgtgtatttgttggaagtgatctaaaatcttccatgtcctaatcgccatactggatcacatagctaatctgttgggttctataaattctccaccgttcaaatgctccgaaaggaagggcctttggataagtttctctttttttccctttttttgtttgggtgtgcacacattgttggacgggctgtagttgaatgagtagagtgtacgcctcgggctgaagatgagtcggattcaacgacgaacatttttgttgtgcccgcgaatggccaatatttcgctttcatgtacaactctgatcggatggagattgcttttttttatgcgggtagttagtcaatggtgtacggcttaacagtcgcggaagcacattcacgtcgtcttcgtttaggtcacattgcagatcgaac

SEQ ID NO: 62924 - DNA, 2133 bp, Zea Mays
cgccccccgagccgagcgttcccctcgttgccgcgggccggccggaggtaggattccttcaaattcccgctgcgtgcgacggcacgccggcggtcgccgctatgtccccctctctcgtgctggtgcactcactcccgctcccttctcgccgcgcgctccccatccagctgccccgccgcctcgcccccaaacacccgtcccagtggtcgctccgcacgcctcgacgtctcgctgtctttgccagggcttcggcgtccgttgtggtgtcgccgcacggcgagggaggtggtggcacggcggcggggcggaagagcacggggtataggaaccggttcctggacctggcgcggctgggggccgtggcggagggcgcggcggaggccttcttccgcagcgagatccggcggcggctggccgtcactgccgcgctcatcgtgctcagccgcgtggggtacttcatcccgctccccgggttcgaccgccgcctcatcccagactcttacctcagcttctccgcgctccctgcagatgaccttggcgatttctcctcagaattgaagctttcttttttccagctggggatcagtcatcaaatttcagcatctattgtcatgcagggtcaagcatgtaattataacaagtcttctgcttgttcttggtgcaatgtcaatgacatggatttgtgacaccattacagaatttggatttggacatggctcatctttgattatctgtgtgggaattttgactggctacacagatacactacacaagatgataactcagttttcagggaatttttcctattgttggccttacatcttgggagtagctggaatttttatgatactcaccatgggggctgtgttggtgactgaaggatgcaggaagataaagcttcagtactatggattcaaattagcatctggtgcagggaatgaaagcagcccagttacagaggttgagccatatatccccttcaacatcaatccaactggaatgcagcccttgcttacaacctcatacttactagcttttccaagtatcatggccagtatttttgcctcacccttttgggaaaacttgagggaaattttgaatccaaagacttcaactggtggtagtccctgggtttattacttgacatatgctttccttgtcttcatcttcaatatttttgatattgctaacttacccaaagagatatctgattacctgaataagatgtgtgcgagggtaccaaggataaagcctggaagagcaacagtagactatcttacaaagatacaaacatcaacacgtttctggggaggtctactgctaagcttgcttgcaacttcctctttattgcttgaccgatatctcaggcaaataaatgaagggttgtcaataggattcacatcagtcttgattattgtgggctcaattattgagcttagaagatcatatcaagcgtacaatgtgatgccagcactgagcaaagttttgaggagatatggtgcttaagagtatgtaagctgatacgttggtgatgatggcaccatccactagctcgtggtgttgcaaggtcgattggtctttagaaacagcatggatatgatgagaagtttaccgctcaagcttctgttagattaaaaggtggaaggaacatggctttacaatcacatcggactttatcgacaaggtgaactgaggaagcaacaaacatgcccaacaacatggctgtgtgtatttgttggaagtgatctaaaatcttccatgtcctaatcgccatactggatcacatagctaatctgttgggttctataaattctccaccgttcaaatgctccgaaaggaagggcctttggataagtttctctttttttccctttttttgtttgggtgtgcacacattgttggacgggctgtagttgaatgagtagagtgtacgcctcgggctgaagatgagtcggattcaacgacgaacatttttgttgtgcccgcgaatggccaatatttcgctttcatgtacaactctgatcggatggagattgcttttttttatgcgggtagttagtcaatggtgtacggcttaacagtcgcggaagcacattcacgtcgtcttcgtttaggtcacattgcagatcgaac

SEQ ID NO: 62925 - DNA, 2288 bp, Zea Mays
cgccccccgagccgagcgttcccctcgttgccgcgggccggccggaggtaggattccttcaaattcccgctgcgtgcgacggcacgccggcggtcgccgctatgtccccctctctcgtgctggtgcactcactcccgctcccttctcgccgcgcgctccccatccagctgccccgccgcctcgcccccaaacacccgtcccagtggtcgctccgcacgcctcgacgtctcgctgtctttgccagggcttcggcgtccgttgtggtgtcgccgcacggcgagggaggtggtggcacggcggcggggcggaagagcacggggtataggaaccggttcctggacctggcgcggctgggggccgtggcggagggcgcggcggaggccttcttccgcagcgagatccggcggcggctggccgtcactgccgcgctcatcgtgctcagccgcgtggggtacttcatcccgctccccgggttcgaccgccgcctcatcccagactcttacctcagcttctccgcgctccctgcagatgaccttggcgatttctcctcagaattgaagctttcttttttccagctggggatcagtcatcaaatttcagcatctattgtcatgcaggttctctgtcatgttcttccatcacttgaaaagctccgcaaggaaggattagatggccatgagaaatggtggctttctttgtggtttgcaactgtggctgcttttactgtgtcatgcttttccctgcagtattcagtatatgctgcaagttacagggtcaagcatgtaattataacaagtcttctgcttgttcttggtgcaatgtcaatgacatggatttgtgacaccattacagaatttggatttggacatggctcatctttgattatctgtgtgggaattttgactggctacacagatacactacacaagatgataactcagttttcagggaatttttcctattgttggccttacatcttgggagtagctggaatttttatgatactcaccatgggggctgtgttggtgactgaaggatgcaggaagataaagcttcagtactatggattcaaattagcatctggtgcagggaatgaaagcagcccagttacagaggttgagccatatatccccttcaacatcaatccaactggaatgcagcccttgcttacaacctcatacttactagcttttccaagtatcatggccagtatttttgcctcacccttttgggaaaacttgagggaaattttgaatccaaagacttcaactggtggtagtccctgggtttattacttgacatatgctttccttgtcttcatcttcaatatttttgatattgctaacttacccaaagagatatctgattacctgaataagatgtgtgcgagggtaccaaggataaagcctggaagagcaacagtagactatcttacaaagatacaaacatcaacacgtttctggggaggtctactgctaagcttgcttgcaacttcctctttattgcttgaccgatatctcaggcaaataaatgaagggttgtcaataggattcacatcagtcttgattattgtgggctcaattattgagcttagaagatcatatcaagcgtacaatgtgatgccagcactgagcaaagttttgaggagatatggtgcttaagagtatgtaagctgatacgttggtgatgatggcaccatccactagctcgtggtgttgcaaggtcgattggtctttagaaacagcatggatatgatgagaagtttaccgctcaagcttctgttagattaaaaggtggaaggaacatggctttacaatcacatcggactttatcgacaaggtgaactgaggaagcaacaaacatgcccaacaacatggctgtgtgtatttgttggaagtgatctaaaatcttccatgtcctaatcgccatactggatcacatagctaatctgttgggttctataaattctccaccgttcaaatgctccgaaaggaagggcctttggataagtttctctttttttccctttttttgtttgggtgtgcacacattgttggacgggctgtagttgaatgagtagagtgtacgcctcgggctgaagatgagtcggattcaacgacgaacatttttgttgtgcccgcgaatggccaatatttcgctttcatgtacaactctgatcggatggagattgcttttttttatgcgggtagttagtcaatggtgtacggcttaacagtcgcggaagcacattcacgtcgtcttcgtttaggtcacattgcagatcgaac

SEQ ID NO: 62926 - DNA, 2205 bp, Zea Mays
gccgccccccgagccgagcgttcccctcgttgccgcgggccggccggaggtaggattccttcaaattcccgctgcgtgcgacggcacgccggcggtcgccgctatgtccccctctctcgtgctggtgcactcactcccgctcccttctcgccgcgcgctccccatccagctgccccgccgcctcgcccccaaacacccgtcccagtggtcgctccgcacgcctcgacgtctcgctgtctttgccagggcttcggcgtccgttgtggtgtcgccgcacggcgagggaggtggtggcacggcggcggggcggaagagcacggggtataggaaccggttcctggacctggcgcggctgggggccgtggcggagggcgcggcggaggccttcttccgcagcgagatccggcggcggctggccgtcactgccgcgctcatcgtgctcagccgcgtggggtacttcatcccgctccccgggttcgaccgccgcctcatcccagactcttacctcagcttctccgcgctccctgcagatgaccttggcgatttctcctcagaattgaagctttcttttttccagctggggatcagtcatcaaatttcagcatctattgtcatgcaggttctctgtcatgttcttccatcacttgaaaagctccgcaaggaaggattagatggccatgagaagttaaaaggctatatgtgtgtctagttgtctatctatcttgaaccatggtggctttctttgtggtttgcaactgtggctgcttttactgtgtcatgcttttccctgcagtattcagtatatgctgcaagttacagggtcaagcatgtaattataacaagtcttctgcttgttcttggtgcaatgtcaatgacatggatttgtgacaccattacagaatttggatttggacatggctcatctttgattatctgtgtgggaattttgactggctacacagatacactacacaagatgataactcagttttcagggaatttttcctattgttggccttacatcttgggagtagctggaatttttatgatactcaccatgggggctgtgttggtgactgaaggatgcaggaagataaagcttcagtactatggattcaaattagcatctggtgcagggaatgaaagcagcccagttacagaggttgagccatatatccccttcaacatcaatccaactggaatgcagcccttgcttacaacctcatacttactagcttttccaagtatcatggccaggctaacttacccaaagagatatctgattacctgaataagatgtgtgcgagggtaccaaggataaagcctggaagagcaacagtagactatcttacaaagatacaaacatcaacacgtttctggggaggtctactgctaagcttgcttgcaacttcctctttattgcttgaccgatatctcaggcaaataaatgaagggttgtcaataggattcacatcagtcttgattattgtgggctcaattattgagcttagaagatcatatcaagcgtacaatgtgatgccagcactgagcaaagttttgaggagatatggtgcttaagagtatgtaagctgatacgttggtgatgatggcaccatccactagctcgtggtgttgcaaggtcgattggtctttagaaacagcatggatatgatgagaagtttaccgctcaagcttctgttagattaaaaggtggaaggaacatggctttacaatcacatcggactttatcgacaaggtgaactgaggaagcaacaaacatgcccaacaacatggctgtgtgtatttgttggaagtgatctaaaatcttccatgtcctaatcgccatactggatcacatagctaatctgttgggttctataaattctccaccgttcaaatgctccgaaaggaagggcctttggataagtttctctttttttccctttttttgtttgggtgtgcacacattgttggacgggctgtagttgaatgagtagagtgtacgcctcgggctgaagatgagtcggattcaacgacgaacatttttgttgtgcccgcgaatggccaatatttcgctttcatgtacaactctgatcggatggagattgcttttttttatgcgggtagttagtcaatggtgtacggcttaacagtcgcggaagcacattcacgtcgtcttcgtttaggtcacattgcagatcgaac

SEQ ID NO: 62927 - DNA, 756 bp, Zea Mays
agtgagtggcccttcttcctctcaatacccctctctccctcttgtgggtagcgttgtgcgtcttttcctcagcagcaaccggagagcggctgctcgcctgctcctcctcctagggaaaggacagcggcggcggcggcggcggcgagaagttgggcctgaagcccggacgctttctcccgagataccgcaatactgctagagcactgtgtttttcaataatgcatactacgggagagttggaggaattagcacaagagagatgaatatgcttgaactggatttattgttcggtctggacttcaggctcaaagtggatatagagactttcgaaagctactgcttacagttggaggaagcactggttcttgttttggagagaccaattcaggtccaagaggccaacgtaactaaacacttgatttgtaacagcagcgccgatgagacttgcaaacacgagctcgggcttgaaaggtacagcagtcaggctgtccaagggtgtagttggtaaatgtgattgggcagatagttttgaaaaaagtgtatgggtccgagtattggtaattcttttatttgacatttaagttgttcagttggccttgtttagtagggccgttattctacttctctacaacactagtgcttgtgagccacgccgttcagtttttttgcggagtgagtttgaaaacattactggagtccggccacgttcaagtatcatttcattaattatatttttactaggtgaacgtgtgcatt

SEQ ID NO: 62928 - DNA, 1451 bp, Zea Mays
agtgagtggcccttcttcctctcaatacccctctctccctcttgtgggtagcgttgtgcgtcttttcctcagcagcaaccggagagcggctgctcgcctgctcctcctcctagggaaaggacagcggcggcggcggcggcggcgagaagttgggcctgaagcccggacgctttctcccgagataccgcaatactgctagagcactgtctagacttcacaatggcgctacaagcagatagttcataaagagaataaaatcgcagcaaaccatgttcctgctcgcagcaacatatttggaagcatgttgtcacaaagcacatgaattcgacttttgaccctgcatcttatgggaagtgatgaacctctggagctcttgtgtgtgctccttggatattgaattctcttatccaaattttggtgttgtaataatgtatgcatcagtacttttgctgaatatgaattgctttgtctttacagcactaatgtttgcttatgacaatggagtcacctacaactgccgctggtggtgaactggagagctacttctccttgggtttgacagtatcccactcacagaaagataatgctgaatttccaaaggttctgttgcttctctcagcgtatcttgacaagacagttcagcagaatgaagagttactagactccagtaaaataaaggagtcgaccactatctttcatggtcagagggtgcctgaacttagtataaagctgtatgcagagcgtattttcaagtatgcaaagtgcagcccatcttgctttgtgctagcacttatctacatggagagatatctacaacaaccaaacatttacatgacgtcatttagtgttcatcgcctgcttattacaagtgttgttgttgctgccaaattcatagatgatgcgtttttcaataatgcatactacgggagagttggaggaattagcacaagagagatgaatatgcttgaactggatttattgttcggtctggacttcaggctcaaagtggatatagagactttcgaaagctactgcttacagttggaggaagcactggttcttgttttggagagaccaattcaggtccaagaggccaacgtaactaaacacttgatttgtaacagcagcgccgatgagacttgcaaacacgagctcgggcttgaaaggtacagcagtcaggctgtccaagggtgtagttggtaaatgtgattgggcagatagttttgaaaaaagtgtatgggtccgagtattggtaattcttttatttgacatttaagttgttcagttggccttgtttagtagggccgttattctacttctctacaacactagtgcttgtgagccacgccgttcagtttttttgcggagtgagtttgaaaacattactggagtccggccacgttcaagtatcatttcattaattatatttttactaggtgaacgtgtgcatt

SEQ ID NO: 62929 - DNA, 1856 bp, Zea Mays
agtgagtggcccttcttcctctcaatacccctctctccctcttgtgggtagcgttgtgcgtcttttcctcagcagcaaccggagagcggctgctcgcctgctcctcctcctagggaaaggacagcggcggcggcggcggcggcgagaagttgggcctgaagcccggacgctttctcccgagataccgcaatactgctagagcactgtcactaatgtttgcttatgacaatggagtcacctacaactgccgctggtggtgaactggagagctacttctccttgggtttgacagtatcccactcacagaaagataatgctgaatttccaaaggttctgttgcttctctcagcgtatcttgacaagacagttcagcagaatgaagagttactagactccagtaaaataaaggagtcgaccactatctttcatggtcagagggtgcctgaacttagtataaagctgtatgcagagcgtattttcaagtatgcaaagtgcagcccatcttgctttgtgctagcacttatctacatggagagatatctacaacaaccaaacatttacatgacgtcatttagtgttcatcgcctgcttattacaagtgttgttgttgctgccaaattcatagatgatgcgtaaggacccaccataacagctttaagttacatttgtgcatatgtactttgtatggaagtatgatcttacatactgttggccatagactgatatcaggtcttctgtgtgatactgatcatagatgcaaactcaaacttagctgagtcaataaactaatgtcactaggaaatgtctaaatatgatctttaaccatctggaacaacctgacatggtttatggtcagctatcttctttggtatgtaagcaatttacctttttttatattatataagaattaataagcataaacctctttatctctaaatgctagacttatgttttctcagttgtcatttttgtatttcggatggatttcatgtttcccgtagtacttttttttgttaaaccaccagttaatagggatgcatcaatcaattagttgcaacagtcggtagcctatggtggaatttaataggatagtaatgaggtgaggaaaggtcggcaagagtcagatgttgatggccaatatgccccagattagtaagtgaattccaccctgactttggaaaataaacttataatggcacttcaagtagaaggaagatgatattattgttcagggttttgtttattccataacaaatgtaaactgaagaaagttttcgaataacttcttggatatattttatttgcaggtttttcaataatgcatactacgggagagttggaggaattagcacaagagagatgaatatgcttgaactggatttattgttcggtctggacttcaggctcaaagtggatatagagactttcgaaagctactgcttacagttggaggaagcactggttcttgttttggagagaccaattcaggtccaagaggccaacgtaactaaacacttgatttgtaacagcagcgccgatgagacttgcaaacacgagctcgggcttgaaaggtacagcagtcaggctgtccaagggtgtagttggtaaatgtgattgggcagatagttttgaaaaaagtgtatgggtccgagtattggtaattcttttatttgacatttaagttgttcagttggccttgtttagtagggccgttattctacttctctacaacactagtgcttgtgagccacgccgttcagtttttttgcggagtgagtttgaaaacattactggagtccggccacgttcaagtatcatttcattaattatatttttactaggtgaacgtgtgcatt

SEQ ID NO: 62930 - DNA, 1458 bp, Zea Mays
agtgagtggcccttcttcctctcaatacccctctctccctcttgtgggtagcgttgtgcgtcttttcctcagcagcaaccggagagcggctgctcgcctgctcctcctcctagggaaaggacagcggcggcggcggcggcggcgagaagttgggcctgaagcccggacgctttctcccgagataccgcaatactgctagagcactgtagaacagctagacttcacaatggcgctacaagcagatagttcataaagagaataaaatcgcagcaaaccatgttcctgctcgcagcaacatatttggaagcatgttgtcacaaagcacatgaattcgacttttgaccctgcatcttatgggaagtgatgaacctctggagctcttgtgtgtgctccttggatattgaattctcttatccaaattttggtgttgtaataatgtatgcatcagtacttttgctgaatatgaattgctttgtctttacagcactaatgtttgcttatgacaatggagtcacctacaactgccgctggtggtgaactggagagctacttctccttgggtttgacagtatcccactcacagaaagataatgctgaatttccaaaggttctgttgcttctctcagcgtatcttgacaagacagttcagcagaatgaagagttactagactccagtaaaataaaggagtcgaccactatctttcatggtcagagggtgcctgaacttagtataaagctgtatgcagagcgtattttcaagtatgcaaagtgcagcccatcttgctttgtgctagcacttatctacatggagagatatctacaacaaccaaacatttacatgacgtcatttagtgttcatcgcctgcttattacaagtgttgttgttgctgccaaattcatagatgatgcgtttttcaataatgcatactacgggagagttggaggaattagcacaagagagatgaatatgcttgaactggatttattgttcggtctggacttcaggctcaaagtggatatagagactttcgaaagctactgcttacagttggaggaagcactggttcttgttttggagagaccaattcaggtccaagaggccaacgtaactaaacacttgatttgtaacagcagcgccgatgagacttgcaaacacgagctcgggcttgaaaggtacagcagtcaggctgtccaagggtgtagttggtaaatgtgattgggcagatagttttgaaaaaagtgtatgggtccgagtattggtaattcttttatttgacatttaagttgttcagttggccttgtttagtagggccgttattctacttctctacaacactagtgcttgtgagccacgccgttcagtttttttgcggagtgagtttgaaaacattactggagtccggccacgttcaagtatcatttcattaattatatttttactaggtgaacgtgtgcatt

SEQ ID NO: 62931 - DNA, 735 bp, Zea Mays
ttgataataacctttgatctgagaccgagatccgcaattttctaaccaaggcactgaattcatcaagaagtccaagtccaagcgacaggaactcgcagacttgatgagtcccaattcattggcaccgacgccgtcatctgaccaaagttgctggagatcctgtacagtaaaatttctggcgctgagcgttcaatggtatctattttgggtacatggtggcgcggtccttgaaattaacatcagcaatgtaacaaaattttctaagatctagttgaggataaggataaggagaacatatctcgtactcatgcatcgaccagcttacactgggataggctatagttggatggtcctggccgtaattcgtcggtctcagctttgattgagtttagtgttgtttccactttccagttcacagttcagtgtatgcccgcatctgtttatttaaagtattaagcgtgaacaagttagacattaggacatgtacaatgatatcttgaggtgtctaaagggtttgcaaaaaaaattatggagccgtctctccgtgaagagacgccttctctgactcgtaacctaagtagcaatagatgcctcatttcttattgtacgaattcgtcgtatgttttttcattcggcgctgtataagtgtatttacttttgtatttattaatagactatatttataaacactattatataatagagtcttttagttgtctcttgtgttgtttaaag

SEQ ID NO: 62932 - DNA, 1932 bp, Zea Mays
atcagataagatcagagttaaattctcgtccatgattgctgattccttctggctctgtagctgtcgctcatgttgtacagaaagccaaagagaggctgctttgttgctagggcaatttgcttcagccgactcagattgcaaggtccatattgtgcaaaggggtgcagtccgtccactaattgaaatgctacagtcggctgatgtccaactccgggagatgtctgcttttgcactcggcaggcttgcccaggacacacataaccaagcaggtattgcatataatggtggcttggtgcctttgtttaaactccttgactcaaaaaatggatctctgcaacataatgctgcatttgccctttatggagttgcagataatgaggactatgtatctgacttcattaaagtaggaggtgtccaaaagttgcaagatggggaatttattgtgcaggcaacaaaggactgtgtggcaaaaacattgaaaaggttagaggagaagataaatggacgagtgttgaaacacttgctttatttgatgcgagtaggagagcaatctgtgcaaaggcgtgttgctctggctctcgcacacctttgtgctcctgaagatcaaagggcaatttttattgataataatggtctcgacttgcttcttgatcttctgatttccatgagcccaaaacatcaacaagatggctcagcagcattatacaaattggccaacaaagctgcagcactttctcccatggatgctgcccctccatctccaacacctcaggtttatcttggtgagcaatacgtgaatagttcaacactttcagatgttactttcttggtagaaggaaagcgcttttatgcacacagaattgctttgcttgcttcttcggatgcatttcgtgcaatgtttgatggcgggtatagggaaaaggatgcaagagacattgaaattccaaatatcagatgggaggtctttgaactcatgatgagatttatctatacagggtcagtgcagattaacagtgaaatttcacaggatcttcttagagctgctgatcagtatctcttagaaggactcaaacgcttatgtgaatatactattgcgaaggatgtgaatctagataatgtatctgacatgtatgacttgtccgaagcctttcatgccgtgtcactgagacatacatgcatcttgtacattctggaacattttaacaagatctgcaccagagccggagatccgcaattttctaaccaaggcactgaattcatcaagaagtccaagtccaagcgacaggaactcgcagacttgatgagtcccaattcattggcaccgacgccgtcatctgaccaaagttgctggagatcctgtacagtaaaatttctggcgctgagcgttcaatggtatctattttgggtacatggtggcgcggtccttgaaattaacatcagcaatgtaacaaaattttctaagatctagttgaggataaggataaggagaacatatctcgtactcatgcatcgaccagcttacactgggataggctatagttggatggtcctggccgtaattcgtcggtctcagctttgattgagtttagtgttgtttccactttccagttcacagttcagtgtatgcccgcatctgtttatttaaagtattaagcgtgaacaagttagacattaggacatgtacaatgatatcttgaggtgtctaaagggtttgcaaaaaaaattatggagccgtctctccgtgaagagacgccttctctgactcgtaacctaagtagcaatagatgcctcatttcttattgtacgaattcgtcgtatgttttttcattcggcgctgtataagtgtatttacttttgtatttattaatagactatatttataaacactattatataatagagtcttttagttgtctcttgtgttgtttaaag

SEQ ID NO: 62933 - DNA, 2016 bp, Zea Mays
gccttacctcgctttaccgctttaacaactatgggccagtggcgcagccgtgaaggttggtgtcattggaaatttggttcattcatcacctaacatcaagaaggaggttcttaatgcaggggcactgcaacctgtgattggattattaagctcatgttgtacagaaagccaaagagaggctgctttgttgctagggcaatttgcttcagccgactcagattgcaaggtccatattgtgcaaaggggtgcagtccgtccactaattgaaatgctacagtcggctgatgtccaactccgggagatgtctgcttttgcactcggcaggcttgcccaggacacacataaccaagcaggtattgcatataatggtggcttggtgcctttgtttaaactccttgactcaaaaaatggatctctgcaacataatgctgcatttgccctttatggagttgcagataatgaggactatgtatctgacttcattaaagtaggaggtgtccaaaagttgcaagatggggaatttattgtgcaggcaacaaaggactgtgtggcaaaaacattgaaaaggttagaggagaagataaatggacgagtgttgaaacacttgctttatttgatgcgagtaggagagcaatctgtgcaaaggcgtgttgctctggctctcgcacacctttgtgctcctgaagatcaaagggcaatttttattgataataatggtctcgacttgcttcttgatcttctgatttccatgagcccaaaacatcaacaagatggctcagcagcattatacaaattggccaacaaagctgcagcactttctcccatggatgctgcccctccatctccaacacctcaggtttatcttggtgagcaatacgtgaatagttcaacactttcagatgttactttcttggtagaaggaaagcgcttttatgcacacagaattgctttgcttgcttcttcggatgcatttcgtgcaatgtttgatggcgggtatagggaaaaggatgcaagagacattgaaattccaaatatcagatgggaggtctttgaactcatgatgagatttatctatacagggtcagtgcagattaacagtgaaatttcacaggatcttcttagagctgctgatcagtatctcttagaaggactcaaacgcttatgtgaatatactattgcgaaggatgtgaatctagataatgtatctgacatgtatgacttgtccgaagcctttcatgccgtgtcactgagacatacatgcatcttgtacattctggaacattttaacaagatctgcaccagagccggagatccgcaattttctaaccaaggcactgaattcatcaagaagtccaagtccaagcgacaggaactcgcagacttgatgagtcccaattcattggcaccgacgccgtcatctgaccaaagttgctggagatcctgtacagtaaaatttctggcgctgagcgttcaatggtatctattttgggtacatggtggcgcggtccttgaaattaacatcagcaatgtaacaaaattttctaagatctagttgaggataaggataaggagaacatatctcgtactcatgcatcgaccagcttacactgggataggctatagttggatggtcctggccgtaattcgtcggtctcagctttgattgagtttagtgttgtttccactttccagttcacagttcagtgtatgcccgcatctgtttatttaaagtattaagcgtgaacaagttagacattaggacatgtacaatgatatcttgaggtgtctaaagggtttgcaaaaaaaattatggagccgtctctccgtgaagagacgccttctctgactcgtaacctaagtagcaatagatgcctcatttcttattgtacgaattcgtcgtatgttttttcattcggcgctgtataagtgtatttacttttgtatttattaatagactatatttataaacactattatataatagagtcttttagttgtctcttgtgttgtttaaag

SEQ ID NO: 62934 - DNA, 1959 bp, Zea Mays
gtttgatttattatgagcaggttggtgtcattggaaatttggttcattcatcacctaacatcaagaaggaggttcttaatgcaggggcactgcaacctgtgattggattattaagctcatgttgtacagaaagccaaagagaggctgctttgttgctagggcaatttgcttcagccgactcagattgcaaggtccatattgtgcaaaggggtgcagtccgtccactaattgaaatgctacagtcggctgatgtccaactccgggagatgtctgcttttgcactcggcaggcttgcccaggacacacataaccaagcaggtattgcatataatggtggcttggtgcctttgtttaaactccttgactcaaaaaatggatctctgcaacataatgctgcatttgccctttatggagttgcagataatgaggactatgtatctgacttcattaaagtaggaggtgtccaaaagttgcaagatggggaatttattgtgcaggcaacaaaggactgtgtggcaaaaacattgaaaaggttagaggagaagataaatggacgagtgttgaaacacttgctttatttgatgcgagtaggagagcaatctgtgcaaaggcgtgttgctctggctctcgcacacctttgtgctcctgaagatcaaagggcaatttttattgataataatggtctcgacttgcttcttgatcttctgatttccatgagcccaaaacatcaacaagatggctcagcagcattatacaaattggccaacaaagctgcagcactttctcccatggatgctgcccctccatctccaacacctcaggtttatcttggtgagcaatacgtgaatagttcaacactttcagatgttactttcttggtagaagaattgctttgcttgcttcttcggatgcatttcgtgcaatgtttgatggcgggtatagggaaaaggatgcaagagacattgaaattccaaatatcagatgggaggtctttgaactcatgatgagatttatctatacagggtcagtgcagattaacagtgaaatttcacaggatcttcttagagctgctgatcagtatctcttagaaggactcaaacgcttatgtgaatatactattgcgaaggatgtgaatctagataatgtatctgacatgtatgacttgtccgaagcctttcatgccgtgtcactgagacatacatgcatcttgtacattctggaacattttaacaagatctgcaccagagccggagatccgcaattttctaaccaaggcactgaattcatcaagaagtccaagtccaagcgacaggaactcgcagacttgatgagtcccaattcattggcaccgacgccgtcatctgaccaaagttgctggagatcctgtacagtaaaatttctggcgctgagcgttcaatggtatctattttgggtacatggtggcgcggtccttgaaattaacatcagcaatgtaacaaaattttctaagatctagttgaggataaggataaggagaacatatctcgtactcatgcatcgaccagcttacactgggataggctatagttggatggtcctggccgtaattcgtcggtctcagctttgattgagtttagtgttgtttccactttccagttcacagttcagtgtatgcccgcatctgtttatttaaagtattaagcgtgaacaagttagacattaggacatgtacaatgatatcttgaggtgtctaaagggtttgcaaaaaaaattatggagccgtctctccgtgaagagacgccttctctgactcgtaacctaagtagcaatagatgcctcatttcttattgtacgaattcgtcgtatgttttttcattcggcgctgtataagtgtatttacttttgtatttattaatagactatatttataaacactattatataatagagtcttttagttgtctcttgtgttgtttaaag

SEQ ID NO: 62935 - DNA, 2033 bp, Zea Mays
gaatactctgatgtcaactcgacttctccaagagcactttctcacactgttgagatgttggtgtcattggaaatttggttcattcatcacctaacatcaagaaggaggttcttaatgcaggggcactgcaacctgtgattggattattaaggtccatattgtgcaaaggggtgcagtccgtccactaattgaaatgctacagtcggctgatgtccaactccgggagatgtctgcttttgcactcggcaggcttgcccaggacacacataaccaagcaggtattgcatataatggtggcttggtgcctttgtttaaactccttgactcaaaaaatggatctctgcaacataatgctgcatttgccctttatggagttgcagataatgaggactatgtatctgacttcattaaagtaggaggtgtccaaaagttgcaagatggggaatttattgtgcaggcaacaaaggactgtgtggcaaaaacattgaaaaggttagaggagaagataaatggacgagtgttgaaacacttgctttatttgatgcgagtaggagagcaatctgtgcaaaggcgtgttgctctggctctcgcacacctttgtgctcctgaagatcaaagggcaatttttattgataataatggtctcgacttgcttcttgatcttctgatttccatgagcccaaaacatcaacaagatggctcagcagcattatacaaattggccaacaaagctgcagcactttctcccatggatgctgcccctccatctccaacacctcaggtttatcttggtgagcaatacgtgaatagttcaacactttcagatgttactttcttggtagaaggttggtactatttcacgaccctgatttcatcagtagatactttaaataattcttttctatcatgtcctagataatcttaatcccttctacaggaaagcgcttttatgcacacagaattgctttgcttgcttcttcggatgcatttcgtgcaatgtttgatggcgggtatagggaaaaggatgcaagagacattgaaattccaaatatcagatgggaggtctttgaactcatgatgagatttatctatacagggtcagtgcagattaacagtgaaatttcacaggatcttcttagagctgctgatcagtatctcttagaaggactcaaacgcttatgtgaatatactattgcgaaggatgtgaatctagataatgtatctgacatgtatgacttgtccgaagcctttcatgccgtgtcactgagacatacatgcatcttgtacattctggaacattttaacaagatctgcaccagagccggagatccgcaattttctaaccaaggcactgaattcatcaagaagtccaagtccaagcgacaggaactcgcagacttgatgagtcccaattcattggcaccgacgccgtcatctgaccaaagttgctggagatcctgtacagtaaaatttctggcgctgagcgttcaatggtatctattttgggtacatggtggcgcggtccttgaaattaacatcagcaatgtaacaaaattttctaagatctagttgaggataaggataaggagaacatatctcgtactcatgcatcgaccagcttacactgggataggctatagttggatggtcctggccgtaattcgtcggtctcagctttgattgagtttagtgttgtttccactttccagttcacagttcagtgtatgcccgcatctgtttatttaaagtattaagcgtgaacaagttagacattaggacatgtacaatgatatcttgaggtgtctaaagggtttgcaaaaaaaattatggagccgtctctccgtgaagagacgccttctctgactcgtaacctaagtagcaatagatgcctcatttcttattgtacgaattcgtcgtatgttttttcattcggcgctgtataagtgtatttacttttgtatttattaatagactatatttataaacactattatataatagagtcttttagttgtctcttgtgttgtttaaag

SEQ ID NO: 62936 - DNA, 2002 bp, Zea Mays
aggcactgaatactctgatgtcaactcgacttctccaagagcactttctcacactgttgagatgttggtgtcattggaaatttggttcattcatcacctaacatcaagaaggaggttcttaatgcaggggcactgcaacctgtgattggattattaagctcatgttgtacagaaagccaaagagaggctgctttgttgctagggcaatttgcttcagccgactcagattgcaaggtccatattgtgcaaaggggtgcagtccgtccactaattgaaatgctacagtcggctgatgtccaactccgggagatgtctgcttttgcactcggcaggcttgcccaggacacacataaccaagcaggtattgcatataatggtggcttggtgcctttgtttaaactccttgactcaaaaaatggatctctgcaacataatgctgcatttgccctttatggagttgcagataatgaggactatgtatctgacttcattaaagtaggaggtgtccaaaagttgcaagatggggaatttattgtgcaggcaacaaaggactgtgtggcaaaaacattgaaaaggttagaggagaagataaatggacgagtgttgaaacacttgctttatttgatgcgagtaggagagcaatctgtgcaaaggcgtgttgctctggctctcgcacacctttgtgctcctgaagatcaaagggcaatttttattgataataatggtctcgacttgcttcttgatcttctgatttccatgagcccaaaacatcaacaagatggctcagcagcattatacaaattggccaacaaagctgcagcactttctcccatggatgctgcccctccatctccaacacctcaggtttatcttggtgagcaatacgtgaatagttcaacactttcagatgttactttcttggtagaagaattgctttgcttgcttcttcggatgcatttcgtgcaatgtttgatggcgggtatagggaaaaggatgcaagagacattgaaattccaaatatcagatgggaggtctttgaactcatgatgagatttatctatacagggtcagtgcagattaacagtgaaatttcacaggatcttcttagagctgctgatcagtatctcttagaaggactcaaacgcttatgtgaatatactattgcgaaggatgtgaatctagataatgtatctgacatgtatgacttgtccgaagcctttcatgccgtgtcactgagacatacatgcatcttgtacattctggaacattttaacaagatctgcaccagagccggagatccgcaattttctaaccaaggcactgaattcatcaagaagtccaagtccaagcgacaggaactcgcagacttgatgagtcccaattcattggcaccgacgccgtcatctgaccaaagttgctggagatcctgtacagtaaaatttctggcgctgagcgttcaatggtatctattttgggtacatggtggcgcggtccttgaaattaacatcagcaatgtaacaaaattttctaagatctagttgaggataaggataaggagaacatatctcgtactcatgcatcgaccagcttacactgggataggctatagttggatggtcctggccgtaattcgtcggtctcagctttgattgagtttagtgttgtttccactttccagttcacagttcagtgtatgcccgcatctgtttatttaaagtattaagcgtgaacaagttagacattaggacatgtacaatgatatcttgaggtgtctaaagggtttgcaaaaaaaattatggagccgtctctccgtgaagagacgccttctctgactcgtaacctaagtagcaatagatgcctcatttcttattgtacgaattcgtcgtatgttttttcattcggcgctgtataagtgtatttacttttgtatttattaatagactatatttataaacactattatataatagagtcttttagttgtctcttgtgttgtttaaag

SEQ ID NO: 62937 - DNA, 2049 bp, Zea Mays
gtgctattctccagttttgattatgaggcactgaatactctgatgtcaactcgacttctccaagagcactttctcacactgttgagatgttggtgtcattggaaatttggttcattcatcacctaacatcaagaaggaggttcttaatgcaggggcactgcaacctgtgattggattattaagctcatgttgtacagaaagccaaagagaggctgctttgttgctagggcaatttgcttcagccgactcagattgcaaggtccatattgtgcaaaggggtgcagtccgtccactaattgaaatgctacagtcggctgatgtccaactccgggagatgtctgcttttgcactcggcaggcttgcccaggacacacataaccaagcaggtattgcatataatggtggcttggtgcctttgtttaaactccttgactcaaaaaatggatctctgcaacataatgctgcatttgccctttatggagttgcagataatgaggactatgtatctgacttcattaaagtaggaggtgtccaaaagttgcaagatggggaatttattgtgcaggcaacaaaggactgtgtggcaaaaacattgaaaaggttagaggagaagataaatggacgagtgttgaaacacttgctttatttgatgcgagtaggagagcaatctgtgcaaaggcgtgttgctctggctctcgcacacctttgtgctcctgaagatcaaagggcaatttttattgataataatggtctcgacttgcttcttgatcttctgatttccatgagcccaaaacatcaacaagatggctcagcagcattatacaaattggccaacaaagctgcagcactttctcccatggatgctgcccctccatctccaacacctcaggtttatcttggtgagcaatacgtgaatagttcaacactttcagatgttactttcttggtagaaggaaagcgcttttatgcacacagaattgctttgcttgcttcttcggatgcatttcgtgcaatgtttgatggcgggtatagggaaaaggatgcaagagacattgaaattccaaatatcagatgggaggtctttgaactcatgatgagatttatctatacagggtcagtgcagattaacagtgaaatttcacaggatcttcttagagctgctgatcagtatctcttagaaggactcaaacgcttatgtgaatatactattgcgaaggatgtgaatctagataatgtatctgacatgtatgacttgtccgaagcctttcatgccgtgtcactgagacatacatgcatcttgtacattctggaacattttaacaagatctgcaccagagccggagatccgcaattttctaaccaaggcactgaattcatcaagaagtccaagtccaagcgacaggaactcgcagacttgatgagtcccaattcattggcaccgacgccgtcatctgaccaaagttgctggagatcctgtacagtaaaatttctggcgctgagcgttcaatggtatctattttgggtacatggtggcgcggtccttgaaattaacatcagcaatgtaacaaaattttctaagatctagttgaggataaggataaggagaacatatctcgtactcatgcatcgaccagcttacactgggataggctatagttggatggtcctggccgtaattcgtcggtctcagctttgattgagtttagtgttgtttccactttccagttcacagttcagtgtatgcccgcatctgtttatttaaagtattaagcgtgaacaagttagacattaggacatgtacaatgatatcttgaggtgtctaaagggtttgcaaaaaaaattatggagccgtctctccgtgaagagacgccttctctgactcgtaacctaagtagcaatagatgcctcatttcttattgtacgaattcgtcgtatgttttttcattcggcgctgtataagtgtatttacttttgtatttattaatagactatatttataaacactattatataatagagtcttttagttgtctcttgtgttgtttaaag

SEQ ID NO: 62938 - DNA, 2925 bp, Zea Mays
ctaccgcgccggaatcatactccttgcgccttctccttcctcaatccgacacgctctccgcgccgccgtcgacctatcgaatggaggcggagcagcaaaagcagcagcgcccgcgccagcgcccgcgccgcaaggggcagaagcggaagttggaggacgaggcatccgccgccaccgccgccgccgcgtcctcgctcggcagtgcgggcgccgacgatgacaacgaggaggaggacggctcggcgggcacccccgagatctgccgccactcccacgcggcgcttgcgcgcgaggtccgcgcgcaggttgatgtcctcattcgctgcgcctcttcgtggcgccacgcagaccgcgccgccgccaagcgcgccacccacgtcctcgctgagctcgccaaaaacgaggaggttgtcaacatgattgtagagggtggcgccgtggcggccttggtgtgccacctagaagagcctgctgtggcggcgcaaacgcaggaggaacaacaactgcggccgtttgagcttgaggttgagaagggcgctgccttcactctgggcctcctagctcctgaacatcaacaatttatagttgatgctggtgcactacctcccctagtgaaacttttgaaaaggcagagaagtactacaaattcaaggatggttaatagcgttatcaagagagcagctgatgcaattaccaaccttgcacatgagaatagcaacatcaaaactagagtcagaatggaaggtggaatcccaccacttgttgaattgctagaatctcaggatcttaaggtgcagagggcagctgcaggggccttgcggactttagcctttaaaaatgatgaaaataaaactcagattgttcaatgcaatgctttgccaactttgatcttaatgctgcgatctgaagatgccgcaattcactatgaagcagttggtgtcattggaaatttggttcattcatcacctaacatcaagaaggaggttcttaatgcaggggcactgcaacctgtgattggattattaagctcatgttgtacagaaagccaaagagaggctgctttgttgctagggcaatttgcttcagccgactcagattgcaaggtccatattgtgcaaaggggtgcagtccgtccactaattgaaatgctacagtcggctgatgtccaactccgggagatgtctgcttttgcactcggcaggcttgcccaggacacacataaccaagcaggtattgcatataatggtggcttggtgcctttgtttaaactccttgactcaaaaaatggatctctgcaacataatgctgcatttgccctttatggagttgcagataatgaggactatgtatctgacttcattaaagtaggaggtgtccaaaagttgcaagatggggaatttattgtgcaggcaacaaaggactgtgtggcaaaaacattgaaaaggttagaggagaagataaatggacgagtgttgaaacacttgctttatttgatgcgagtaggagagcaatctgtgcaaaggcgtgttgctctggctctcgcacacctttgtgctcctgaagatcaaagggcaatttttattgataataatggtctcgacttgcttcttgatcttctgatttccatgagcccaaaacatcaacaagatggctcagcagcattatacaaattggccaacaaagctgcagcactttctcccatggatgctgcccctccatctccaacacctcaggtttatcttggtgagcaatacgtgaatagttcaacactttcagatgttactttcttggtagaaggaaagcgcttttatgcacacagaattgctttgcttgcttcttcggatgcatttcgtgcaatgtttgatggcgggtatagggaaaaggatgcaagagacattgaaattccaaatatcagatgggaggtctttgaactcatgatgagatttatctatacagggtcagtgcagattaacagtgaaatttcacaggatcttcttagagctgctgatcagtatctcttagaaggactcaaacgcttatgtgaatatactattgcgaaggatgtgaatctagataatgtatctgacatgtatgacttgtccgaagcctttcatgccgtgtcactgagacatacatgcatcttgtacattctggaacattttaacaagatctgcaccagagccggttctgcacagctgatccagcgtgttattccagagatccgcaattttctaaccaaggcactgaattcatcaagaagtccaagtccaagcgacaggaactcgcagacttgatgagtcccaattcattggcaccgacgccgtcatctgaccaaagttgctggagatcctgtacagtaaaatttctggcgctgagcgttcaatggtatctattttgggtacatggtggcgcggtccttgaaattaacatcagcaatgtaacaaaattttctaagatctagttgaggataaggataaggagaacatatctcgtactcatgcatcgaccagcttacactgggataggctatagttggatggtcctggccgtaattcgtcggtctcagctttgattgagtttagtgttgtttccactttccagttcacagttcagtgtatgcccgcatctgtttatttaaagtattaagcgtgaacaagttagacattaggacatgtacaatgatatcttgaggtgtctaaagggtttgcaaaaaaaattatggagccgtctctccgtgaagagacgccttctctgactcgtaacctaagtagcaatagatgcctcatttcttattgtacgaattcgtcgtatgttttttcattcggcgctgtataagtgtatttacttttgtatttattaatagactatatttataaacactattatataatagagtcttttagttgtctcttgtgttgtttaaag

SEQ ID NO: 62939 - DNA, 2919 bp, Zea Mays
cttttctgtcgaacccgaccctaccgcgccggaatcatactccttgcgccttctccttcctcaatccgacacgctctccgcgccgccgtcgacctatcgaatggaggcggagcagcaaaagcagcagcgcccgcgccagcgcccgcgccgcaaggggcagaagcggaagttggaggacgaggcatccgccgccaccgccgccgccgcgtcctcgctcggcagtgcgggcgccgacgatgacaacgaggaggaggacggctcggcgggcacccccgagatctgccgccactcccacgcggcgcttgcgcgcgaggtccgcgcgcaggttgatgtcctcattcgctgcgcctcttcgtggcgccacgcagaccgcgccgccgccaagcgcgccacccacgtcctcgctgagctcgccaaaaacgaggaggttgtcaacatgattgtagagggtggcgccgtggcggccttggtgtgccacctagaagagcctgctgtggcggcgcaaacgcaggaggaacaacaactgcggccgtttgagcttgaggttgagaagggcgctgccttcactctgggcctcctagctgtaaagcctgaacatcaacaatttatagttgatgctggtgcactacctcccctagtgaaacttttgaaaaggcagagaagtactacaaattcaaggatggttaatagcgttatcaagagagcagctgatgcaattaccaaccttgcacatgagaatagcaacatcaaaactagagtcagaatggaaggtggaatcccaccacttgttgaattgctagaatctcaggatcttaaggtgcagagggcagctgcaggggccttgcggactttagcctttaaaaatgatgaaaataaaactcagattgttcaatgcaatgctttgccaactttgatcttaatgctgcgatctgaagatgccgcaattcactatgaagcagttggtgtcattggaaatttggttcattcatcacctaacatcaagaaggaggttcttaatgcaggggcactgcaacctgtgattggattattaagctcatgttgtacagaaagccaaagagaggctgctttgttgctagggcaatttgcttcagccgactcagattgcaaggtccatattgtgcaaaggggtgcagtccgtccactaattgaaatgctacagtcggctgatgtccaactccgggagatgtctgcttttgcactcggcaggcttgcccaggacacacataaccaagcaggtattgcatataatggtggcttggtgcctttgtttaaactccttgactcaaaaaatggatctctgcaacataatgctgcatttgccctttatggagttgcagataatgaggactatgtatctgacttcattaaagtaggaggtgtccaaaagttgcaagatggggaatttattgtgcaggcaacaaaggactgtgtggcaaaaacattgaaaaggttagaggagaagataaatggacgagtgttgaaacacttgctttatttgatgcgagtaggagagcaatctgtgcaaaggcgtgttgctctggctctcgcacacctttgtgctcctgaagatcaaagggcaatttttattgataataatggtctcgacttgcttcttgatcttctgatttccatgagcccaaaacatcaacaagatggctcagcagcattatacaaattggccaacaaagctgcagcactttctcccatggatgctgcccctccatctccaacacctcaggtttatcttggtgagcaatacgtgaatagttcaacactttcagatgttactttcttggtagaaggaaagcgcttttatgcacacagaattgctttgcttgcttcttcggatgcatttcgtgcaatgtttgatggcgggtatagggaaaaggatgcaagagacattgaaattccaaatatcagatgggaggtctttgaactcatgatgagatttatctatacagggtcagtgcagattaacagtgaaatttcacaggatcttcttagagctgctgatcagtatctcttagaaggactcaaacgcttatgtgaatatactattgcgaaggatgtgaatctagataatgtatctgacatgtatgacttgtccgaagcctttcatgccgtgtcactgagacatacatgcatcttgtacattctggaacattttaacaagatctgcaccagagccggagatccgcaattttctaaccaaggcactgaattcatcaagaagtccaagtccaagcgacaggaactcgcagacttgatgagtcccaattcattggcaccgacgccgtcatctgaccaaagttgctggagatcctgtacagtaaaatttctggcgctgagcgttcaatggtatctattttgggtacatggtggcgcggtccttgaaattaacatcagcaatgtaacaaaattttctaagatctagttgaggataaggataaggagaacatatctcgtactcatgcatcgaccagcttacactgggataggctatagttggatggtcctggccgtaattcgtcggtctcagctttgattgagtttagtgttgtttccactttccagttcacagttcagtgtatgcccgcatctgtttatttaaagtattaagcgtgaacaagttagacattaggacatgtacaatgatatcttgaggtgtctaaagggtttgcaaaaaaaattatggagccgtctctccgtgaagagacgccttctctgactcgtaacctaagtagcaatagatgcctcatttcttattgtacgaattcgtcgtatgttttttcattcggcgctgtataagtgtatttacttttgtatttattaatagactatatttataaacactattatataatagagtcttttagttgtctcttgtgttgtttaaag

SEQ ID NO: 62940 - DNA, 1338 bp, Zea Mays
cgaatagccgcttgtcgactatcgtcgtcccgactgccgtcgcccttcggccatcgcctagggcccaggcacccagctgcgagccactggccgcccggcgcggcgatgccccgttccggggccccgccgatcgccgtgggcccttggcggcttggcgccctctgctgctccatcgtgtggcttgtgcagcactgtagtagagccacgctggcggttgccgccgtgcagttagcgcctgtcgcggtgtcaccccgtccgccatcaaggtcgaggctcatcccaggaggcagccgtccgccgatttgtgaagttgaagttgagatttgaaaatgaagaggaagatcaatgctaccactgatttgagagcttttttagcaagagctgctgcaaaaaagaaagatagtgctgctccatcttctaatgaaagagagatgcaattggtgatattccaaggacagactgaaactaataatgcaacgcccgcagaacgagagagttgagcctgaacctccaataatagaagatgttgaagacaatgatgattttgaatcagtgcacttgaatgggacaacatcgagtgaggataatgatagtgatgataatgatatttatggcattgagcatgatcctggattcaggactccattctcaagctattttattaataaccaagatgcggttagaagggcttatattgcattggggccatgtcaaccaaatataaagaaggatgattttccccaacatgaatgtggaggcataagtcgcttcctaccaaagtggttttccgagtttaattggcttgagtatagtatggataaagatgttgtattgttttgtttgctatctgttcaaagataacaacaaattctctggtggagatgctttcgttaatgaaggtttagaaattggaatgttaaagctagattgcttaagcatgttggtgttgttgatagtgctcattgtgaagctgaggagaaatataatttatttttgacacctaaagcatcaatttgtgagtcagttgcctcaaatacttcattgtataaggatcaatacctagctcgtttgacaggcaattcttcttgcaagtcaaggatgaggacattatcactcaatttcaaagcttaaaggatcgaaaggttgtcttgcaatatatctaccaaatcccacgaagatgccgcgacgaacaacaaccacgctaattgcaggaactggaccacacacaccaagcgcagttcctcaacggatgttggaacagagcatacaaccaccagggagacaaggaccatttgcgaggtcgcaatgatgcgtcaatctccgctgcctaaccaccgc

SEQ ID NO: 62941 - DNA, 1069 bp, Zea Mays
atgccccgttccggggccccgccgatcgccgtgggcccttggcggcttggcgccctctgctgctccatcgtgtggcttgtgcagcactgtagtagagccacgctggcggttgccgccgtgcagttagcgcctgtcgcggtgtcaccccgtccgccatcaaggtcgaggctcatcccaggaggcagccgtccgccgatttgtgaagttgaagttgaggtcctgatttgaaaatgaagaggaagatcaatgctaccactgatttgagagcttttttagcaagagctgctgcaaaaaagaaagatagtgctgctccatcttctaatgaaagagagatgcaattggtgatattccaaggacagactgaaactaataatgcaacgcccgcagaacgagagagttgagcctgaacctccaataatagaagatgttgaagacaatgatgattttgaatcagtgcacttgaatgggacaacatcgagtgaggataatgatagtgatgataatgatatttatggcattgagcatgatcctggattcaggactccattctcaagctattttattaataaccaagatgcggttagaagggcttatattgcattggggccatgtcaaccaaatataaagaaggatgattttccccaacatgaatgtggaggcataagtcgcttcctaccaaagtggttttccgagtttaattggcttgagtatagtatggataaagatgttgtattgttttgtttgctatctgttcaaagataacaacaaattctctggtggagatgctttcgttaatgaaggtttagaaattggaatgttaaagctagattgcttaagcatgttggtgttgttgatagtgctcattgtgaagctgaggagaaatataatttatttttgacacctaaagcatcaatttgtgagtcagttgcctcaaatacttcattgtataaggatcaatacctagctcgtttgacaggcaattcttcttgcaagtcaaggatgaggacattatcactcaatttcaaagcttaaaggatcgaaaggttgtcttgcaatatgtaagcttcct

SEQ ID NO: 62942 - DNA, 670 bp, Zea Mays
cgaatagccgcttgtcgactatcgtcgtcccgactgccgtcgcccttcggccatcgcctagggcccaggcacccagctgcgagccactggccgcccggcgcggcgatgccccgttccggggccccgccgatcgccgtgggcccttggcggcttggcgccctctgctgctccatcgtgtggcttgtgcagcactgtagtagagccacgctggcggttgccgccgtgcagttagcgcctgtcgcggtgtcaccccgtccgccatcaaggtcgaggctcatcccaggaggcagccgtccgccgatttgtgaagttgaagttgagatttgaaaatgaagaggaagatcaatgctaccactgatttgagagcttttttagcaagagctgctgcaaaaaagaaagatagtgctgctccatcttctaatgaaagagagatgcaattggtgatattccaaggacagactgaaactaataatgcaacgcccgcagaacgagagagttgagcctgaacctccaataatagaagatgttgaagacaatgatgattttgaatcagtgcacttgaatgggacaacatcgagcaattcttcttgcaagtcaaggatgaggacattatcactcaatttcaaagcttaaaggatcgaaaggttgtcttgcaatatgtaagcttcct

SEQ ID NO: 62943 - DNA, 2969 bp, Zea Mays
gtcgagtattcagccgatagcgcggccgtcagtgtagatcatactgatcaaggatctcaaggggaacacagcctaccagagagctatcccatctgctctgaccacgaggagtgcattgcccgtcctgagaggatcaagatccagaaaggtttcgtggccaaggaatccgtgaaggggcacatggcgagttccaactttacaccactcggcaatctttctgtacagaaggactaggagatgctgttaatgtcgtgaaaggcttgaagatatatgaagatgcgtttacgacatcagagatcatgaaagttgcagatttcatcaacgaaattcgtcaggctggcagaaatggagaactttcaggtcgtgccaagccatggtaacgtccgtccaaagtcgtgcacaacaaaatgttgatccaataagctacctgaacttggaaaccacgacttcttttcttagctctggtgagactttcatattcttcaacaagcagatcaaaggaaacaagagggagatcatacagcttggtgtaccgttatttcaacctaccacagaggatgctaattgtcacacagaaccaatcccccttgtcctgcaggctgtcattgaccaccttgttctttggcgtttaataccagaaagcaggaaaccaaatagtgtcgtcatcaacttcttcgatgaggatgaacattcgcagccctacttcaagcctccccatcttgacaaccccatttgcactcttctgctgtctgaaaccacgatggcatttggcaggtcacttgtcactgacagcaacgtgccgacatggcgcgacatgtggtgtgcccgtcgtccaaccggcgcgtgagcatcacgttcgcaagggtgaggccatcgacgccggtggacatgagcccactcccgtcccccaccaaggccatgacaccctggcagccgcagccggtcacggcctcccaggtgccgtcgcccgtgagcatgacgcagaagcccccggtcagcggtgccataatcggttatgccccgaccccgcaggccgtgctggcgcccgcagcctggggcatggccatgcgcgcgcccgtcatgatggtggctgcagcgcctgcgaggcccatggtgatggcctcatcgggcaccggcggcggcaacatcagcaagcggatgggccgcagcggcaccggcgtgttcctgccttggacggtcggcccgaagcggtacaacaagcaccttccaccgcgcatccagaagcgccggttctcggcgatgatgtcgcccatcgaggcgcagggctgaggacccgcccgacgtcatgtcgccgtcaaaccgaacggccaagatcaagtaggacccggtgcaacgagccaccgtttaattcctagggttcttggagtgttttttttttctctctcgtcgtcgagtcaaaaaaagaaaaaagaaaagaaatggtcaaaacgcgcggacagtgagtttggacgtctgtgtatttcggtgacctgtgtttttttttttctctggagggcttttggtccgcatgtaatttagccgggtttgtgacttgtgactttgtgagtgagtagcggagtttagaagcggtagaagaatatgggtctagggataggtgaagtcagaatcaggacaaggtttttcgtttgttttcatccttcttttttcagttttttaagatgatgcttttagttttgctatatcctcgtcttttccttttttttttcgtaccctatttttccgtaccgagaagaatgttgacatgcatatatgcatttcatgctgagtttgaagttctataagcaaaagatgcatcttgtgttgcccacttactggacgtcaatctttttgcttatatctttaatcttgaggtcttgtttggttatttcgaattgaaagaaaaatgatctcaatattttttaaatcgattttggtgtttgacgtccattataaatcacatggactaactaatttggctaattgctatttttctcatgtgcataaagttcaacataaacataaataaaaagagttgaatgaattctataaagtttggagcataaaagaatgggtgcagccagtgtcgcaccggacaaatgtgcactggacactattcggtgccccaggctgtagccctcgctaggttttctcatagcctctccactaaaactcatcggactgtctggtgagccaacggagcaatggtcaactttgccaacgatcgactgcgctgatgaaggaacagtgcagaagtcagaaatcagaactgccaagtcagaacgcaccgaactgtccggtgccgcaagaggacaaaggacttcaacagtcaacagctccaaactccaacgattgggtgacgtggcacacaccggacagtaaatagtgccatgtccggtgtaccaccggacagtccggtgtgcccatcaacagcaaagtcagccaacggctacgaagtggttggaggctataaatacttccaaccacctccattcaagtcatccaagccccatacacttctcattcaatacaagagcaaaagcgtacactccaatacacaatcaaaagatcaaatcctctctaaacttcaaaatcaactcaagtgcttagtaacttaagagagggtgttttgtatttcttttgttgcttggattgctctcttcttctcactctaaggactaatttggtgaccagggatcacggggggattggaggggattgaggagaaaattagtttatttccccctcaatcccctccaatcccccgtgatccccttgtcaccaaattaagcctaattctttctatgtgctttgtaaaactagcaagagacacctaattgtgtgatgatccttgcggggtcttagtgacccgtgttgattaagaagaagcactcaaccagtctaagtgatcgattgagagagggaaatggttggaataggccccgcctttgtggcctcctcaacagggaata

SEQ ID NO: 62944 - DNA, 3449 bp, Zea Mays
cgacccgcatcgtcttcctctgttttgccagggccaaccaagccaacgggtcgagttgaaccaacgccattacgagagaagaggggttggggaggtagacgagtggcgtagggaactcggtcgtggggcggtagagtgagcgagtgagagagaggcagggctgtcacgagcgtgggcaggcgatcgcgggagcgatgacgacggcggccggcatgccggggttgccggtgggctcggccgccgcggctggggttcccgcggcgcccgaggtggcggccagggacgcggtgatcggctggttccgcggcgagttcgcggccgcgaacgccatgattgacgcgctgtgcggccacctggcgcagatcggcggcggcgggcccgagtacgatcccgtcttcgccgcgatccaccgccgccgcgccaactggttccccgtcctccacatgcagaagttctaccccgtcgcggacgtcgccgccgagctgcgccgagttgcggacgcccgcgccgccgcagggtcctgctgctactccgaggaggccgcgtccacggtgatccacgagcccatggaagaggctgaggctgaggctgaggctgagcccgaacccgagcaggagcacgagcaggatccggcaccggcggccgagctggctgacggcgccgtggagtaccacgagccggacgtggaagttgattcatcgggagattcgtcggagcggaagcccccctccaccgaagatgacaccgtcgcagacggacgttaatgtcgtgaaaggcttgaagatatatgaagatgcgtttacgacatcagagatcatgaaagttgcagatttcatcaacgaaattcgtcaggctggcagaaatggagaactttcaggtgagactttcatattcttcaacaagcagatcaaaggaaacaagagggagatcatacagcttggtgtaccgttatttcaacctaccacagaggatgctaattgtcacacagaaccaatcccccttgtcctgcaggctgtcattgaccaccttgttctttggcgtttaataccagaaagcaggaaaccaaatagtgtcgtcatcaacttcttcgatgaggatgaacattcgcagccctacttcaagcctccccatcttgacaaccccatttgcactcttctgctgtctgaaaccacgatggcatttggcaggtcacttgtcactgacagcaacggtaactacaaaggacctctcacactttcactaaagcaagggtccttactagtgatgcgtgggaacagtgccgacatggcgcgacatgtggtgtgcccgtcgtccaaccggcgcgtgagcatcacgttcgcaagggtgaggccatcgacgccggtggacatgagcccactcccgtcccccaccaaggccatgacaccctggcagccgcagccggtcacggcctcccaggtgccgtcgcccgtgagcatgacgcagaagcccccggtcagcggtgccataatcggttatgccccgaccccgcaggccgtgctggcgcccgcagcctggggcatggccatgcgcgcgcccgtcatgatggtggctgcagcgcctgcgaggcccatggtgatggcctcatcgggcaccggcggcggcaacatcagcaagcggatgggccgcagcggcaccggcgtgttcctgccttggacggtcggcccgaagcggtacaacaagcaccttccaccgcgcatccagaagcgccggttctcggcgatgatgtcgcccatcgaggcgcagggctgaggacccgcccgacgtcatgtcgccgtcaaaccgaacggccaagatcaagtaggacccggtgcaacgagccaccgtttaattcctagggttcttggagtgttttttttttctctctcgtcgtcgagtcaaaaaaagaaaaaagaaaagaaatggtcaaaacgcgcggacagtgagtttggacgtctgtgtatttcggtgacctgtgtttttttttttctctggagggcttttggtccgcatgtaatttagccgggtttgtgacttgtgactttgtgagtgagtagcggagtttagaagcggtagaagaatatgggtctagggataggtgaagtcagaatcaggacaaggtttttcgtttgttttcatccttcttttttcagttttttaagatgatgcttttagttttgctatatcctcgtcttttccttttttttttcgtaccctatttttccgtaccgagaagaatgttgacatgcatatatgcatttcatgctgagtttgaagttctataagcaaaagatgcatcttgtgttgcccacttactggacgtcaatctttttgcttatatctttaatcttgaggtcttgtttggttatttcgaattgaaagaaaaatgatctcaatattttttaaatcgattttggtgtttgacgtccattataaatcacatggactaactaatttggctaattgctatttttctcatgtgcataaagttcaacataaacataaataaaaagagttgaatgaattctataaagtttggagcataaaagaatgggtgcagccagtgtcgcaccggacaaatgtgcactggacactattcggtgccccaggctgtagccctcgctaggttttctcatagcctctccactaaaactcatcggactgtctggtgagccaacggagcaatggtcaactttgccaacgatcgactgcgctgatgaaggaacagtgcagaagtcagaaatcagaactgccaagtcagaacgcaccgaactgtccggtgccgcaagaggacaaaggacttcaacagtcaacagctccaaactccaacgattgggtgacgtggcacacaccggacagtaaatagtgccatgtccggtgtaccaccggacagtccggtgtgcccatcaacagcaaagtcagccaacggctacgaagtggttggaggctataaatacttccaaccacctccattcaagtcatccaagccccatacacttctcattcaatacaagagcaaaagcgtacactccaatacacaatcaaaagatcaaatcctctctaaacttcaaaatcaactcaagtgcttagtaacttaagagagggtgttttgtatttcttttgttgcttggattgctctcttcttctcactctaaggactaatttggtgaccagggatcacggggggattggaggggattgaggagaaaattagtttatttccccctcaatcccctccaatcccccgtgatccccttgtcaccaaattaagcctaattctttctatgtgctttgtaaaactagcaagagacacctaattgtgtgatgatccttgcggggtcttagtgacccgtgttgattaagaagaagcactcaaccagtctaagtgatcgattgagagagggaaatggttggaataggccccgcctttgtggcctcctcaacagggaata

SEQ ID NO: 62945 - DNA, 3656 bp, Zea Mays
cgacccgcatcgtcttcctctgttttgccagggccaaccaagccaacgggtcgagttgaaccaacgccattacgagagaagaggggttggggaggtagacgagtggcgtagggaactcggtcgtggggcggtagagtgagcgagtgagagagaggcagggctgtcacgagcgtgggcaggcgatcgcgggagcgatgacgacggcggccggcatgccggggttgccggtgggctcggccgccgcggctggggttcccgcggcgcccgaggtggcggccagggacgcggtgatcggctggttccgcggcgagttcgcggccgcgaacgccatgattgacgcgctgtgcggccacctggcgcagatcggcggcggcgggcccgagtacgatcccgtcttcgccgcgatccaccgccgccgcgccaactggttccccgtcctccacatgcagaagttctaccccgtcgcggacgtcgccgccgagctgcgccgagttgcggacgcccgcgccgccgcagggtcctgctgctactccgaggaggccgcgtccacggtgatccacgagcccatggaagaggctgaggctgaggctgaggctgagcccgaacccgagcaggagcacgagcaggatccggcaccggcggccgagctggctgacggcgccgtggagtaccacgagccggacgtggaagttgattcatcgggagattcgtcggagcggaagcccccctccaccgaagatgacaccgtcgcagacggacatcatactgatcaaggatctcaaggggaacacagcctaccagagagctatcccatctgctctgaccacgaggagtgcattgcccgtcctgagaggatcaagatccagaaaggtttcgtggccaaggaatccgtgaaggggcacatggcgagttccaactttacaccactcggcaatctttctgtacagaaggactaggagatgctgtaggaagtagtagcacttctattcatcttaaatttcatttcatctgaatagactcttttcttactgatgttcatgaccattttctacaaccaggttaatgtcgtgaaaggcttgaagatatatgaagatgcgtttacgacatcagagatcatgaaagttgcagatttcatcaacgaaattcgtcaggctggcagaaatggagaactttcaggtgagactttcatattcttcaacaagcagatcaaaggaaacaagagggagatcatacagcttggtgtaccgttatttcaacctaccacagaggatgctaattgtcacacagaaccaatcccccttgtcctgcaggctgtcattgaccaccttgttctttggcgtttaataccagaaagcaggaaaccaaatagtgtcgtcatcaacttcttcgatgaggtcacttgtcactgacagcaacggtaactacaaaggacctctcacactttcactaaagcaagggtccttactagtgatgcgtgggaacagtgccgacatggcgcgacatgtggtgtgcccgtcgtccaaccggcgcgtgagcatcacgttcgcaagggtgaggccatcgacgccggtggacatgagcccactcccgtcccccaccaaggccatgacaccctggcagccgcagccggtcacggcctcccaggtgccgtcgcccgtgagcatgacgcagaagcccccggtcagcggtgccataatcggttatgccccgaccccgcaggccgtgctggcgcccgcagcctggggcatggccatgcgcgcgcccgtcatgatggtggctgcagcgcctgcgaggcccatggtgatggcctcatcgggcaccggcggcggcaacatcagcaagcggatgggccgcagcggcaccggcgtgttcctgccttggacggtcggcccgaagcggtacaacaagcaccttccaccgcgcatccagaagcgccggttctcggcgatgatgtcgcccatcgaggcgcagggctgaggacccgcccgacgtcatgtcgccgtcaaaccgaacggccaagatcaagtaggacccggtgcaacgagccaccgtttaattcctagggttcttggagtgttttttttttctctctcgtcgtcgagtcaaaaaaagaaaaaagaaaagaaatggtcaaaacgcgcggacagtgagtttggacgtctgtgtatttcggtgacctgtgtttttttttttctctggagggcttttggtccgcatgtaatttagccgggtttgtgacttgtgactttgtgagtgagtagcggagtttagaagcggtagaagaatatgggtctagggataggtgaagtcagaatcaggacaaggtttttcgtttgttttcatccttcttttttcagttttttaagatgatgcttttagttttgctatatcctcgtcttttccttttttttttcgtaccctatttttccgtaccgagaagaatgttgacatgcatatatgcatttcatgctgagtttgaagttctataagcaaaagatgcatcttgtgttgcccacttactggacgtcaatctttttgcttatatctttaatcttgaggtcttgtttggttatttcgaattgaaagaaaaatgatctcaatattttttaaatcgattttggtgtttgacgtccattataaatcacatggactaactaatttggctaattgctatttttctcatgtgcataaagttcaacataaacataaataaaaagagttgaatgaattctataaagtttggagcataaaagaatgggtgcagccagtgtcgcaccggacaaatgtgcactggacactattcggtgccccaggctgtagccctcgctaggttttctcatagcctctccactaaaactcatcggactgtctggtgagccaacggagcaatggtcaactttgccaacgatcgactgcgctgatgaaggaacagtgcagaagtcagaaatcagaactgccaagtcagaacgcaccgaactgtccggtgccgcaagaggacaaaggacttcaacagtcaacagctccaaactccaacgattgggtgacgtggcacacaccggacagtaaatagtgccatgtccggtgtaccaccggacagtccggtgtgcccatcaacagcaaagtcagccaacggctacgaagtggttggaggctataaatacttccaaccacctccattcaagtcatccaagccccatacacttctcattcaatacaagagcaaaagcgtacactccaatacacaatcaaaagatcaaatcctctctaaacttcaaaatcaactcaagtgcttagtaacttaagagagggtgttttgtatttcttttgttgcttggattgctctcttcttctcactctaaggactaatttggtgaccagggatcacggggggattggaggggattgaggagaaaattagtttatttccccctcaatcccctccaatcccccgtgatccccttgtcaccaaattaagcctaattctttctatgtgctttgtaaaactagcaagagacacctaattgtgtgatgatccttgcggggtcttagtgacccgtgttgattaagaagaagcactcaaccagtctaagtgatcgattgagagagggaaatggttggaataggccccgcctttgtggcctcctcaacagggaata

SEQ ID NO: 62946 - DNA, 630 bp, Zea Mays
ctgccgatcagtccatgcatgcatgcgataaggaagcatcacatatatatatatgctgtattctctgcggtccagaccaactgaacatgtaccgggaccaggagccagtaggcagcagcagcagtacatcgagcaggtcggtcctgcccgctcaaaccgacacggggctagctctagtacatgagcgtgcgagtggtgtgataccgaaaaggacgccttttgccgaaaaggaacggctcagatttggtggtgtgtcgtcggcgttaatttactgcgaaatttaaacccccaagcgagttctcaatgcaaactgcggtccgcactgaggcacgttaattatagagcacgaacacaagttgatcatccataacccaaaaaaaagaaaaaaaaactccagtgctagctgctgcctacctgttcccccgatcagacgaggagggctcttcaatgcagcgaaagcgcgcgagctccaattcagtctcgctcgtttgcatgcgatcgagttgatgtggagtcgcgccaagctaggcgcctgctgtgccggttcagggactttttgctccttctatggcgtctttttgctcgaggagctttggcgtagcccgcttgtatttgtgtgcttgatcgaaa

SEQ ID NO: 62947 - DNA, 761 bp, Zea Mays
gggcaaattgcacaacaaaattgagtgatgatcccattgtatcattatcagcacaagcacccacacaatttcgttttcctgggtctgttcacgttgtgcttgagcttcagcatcggtgtggcttgtgctaacacccaagggaaaatcgttctggaggctttagtgctgacggctggcgtggtggtttctctgactgcgtatgctttctgggcgtcaaagaagggttttcttcccactgggacccgtgtcggtgggcttgttcggtgggctaggggctctggtcttctcaggcttcatcctgtacgacaccgagaacctgatcaagcgccacacctacgacgagtacatctgggcgtcggttgggctgtacctcgacatcctgaacctgttcctctccatcctgaacatgctcaggagcatgcaatccgacaactagcctcttgatcgaacacggtatacccccatggtaaatgcggtcctgtgctctggttgttagaggacgggatcgacgtgcgacatatgtattgtgtgagcccactcgtgtcaacactgcaaacaattgtggtcatgtcaccttgtatgttcttggtcacttttcaaacaattgtaagtacctcatatcgttttgcgctcgtgctattcgcgctaaaaatcacaatgatccagtaacaggttgtcatcacggttttctgcacatgattcattggagattggactatgtaaagttggttttcaaaaggaaaaggaaaactgtggagaag

SEQ ID NO: 62948 - DNA, 867 bp, Zea Mays
gtttagttaaacccgtggcacaacattaaaatgggcaaattgcacaacaaaattgagtgatgatcccattgtatcattatcagcacaagcacccacacaatttcgttttcctgggtctgttcacgttgtgcttgagcttcagcatcggtgtggcttgtgctaacacccaagggaaaatcgttctggaggctttagtgctgacggctggcgtggtggtttctctgactgcgtatgctttctgggcgtcaaagaagggcaaggaattcgggtacctggggcctatcctgtcttccgcgcttactatcctcgtcctaactagctttcttcaggttttcttcccactgggacccgtgtcggtgggcttgttcggtgggctaggggctctggtcttctcaggcttcatcctgtacgacaccgagaacctgatcaagcgccacacctacgacgagtacatctgggcgtcggttgggctgtacctcgacatcctgaacctgttcctctccatcctgaacatgctcaggagcatgcaatccgacaactagcctcttgatcgaacacggtatacccccatggtaaatgcggtcctgtgctctggttgttagaggacgggatcgacgtgcgacatatgtattgtgtgagcccactcgtgtcaacactgcaaacaattgtggtcatgtcaccttgtatgttcttggtcacttttcaaacaattgtaagtacctcatatcgttttgcgctcgtgctattcgcgctaaaaatcacaatgatccagtaacaggttgtcatcacggttttctgcacatgattcattggagattggactatgtaaagttggttttcaaaaggaaaaggaaaactgtggagaag

SEQ ID NO: 62949 - DNA, 866 bp, Zea Mays
gtcatcatcaattgattatggagatgtgttgctgaaactactcaaattgtcgataatgatgatcccattgtatcattatcagcacaagcacccacacaatttcgttttcctgggtctgttcacgttgtgcttgagcttcagcatcggtgtggcttgtgctaacacccaagggaaaatcgttctggaggctttagtgctgacggctggcgtggtggtttctctgactgcgtatgctttctgggcgtcaaagaagggcaaggaattcgggtacctggggcctatcctgtcttccgcgcttactatcctcgtcctaactagctttcttcaggttttcttcccactgggacccgtgtcggtgggcttgttcggtgggctaggggctctggtcttctcaggcttcatcctgtacgacaccgagaacctgatcaagcgccacacctacgacgagtacatctgggcgtcggttgggctgtacctcgacatcctgaacctgttcctctccatcctgaacatgctcaggagcatgcaatccgacaactagcctcttgatcgaacacggtatacccccatggtaaatgcggtcctgtgctctggttgttagaggacgggatcgacgtgcgacatatgtattgtgtgagcccactcgtgtcaacactgcaaacaattgtggtcatgtcaccttgtatgttcttggtcacttttcaaacaattgtaagtacctcatatcgttttgcgctcgtgctattcgcgctaaaaatcacaatgatccagtaacaggttgtcatcacggttttctgcacatgattcattggagattggactatgtaaagttggttttcaaaaggaaaaggaaaactgtggagaag

SEQ ID NO: 62950 - DNA, 1551 bp, Zea Mays
catttctattacttgtagtctctttctgttcttatatgagtggtaacttggttcatgctagtatgcttttcaggttttcatcaaggtagaaaaagaaacttttctgtccggtcatggctttcccaactgcagcagctgttttgcttaatgagaacatgcagattcataaaggaaacagggttgatgcaccaagtgccaaaccactgaaatcatcagccaaacctgagagaaaggctcttcaggatgtgtctaacattcctaaaggcactgctttaaagaacagatccacagtcaaagaggggtccgccttgaaagaaaggcctgcactccacaatgtgtctaacaacctcaaagagaggtccatcctgaaagagaggcctcctcttcaggatgtgtctaacacccgcaatgagaggtccatcctgaaagagaaatctgccctgtgtagccatgaagctattaagaacccagtgaatatttttgctgatgacgaagagaccaaagggtgccatgaatgggctaaggatgggatggagggcactcacttcactggaaatgattctcagaagttggataaagatgtgcaacacaaacgtatcaagaagaaagtggcaaaagttacgtcagcattgtatggctggtcacatgaggtatatggtcatgtgatgtttatggctatggttcccaagttttctgaagaatcgaaagagctggagctggaaccagagattcttccagacatcactaggtgtatgtctacctcaggcaagagggatgatgcaccaagcgccaaacggctgaagcctaagcttcaagaaccgaaggctcttcaggttcaggatttgtctaacactgtcaaagggagcccttctctgtgcagccatgaagctgtgaagaacccagtgaaaatattcactgttgaagagaccaaaaagtgtcatgaatcggctaatgatgtgtcggagggcactcacttcacaggaaatgatcgtcagaagctggataaggatgtgcaaggcaagcgtgacaaaacacagctggttgaagattctcctactgatgatgagcttgacgactacccatttttggacaacagtcctgttaagtttgagctgaaagatgagtcagtgattccagatattggagcaatctgaagtgatagtgtttgtgcgattgttctgtagcaatctatgtagtacgatgtttagtacatgttgtttgttctgtagcaaactatgtagtttgagctgaaagatgagtcagtgcctcatcgggtacttttgagtaccgtagcggttgtcaagtttcatgctctcctgaaacatccttcgcaactcgcaagtgaaactctggtttatgccctgaatcagctgctgaataagctaatgattgcatgagtatccgttgatgcatagtagtgaaaggaatggctaagagggagtgaattagtttttttttaattttgctcaaatctatgttttcagttttcagctaatgattgcatgagtatccgttgtacatgtgctctaattgttcacatgtacaactatg

SEQ ID NO: 62951 - DNA, 1545 bp, Zea Mays
catttctattacttgtagtctctttctgttcttatatgagtggtaacttggttcatgctagtatgcttttcaggttttcatcaaggtagaaaaagaaacttttctgtccggtcatggctttcccaactgcagcagctgttttgcttaatgagaacatgcagattcataaaggaaacagggttgatgcaccaagtgccaaaccactgaaatcatcagccaaacctgagagaaaggctcttcaggatgtgtctaacattcctaaaggcactgctttaaagaacagatccacagtcaaagaggggtccgccttgaaagaaaggcctgcactccacaatgtgtctaacaacctcaaagagaggtccatcctgaaagagaggcctcctcttcaggatgtgtctaacacccgcaatgagaggtccatcctgaaagagaaatctgccctgtgtagccatgaagctattaagaacccagtgaatatttttgctgatgacgaagagaccaaagggtgccatgaatgggctaaggatgggatggagggcactcacttcactggaaatgattctcagaagttggataaagatgtgcaacacaaacgtatcaagaagaaagtggcaaaagttacgtcagcattgtatggctggtcacatgaggtatatggtcatgtgatgtttatggctatggttcccaagttttctgaagaatcgaaagagctggagctggaaccagagattcttccagacatcactaggtgtatgtctacctcaggcaagagggatgatgcaccaagcgccaaacggctgaagcctaagcttcaagaaccgaaggctcttcaggttcaggatttgtctaacactgtcaaagggagcccttctctgtgcagccatgaagctgtgaagaacccagtgaaaatattcactgttgaagagaccaaaaagtgtcatgaatcggctaatgatgtgtcggagggcactcacttcacaggaaatgatcgtcagaagctggataaggatgtgcaaggtgacaaaacacagctggttgaagattctcctactgatgatgagcttgacgactacccatttttggacaacagtcctgttaagtttgagctgaaagatgagtcagtgattccagatattggagcaatctgaagtgatagtgtttgtgcgattgttctgtagcaatctatgtagtacgatgtttagtacatgttgtttgttctgtagcaaactatgtagtttgagctgaaagatgagtcagtgcctcatcgggtacttttgagtaccgtagcggttgtcaagtttcatgctctcctgaaacatccttcgcaactcgcaagtgaaactctggtttatgccctgaatcagctgctgaataagctaatgattgcatgagtatccgttgatgcatagtagtgaaaggaatggctaagagggagtgaattagtttttttttaattttgctcaaatctatgttttcagttttcagctaatgattgcatgagtatccgttgtacatgtgctctaattgttcacatgtacaactatg

SEQ ID NO: 62952 - DNA, 1762 bp, Zea Mays
aaaagccttgatgtgtccgtctccgtcatgaagacaaacattcaccgagccgaccgttgccttccccccaactcccagccccagcgtcaactgactacactcgctgactcgctcccccggttccccttctctgctcgccatcttttgctctccgcttggctcgtcaatcacctcctacgctccacacgccgccggcgactacaactgcttctgccgtggttacagagaagaagggtttggggagaagacaacctaaatcaattggatctgggagtatcagatctaaaaaggttttcatcaaggtagaaaaagaaacttttctgtccggtcatggctttcccaactgcagcagctgttttgcttaatgagaacatgcagattcataaaggaaacagggttgatgcaccaagtgccaaaccactgaaatcatcagccaaacctgagagaaaggctcttcaggatgtgtctaacattcctaaaggcactgctttaaagaacagatccacagtcaaagaggggtccgccttgaaagaaaggcctgcactccacaatgtgtctaacaacctcaaagagaggtccatcctgaaagagaggcctcctcttcaggatgtgtctaacacccgcaatgagaggtccatcctgaaagagaaatctgccctgtgtagccatgaagctattaagaacccagtgaatatttttgctgatgacgaagagaccaaagggtgccatgaatgggctaaggatgggatggagggcactcacttcactggaaatgattctcagaagttggataaagatgtgcaacacaaacgtatcaagaagaaagtggcaaaagttacgtcagcattgtatggctggtcacatgaggtatatggtcatgtgatgtttatggctatggttcccaagttttctgaagaatcgaaagagctggagctggaaccagagattcttccagacatcactaggtgtatgtctacctcaggcaagagggatgatgcaccaagcgccaaacggctgaagcctaagcttcaagaaccgaaggctcttcaggttcaggatttgtctaacactgtcaaagggagcccttctctgtgcagccatgaagctgtgaagaacccagtgaaaatattcactgttgaagagaccaaaaagtgtcatgaatcggctaatgatgtgtcggagggcactcacttcacaggaaatgatcgtcagaagctggataaggatgtgcaaggtgacaaaacacagctggttgaagattctcctactgatgatgagcttgacgactacccatttttggacaacagtcctgttaagtttgagctgaaagatgagtcagtgattccagatattggagcaatctgaagtgatagtgtttgtgcgattgttctgtagcaatctatgtagtacgatgtttagtacatgttgtttgttctgtagcaaactatgtagtttgagctgaaagatgagtcagtgcctcatcgggtacttttgagtaccgtagcggttgtcaagtttcatgctctcctgaaacatccttcgcaactcgcaagtgaaactctggtttatgccctgaatcagctgctgaataagctaatgattgcatgagtatccgttgatgcatagtagtgaaaggaatggctaagagggagtgaattagtttttttttaattttgctcaaatctatgttttcagttttcagctaatgattgcatgagtatccgttgtacatgtgctctaattgttcacatgtacaactatg

SEQ ID NO: 62953 - DNA, 1756 bp, Zea Mays
aaaagccttgatgtgtccgtctccgtcatgaagacaaacattcaccgagccgaccgttgccttccccccaactcccagccccagcgtcaactgactacactcgctgactcgctcccccggttccccttctctgctcgccatcttttgctctccgcttggctcgtcaatcacctcctacgctccacacgccgccggcgactacaactgcttctgccgtggagaagaagggtttggggagaagacaacctaaatcaattggatctgggagtatcagatctaaaaaggttttcatcaaggtagaaaaagaaacttttctgtccggtcatggctttcccaactgcagcagctgttttgcttaatgagaacatgcagattcataaaggaaacagggttgatgcaccaagtgccaaaccactgaaatcatcagccaaacctgagagaaaggctcttcaggatgtgtctaacattcctaaaggcactgctttaaagaacagatccacagtcaaagaggggtccgccttgaaagaaaggcctgcactccacaatgtgtctaacaacctcaaagagaggtccatcctgaaagagaggcctcctcttcaggatgtgtctaacacccgcaatgagaggtccatcctgaaagagaaatctgccctgtgtagccatgaagctattaagaacccagtgaatatttttgctgatgacgaagagaccaaagggtgccatgaatgggctaaggatgggatggagggcactcacttcactggaaatgattctcagaagttggataaagatgtgcaacacaaacgtatcaagaagaaagtggcaaaagttacgtcagcattgtatggctggtcacatgaggtatatggtcatgtgatgtttatggctatggttcccaagttttctgaagaatcgaaagagctggagctggaaccagagattcttccagacatcactaggtgtatgtctacctcaggcaagagggatgatgcaccaagcgccaaacggctgaagcctaagcttcaagaaccgaaggctcttcaggttcaggatttgtctaacactgtcaaagggagcccttctctgtgcagccatgaagctgtgaagaacccagtgaaaatattcactgttgaagagaccaaaaagtgtcatgaatcggctaatgatgtgtcggagggcactcacttcacaggaaatgatcgtcagaagctggataaggatgtgcaaggtgacaaaacacagctggttgaagattctcctactgatgatgagcttgacgactacccatttttggacaacagtcctgttaagtttgagctgaaagatgagtcagtgattccagatattggagcaatctgaagtgatagtgtttgtgcgattgttctgtagcaatctatgtagtacgatgtttagtacatgttgtttgttctgtagcaaactatgtagtttgagctgaaagatgagtcagtgcctcatcgggtacttttgagtaccgtagcggttgtcaagtttcatgctctcctgaaacatccttcgcaactcgcaagtgaaactctggtttatgccctgaatcagctgctgaataagctaatgattgcatgagtatccgttgatgcatagtagtgaaaggaatggctaagagggagtgaattagtttttttttaattttgctcaaatctatgttttcagttttcagctaatgattgcatgagtatccgttgtacatgtgctctaattgttcacatgtacaactatg

SEQ ID NO: 62954 - DNA, 1695 bp, Zea Mays
aaaagccttgatgtgtccgtctccgtcatgaagacaaacattcaccgagccgaccgttgccttccccccaactcccagccccagcgtcaactgactacactcgctgactcgctcccccggttccccttctctgctcgccatcttttgctctccgcttggctcgtcaatcacctcctacgctccacacgccgccggcgactacaactgcttctgccgtggtcaggttttcatcaaggtagaaaaagaaacttttctgtccggtcatggctttcccaactgcagcagctgttttgcttaatgagaacatgcagattcataaaggaaacagggttgatgcaccaagtgccaaaccactgaaatcatcagccaaacctgagagaaaggctcttcaggatgtgtctaacattcctaaaggcactgctttaaagaacagatccacagtcaaagaggggtccgccttgaaagaaaggcctgcactccacaatgtgtctaacaacctcaaagagaggtccatcctgaaagagaggcctcctcttcaggatgtgtctaacacccgcaatgagaggtccatcctgaaagagaaatctgccctgtgtagccatgaagctattaagaacccagtgaatatttttgctgatgacgaagagaccaaagggtgccatgaatgggctaaggatgggatggagggcactcacttcactggaaatgattctcagaagttggataaagatgtgcaacacaaacgtatcaagaagaaagtggcaaaagttacgtcagcattgtatggctggtcacatgaggtatatggtcatgtgatgtttatggctatggttcccaagttttctgaagaatcgaaagagctggagctggaaccagagattcttccagacatcactaggtgtatgtctacctcaggcaagagggatgatgcaccaagcgccaaacggctgaagcctaagcttcaagaaccgaaggctcttcaggttcaggatttgtctaacactgtcaaagggagcccttctctgtgcagccatgaagctgtgaagaacccagtgaaaatattcactgttgaagagaccaaaaagtgtcatgaatcggctaatgatgtgtcggagggcactcacttcacaggaaatgatcgtcagaagctggataaggatgtgcaaggtgacaaaacacagctggttgaagattctcctactgatgatgagcttgacgactacccatttttggacaacagtcctgttaagtttgagctgaaagatgagtcagtgattccagatattggagcaatctgaagtgatagtgtttgtgcgattgttctgtagcaatctatgtagtacgatgtttagtacatgttgtttgttctgtagcaaactatgtagtttgagctgaaagatgagtcagtgcctcatcgggtacttttgagtaccgtagcggttgtcaagtttcatgctctcctgaaacatccttcgcaactcgcaagtgaaactctggtttatgccctgaatcagctgctgaataagctaatgattgcatgagtatccgttgatgcatagtagtgaaaggaatggctaagagggagtgaattagtttttttttaattttgctcaaatctatgttttcagttttcagctaatgattgcatgagtatccgttgtacatgtgctctaattgttcacatgtacaactatg

SEQ ID NO: 62955 - DNA, 1691 bp, Zea Mays
aaaagccttgatgtgtccgtctccgtcatgaagacaaacattcaccgagccgaccgttgccttccccccaactcccagccccagcgtcaactgactacactcgctgactcgctcccccggttccccttctctgctcgccatcttttgctctccgcttggctcgtcaatcacctcctacgctccacacgccgccggcgactacaactgcttctgccgtgggttttcatcaaggtagaaaaagaaacttttctgtccggtcatggctttcccaactgcagcagctgttttgcttaatgagaacatgcagattcataaaggaaacagggttgatgcaccaagtgccaaaccactgaaatcatcagccaaacctgagagaaaggctcttcaggatgtgtctaacattcctaaaggcactgctttaaagaacagatccacagtcaaagaggggtccgccttgaaagaaaggcctgcactccacaatgtgtctaacaacctcaaagagaggtccatcctgaaagagaggcctcctcttcaggatgtgtctaacacccgcaatgagaggtccatcctgaaagagaaatctgccctgtgtagccatgaagctattaagaacccagtgaatatttttgctgatgacgaagagaccaaagggtgccatgaatgggctaaggatgggatggagggcactcacttcactggaaatgattctcagaagttggataaagatgtgcaacacaaacgtatcaagaagaaagtggcaaaagttacgtcagcattgtatggctggtcacatgaggtatatggtcatgtgatgtttatggctatggttcccaagttttctgaagaatcgaaagagctggagctggaaccagagattcttccagacatcactaggtgtatgtctacctcaggcaagagggatgatgcaccaagcgccaaacggctgaagcctaagcttcaagaaccgaaggctcttcaggttcaggatttgtctaacactgtcaaagggagcccttctctgtgcagccatgaagctgtgaagaacccagtgaaaatattcactgttgaagagaccaaaaagtgtcatgaatcggctaatgatgtgtcggagggcactcacttcacaggaaatgatcgtcagaagctggataaggatgtgcaaggtgacaaaacacagctggttgaagattctcctactgatgatgagcttgacgactacccatttttggacaacagtcctgttaagtttgagctgaaagatgagtcagtgattccagatattggagcaatctgaagtgatagtgtttgtgcgattgttctgtagcaatctatgtagtacgatgtttagtacatgttgtttgttctgtagcaaactatgtagtttgagctgaaagatgagtcagtgcctcatcgggtacttttgagtaccgtagcggttgtcaagtttcatgctctcctgaaacatccttcgcaactcgcaagtgaaactctggtttatgccctgaatcagctgctgaataagctaatgattgcatgagtatccgttgatgcatagtagtgaaaggaatggctaagagggagtgaattagtttttttttaattttgctcaaatctatgttttcagttttcagctaatgattgcatgagtatccgttgtacatgtgctctaattgttcacatgtacaactatg

SEQ ID NO: 62956 - DNA, 1753 bp, Zea Mays
aaaagccttgatgtgtccgtctccgtcatgaagacaaacattcaccgagccgaccgttgccttccccccaactcccagccccagcgtcaactgactacactcgctgactcgctcccccggttccccttctctgctcgccatcttttgctctccgcttggctcgtcaatcacctcctacgctccacacgccgccggcgactacaactgcttctgccgtggagaagaagggtttggggagaagacaacctaaatcaattggatctgggagtatcagatctaaaaagtcaggttttcatcaaggtagaaaaagaaacttttctgtccggtcatggctttcccaactgcagcagctgttttgcttaatgagaacatgcagattcataaagggttgatgcaccaagtgccaaaccactgaaatcatcagccaaacctgagagaaaggctcttcaggatgtgtctaacattcctaaaggcactgctttaaagaacagatccacagtcaaagaggggtccgccttgaaagaaaggcctgcactccacaatgtgtctaacaacctcaaagagaggtccatcctgaaagagaggcctcctcttcaggatgtgtctaacacccgcaatgagaggtccatcctgaaagagaaatctgccctgtgtagccatgaagctattaagaacccagtgaatatttttgctgatgacgaagagaccaaagggtgccatgaatgggctaaggatgggatggagggcactcacttcactggaaatgattctcagaagttggataaagatgtgcaacacaaacgtatcaagaagaaagtggcaaaagttacgtcagcattgtatggctggtcacatgaggtatatggtcatgtgatgtttatggctatggttcccaagttttctgaagaatcgaaagagctggagctggaaccagagattcttccagacatcactaggtgtatgtctacctcaggcaagagggatgatgcaccaagcgccaaacggctgaagcctaagcttcaagaaccgaaggctcttcaggttcaggatttgtctaacactgtcaaagggagcccttctctgtgcagccatgaagctgtgaagaacccagtgaaaatattcactgttgaagagaccaaaaagtgtcatgaatcggctaatgatgtgtcggagggcactcacttcacaggaaatgatcgtcagaagctggataaggatgtgcaaggtgacaaaacacagctggttgaagattctcctactgatgatgagcttgacgactacccatttttggacaacagtcctgttaagtttgagctgaaagatgagtcagtgattccagatattggagcaatctgaagtgatagtgtttgtgcgattgttctgtagcaatctatgtagtacgatgtttagtacatgttgtttgttctgtagcaaactatgtagtttgagctgaaagatgagtcagtgcctcatcgggtacttttgagtaccgtagcggttgtcaagtttcatgctctcctgaaacatccttcgcaactcgcaagtgaaactctggtttatgccctgaatcagctgctgaataagctaatgattgcatgagtatccgttgatgcatagtagtgaaaggaatggctaagagggagtgaattagtttttttttaattttgctcaaatctatgttttcagttttcagctaatgattgcatgagtatccgttgtacatgtgctctaattgttcacatgtacaactatg

SEQ ID NO: 62957 - DNA, 1768 bp, Zea Mays
aaaagccttgatgtgtccgtctccgtcatgaagacaaacattcaccgagccgaccgttgccttccccccaactcccagccccagcgtcaactgactacactcgctgactcgctcccccggttccccttctctgctcgccatcttttgctctccgcttggctcgtcaatcacctcctacgctccacacgccgccggcgactacaactgcttctgccttacagagaagaagggtttggggagaagacaacctaaatcaattggatctgggagtatcagatctaaaaagtcaggttttcatcaaggtagaaaaagaaacttttctgtccggtcatggctttcccaactgcagcagctgttttgcttaatgagaacatgcagattcataaaggaaacagggttgatgcaccaagtgccaaaccactgaaatcatcagccaaacctgagagaaaggctcttcaggatgtgtctaacattcctaaaggcactgctttaaagaacagatccacagtcaaagaggggtccgccttgaaagaaaggcctgcactccacaatgtgtctaacaacctcaaagagaggtccatcctgaaagagaggcctcctcttcaggatgtgtctaacacccgcaatgagaggtccatcctgaaagagaaatctgccctgtgtagccatgaagctattaagaacccagtgaatatttttgctgatgacgaagagaccaaagggtgccatgaatgggctaaggatgggatggagggcactcacttcactggaaatgattctcagaagttggataaagatgtgcaacacaaacgtatcaagaagaaagtggcaaaagttacgtcagcattgtatggctggtcacatgaggtatatggtcatgtgatgtttatggctatggttcccaagttttctgaagaatcgaaagagctggagctggaaccagagattcttccagacatcactaggtgtatgtctacctcaggcaagagggatgatgcaccaagcgccaaacggctgaagcctaagcttcaagaaccgaaggctcttcaggttcaggatttgtctaacactgtcaaagggagcccttctctgtgcagccatgaagctgtgaagaacccagtgaaaatattcactgttgaagagaccaaaaagtgtcatgaatcggctaatgatgtgtcggagggcactcacttcacaggaaatgatcgtcagaagctggataaggatgtgcaaggcaagcgtgacaaaacacagctggttgaagattctcctactgatgatgagcttgacgactacccatttttggacaacagtcctgttaagtttgagctgaaagatgagtcagtgattccagatattggagcaatctgaagtgatagtgtttgtgcgattgttctgtagcaatctatgtagtacgatgtttagtacatgttgtttgttctgtagcaaactatgtagtttgagctgaaagatgagtcagtgcctcatcgggtacttttgagtaccgtagcggttgtcaagtttcatgctctcctgaaacatccttcgcaactcgcaagtgaaactctggtttatgccctgaatcagctgctgaataagctaatgattgcatgagtatccgttgatgcatagtagtgaaaggaatggctaagagggagtgaattagtttttttttaattttgctcaaatctatgttttcagttttcagctaatgattgcatgagtatccgttgtacatgtgctctaattgttcacatgtacaactatg

SEQ ID NO: 62958 - DNA, 1736 bp, Zea Mays
aaaagccttgatgtgtccgtctccgtcatgaagacaaacattcaccgagccgaccgttgccttccccccaactcccagccccagcgtcaactgactacactcgctgactcgctcccccggttccccttctctgctcgccatcttttgctctccgcttggctcgtcaatcacctcctacgctccacacgccgccggcgactacaactgcttctgccgtggagaagaagggtttggggagaagacaacctaaatcaattggatctgggagtatcagatctaaaaagtcaggttttcatcaaggtagaaaaagaaacttttctgtccggtcatggctttcccaactgcagcagctgttttgcttaatgagaacatgcagattcataaaggaaacagggttgatgcaccaagtgccaaaccactgaaatcatcagccaaacctgagagaaaggctcttcaggatgtgtctaacattcctaaaggcactgctttaaagaacagatccacagtcaaagaggggtccgccttgaaagaaaggcctgcactccacaatgtgtctaacaacctcaaagagaggtccatcctgaaagagaggcctcctcttcaggatgtgtctaacacccgcaatgagaggtccatcctgaaagagaaatctgccctgtgtagccatgaagctattaagaacccagtgaatatttttgctgatgacgaagagaccaaagggtgccatgaatgggctaaggatgggatggagggcactcacttcactggaaatgattctcagaagttggataaagatgtgcaacacaaacgtatcaagaagaaagtggcaaaagttacgtcagcattgtatggctggtcacatgaggttcccaagttttctgaagaatcgaaagagctggagctggaaccagagattcttccagacatcactaggtgtatgtctacctcaggcaagagggatgatgcaccaagcgccaaacggctgaagcctaagcttcaagaaccgaaggctcttcaggttcaggatttgtctaacactgtcaaagggagcccttctctgtgcagccatgaagctgtgaagaacccagtgaaaatattcactgttgaagagaccaaaaagtgtcatgaatcggctaatgatgtgtcggagggcactcacttcacaggaaatgatcgtcagaagctggataaggatgtgcaaggcaagcgtgacaaaacacagctggttgaagattctcctactgatgatgagcttgacgactacccatttttggacaacagtcctgttaagtttgagctgaaagatgagtcagtgattccagatattggagcaatctgaagtgatagtgtttgtgcgattgttctgtagcaatctatgtagtacgatgtttagtacatgttgtttgttctgtagcaaactatgtagtttgagctgaaagatgagtcagtgcctcatcgggtacttttgagtaccgtagcggttgtcaagtttcatgctctcctgaaacatccttcgcaactcgcaagtgaaactctggtttatgccctgaatcagctgctgaataagctaatgattgcatgagtatccgttgatgcatagtagtgaaaggaatggctaagagggagtgaattagtttttttttaattttgctcaaatctatgttttcagttttcagctaatgattgcatgagtatccgttgtacatgtgctctaattgttcacatgtacaactatg

SEQ ID NO: 62959 - DNA, 1865 bp, Zea Mays
tgcttcctgagatgccttgctgtggaggttgcagtgttatcagaatctcatgacctttgtattaatggggactgttttgaaatgctacaaagtactgaggctgttctccaggttatcccttatgtgaaggttttttcacgtgttgctccagaacaaaaagaacttgtactaactacattcaaaagtgttgggagggtgacactgatgtgtggagatggaaccaatgatgttggtgcactgaagcaggcacatgtcggcgttgctcttttgaatgctgaaccagttcagaaagtggattcaaaatctaaagctgaaaataaatctgggaaattgaaaaacaagaagcctgctaatgaagcatcatcacaagtgactccggtagctaatagttctggtaaagcatccagcagcctttccttgactgctgctgagaggcagcgagaaaagctgcagaagatgttggatgaaatgaatgatgaaagtgatggtcgttcagcaccaattgttaagcttggtgatgcttctatggcttcacctttcacagcaaagcatgcatctgttacccctactcttgatatcatccgtcagggaagaagcaccctagtcactacacttcaaatgttcaagattcttgggctcaattgccttgcgacagcttacgttctcagtgtcatgtacttggatggtgtcaaactgggcgatgttcaggctacaattagtggtgtcttcactgcagccttcttcctcttcatctccaatgctcggccactccaaacgctgtctgcagagcggcctcagcctaacatattcttccttatcacggctgtcaatgaagcatcaaagcatatgccagaggaatgcattgagcctgactcagacttccatccaaaccttgtgaatacggtttcgtacatggtgaacatgatgatccaggtggcaacctttgctgtaaactacatgggccacccatttaatcagagcatatccgagaacaagcccttcaagtatgcattgtatggagcggttgctttcttcacagtgatcacatcagatatgttcaggggtttgaatgactacatgaaacttgaacctttgccagagggaatgcgtggcaaattgatgttgtgggctattctaatgttttgtggttgctacggatgggagcggctcctgcgatgggtgttcccggggaagattccggcgtgggagaagcgccagaaacaggcagttgcaagcttggagaaaaaacaccactagaattcttttagttgtctgcacttctttaccctttgatgcccatttcgatacttggtagtacatactgatcatgtcttgtcatggtttcaatctaatctgtagcctaggggaattttggcagtgaaagccctaaatgatagcatagagggtcacttatcaggattgttaaattttcggttacaatatgaaagttaatattagatggcaatgcatatcgggtgatgtacaaggcaaaatacagaaactatgccaggatttccttcattcttctactcttacaatgcgcattgatcttaatgtgtacaccctatgagaaaaggaatccctgtattctgctgctttatttatttatttatttaataatagcgtaaacatccatgttggtacagcgaaatgttggttacagcgaaagtatcaagacggaggaagggcaaaaggatcaagatgaagagtaaaattttcttttctattttttgtgtaaattaaattctaaaccaaagcttaatagtgtgatgaagcgttttgtaccttaattttcatgacaaatactagcatgacaatttgatgtataagcttaaatcattttgaattgaattgttcaaatataa

SEQ ID NO: 62960 - DNA, 4411 bp, Zea Mays
atacttttgtcatactttagctttagcatcttcaccatacagttgagtgtctctcggatccacctgtttttgctctgtacaaactttgcttaaattacgaaagaaaaaggaaaaggaaaagtctctcgagaattcgaaataattggaattagatcgtcgtggggattccacatcgtaaccactgaagacgaggcggcggacgagacggagagcagaaccgcgcagcgaagcagcagcggcgacaagccctcgcgtcggtagaggcgccgtccgccgtccgccccctcaactccggtagccgctggccgctgcaggtcgagtcccgtcgagccgactcgcgcttcccgatctgggtggccgcggcgccggcatggcgcggttcgaggtgaacggcaagtcggtgcaaggcgtggacttgctgcggcggcgccactggccgtcgcgcctcgacttctggcccttccttgcactctatgcgctctggctgctgcttgctgtcccggcgctcgacttcactgacgctctcatcatccttgccgcgctctccgctgctcacattctcaccttcctcttcaccgcctggttcgtcgatttccgtgccttcgtcgggtactctaaggtcaaggatatccatgccgctaacacgtgtaaggtgactcctgctaagttctcggggtcaaaggagattgtacctctgcacaaacagaaaaatgtggcctcaacttcagctgcaggtgagacagaggagatttactttgattttcggaagcagaggttcatctactcggctgagaaagataactttttaaaactccggtacccaacgaaggaattgatcggtcattatggcaagggcactggttatggaactgaggccaagattagcaccgcagtggacaagtggggcagaaatgtattcgaatatccacagcccacatttcagaaattaatgaaggagcaaatcatggaaccattttttgttttccaggttttttgtgttgctctatggtgcctggatgcgtattggtactacagtttgtttacacttttcatgcttttcctgtttgagtctactatggcaaagaataggctgaagacattgactgagctaagacgtgtgaaagttgatagccagattgtgttgacctatagatgtgggaaatgggttaaagtccctggaactgaactactaccaggagatattgtgtcaataggccgctcaactagtggtgaagatagatctgtaccagcagatatgctattgttagctgggtctgcaatagtaaatgaagctattcttacaggagaatctactccacagtggaaggtttcaattgctggacgtggtcctgatgatatgctatctataaggcgagataagaaccatatcctatttggtggcactaaagtattgcaacacactgcagataagtctgtaaatcttcgatcacctgatggtggctgtctagcttttgtattgaggactggatttgagactagccaagggaaattgatgaggactatcttattttcaactgagagggttactgcaaataacaaagaaagtggcctgtttatactctttttgcttttctttgcaatcattgcgtccggttatgtgcttgtgaagggattagaggacccaacaaggagcagatataaacttttattgagctgttcgttgattattacttctgtgataccaccggaattgccaatggagctctccatagcagtcaatacatctttaattgcattggctcggcatggtattttctgcacagagccattcagaataccatttgctgggaaggttgacatatgctgctttgataagacagggactctgacatcagatgatatggaatttcaaggtattgttacatcggaaggtgatgacttaatatctgatgcaaataagctgcctctccgaactcaagaagtgctttccagttgccatgcactggtatttgttgacaacaagctggcctggtggtcaacctgttcaaattgtgcacagataccattttgcttctcacttgaagagaatgtctgttatcgtccgtattcagcagaaattttacgctttcattaagggtgcaccagagaccatccaagagaaattagttgatttacctgctgcatatgtggagacatataagaaatacacacggcaaggttctcgggtcttggctcttgcatataaattgcttcctgagatgcctgttagtgaagttagaagtttggaaagggatcaagtagagagcgatctaacatttgctggttttgcggtcttcaattgtcctataaggagcgactctggtgctgtcctacaagaactgggacaatcttcccatgacttggtcatgatcaccggagaccaagctttgactgcctgccatgttgctagccaagtacatatatcttccaaacctgttttgattttgacacggataaagactggtggttttgagtgggtttcgccagatgaaactgatagagctccatacagtgctgtggaggttgcagtgttatcagaatctcatgacctttgtattaatggggactgttttgaaatgctacaaagtactgaggctgttctccaggttatcccttatgtgaaggttttttcacgtgttgctccagaacaaaaagaacttgtactaactacattcaaaagtgttgggagggtgacactgatgtgtggagatggaaccaatgatgttggtgcactgaagcaggcacatgtcggcgttgctcttttgaatgctgaaccagttcagaaagtggattcaaaatctaaagctgaaaataaatctgggaaattgaaaaacaagaagcctgctaatgaagcatcatcacaagtgactccggtagctaatagttctggtaaagcatccagcagcctttccttgactgctgctgagaggcagcgagaaaagctgcagaagatgttggatgaaatgaatgatgaaagtgatggtcgttcagcaccaattgttaagcttggtgatgcttctatggcttcacctttcacagcaaagcatgcatctgttacccctactcttgatatcatccgtcagggaagaagcaccctagtcactacacttcaaatgttcaagattcttgggctcaattgccttgcgacagcttacgttctcagtgtcatgtacttggatggtgtcaaactgggcgatgttcaggctacaattagtggtgtcttcactgcagccttcttcctcttcatctccaatgctcggccactccaaacgctgtctgcagagcggcctcagcctaacatattctgtgcatacgttctgctctcgattcttggccagttcgccatgcacatattcttccttatcacggctgtcaatgaagcatcaaagcatatgccagaggaatgcattgagcctgactcagacttccatccaaaccttgtgaatacggtttcgtacatggtgaacatgatgatccaggtggcaacctttgctgtaaactacatgggccacccatttaatcagagcatatccgagaacaagcccttcaagtatgcattgtatggagcggttgctttcttcacagtgatcacatcagatatgttcaggggtttgaatgactacatgaaacttgaacctttgccagagggaatgcgtggcaaattgatgttgtgggctattctaatgttttgtggttgctacggatgggagcggctcctgcgatgggtgttcccggggaagattccggcgtgggagaagcgccagaaacaggcagttgcaagcttggagaaaaaacaccactagaattcttttagttgtctgcacttctttaccctttgatgcccatttcgatacttggtagtacatactgatcatgtcttgtcatggtttcaatctaatctgtagcctaggggaattttggcagtgaaagccctaaatgatagcatagagggtcacttatcaggattgttaaattttcggttacaatatgaaagttaatattagatggcaatgcatatcgggtgatgtacaaggcaaaatacagaaactatgccaggatttccttcattcttctactcttacaatgcgcattgatcttaatgtgtacaccctatgagaaaaggaatccctgtattctgctgctttatttatttatttatttaataatagcgtaaacatccatgttggtacagcgaaatgttggttacagcgaaagtatcaagacggaggaagggcaaaaggatcaagatgaagagtaaaattttcttttctattttttgtgtaaattaaattctaaaccaaagcttaatagtgtgatgaagcgttttgtaccttaattttcatgacaaatactagcatgacaatttgatgtataagcttaaatcattttgaattgaattgttcaaatataa

SEQ ID NO: 62961 - DNA, 4499 bp, Zea Mays
atacttttgtcatactttagctttagcatcttcaccatacagttgagtgtctctcggatccacctgtttttgctctgtacaaactttgcttaaattacgaaagaaaaaggaaaaggaaaagtctctcgagaattcgaaataattggaattagatcgtcgtggggattccacatcgtaaccactgaagacgaggcggcggacgagacggagagcagaaccgcgcagcgaagcagcagcggcgacaagccctcgcgtcggtagaggcgccgtccgccgtccgccccctcaactccggtagccgctggccgctgcaggtcgagtcccgtcgagccgactcgctccgcagcgcttcccgatctgggtggccgcggcgccggcatggcgcggttcgaggtgaacggcaagtcggtgcaaggcgtggacttgctgcggcggcgccactggccgtcgcgcctcgacttctggcccttccttgcactctatgcgctctggctgctgcttgctgtcccggcgctcgacttcactgacgctctcatcatccttgccgcgctctccgctgctcacattctcaccttcctcttcaccgcctggttcgtcgatttccgtgccttcgtcgggtactctaaggtcaaggatatccatgccgctaacacgtgtaaggtgactcctgctaagttctcggggtcaaaggagattgtacctctgcacaaacagaaaaatgtggcctcaacttcagctgcaggtgagacagaggagatttactttgattttcggaagcagaggttcatctactcggctgagaaagataactttttaaaactccggtacccaacgaaggaattgatcggtcattatggcaagggcactggttatggaactgaggccaagattagcaccgcagtggacaagtggggcagaaatgtattcgaatatccacagcccacatttcagaaattaatgaaggagcaaatcatggaaccattttttgttttccaggttttttgtgttgctctatggtgcctggatgcgtattggtactacagtttgtttacacttttcatgcttttcctgtttgagtctactatggcaaagaataggctgaagacattgactgagctaagacgtgtgaaagttgatagccagattgtgttgacctatagatgtgggaaatgggttaaagtccctggaactgaactactaccaggagatattgtgtcaataggccgctcaactagtggtgaagatagatctgtaccagcagatatgctattgttagctgggtctgcaatagtaaatgaagctattcttacaggagaatctactccacagtggaaggtttcaattgctggacgtggtcctgatgatatgctatctataaggcgagataagaaccatatcctatttggtggcactaaagtattgcaacacactgcagataagtctgtaaatcttcgatcacctgatggtggctgtctagcttttgtattgaggactggatttgagactagccaagggaaattgatgaggactatcttattttcaactgagagggttactgcaaataacaaagaaagtggcctgtttatactctttttgcttttctttgcaatcattgcgtccggttatgtgcttgtgaagggattagaggacccaacaaggagcagatataaacttttattgagctgttcgttgattattacttctgtgataccaccggaattgccaatggagctctccatagcagtcaatacatctttaattgcattggctcggcatggtattttctgcacagagccattcagaataccatttgctgggaaggttgacatatgctgctttgataagacagggactctgacatcagatgatatggaatttcaaggtattgttacatcggaaggtgatgacttaatatctgatgcaaataagctgcctctccgaactcaagaagtgctttccagttgccatgcactggtatttgttgacaacaagctggttggcgatcccctagaaaaggctgctataaagggcatagactggatctacacatctgatgagaaggccatgtccaaaaagcctggtggtcaacctgttcaaattgtgcacagataccattttgcttctcacttgaagagaatgtctgttatcgtccgtattcagcagaaattttacgctttcattaagggtgcaccagagaccatccaagagaaattagttgatttacctgctgcatatgtggagacatataagaaatacacacggcaaggttctcgggtcttggctcttgcatataaattgcttcctgagatgcctgttagtgaagttagaagtttggaaagggatcaagtagagagcgatctaacatttgctggttttgcggtcttcaattgtcctataaggagcgactctggtgctgtcctacaagaactgggacaatcttcccatgacttggtcatgatcaccggagaccaagctttgactgcctgccatgttgctagccaagtacatatatcttccaaacctgttttgattttgacacggataaagactggtggttttgagtgggtttcgccagatgaaactgatagagctccatacagtgctgtggaggttgcagtgttatcagaatctcatgacctttgtattaatggggactgttttgaaatgctacaaagtactgaggctgttctccaggttatcccttatgtgaaggttttttcacgtgttgctccagaacaaaaagaacttgtactaactacattcaaaagtgttgggagggtgacactgatgtgtggagatggaaccaatgatgttggtgcactgaagcaggcacatgtcggcgttgctcttttgaatgctgaaccagttcagaaagtggattcaaaatctaaagctgaaaataaatctgggaaattgaaaaacaagaagcctgctaatgaagcatcatcacaagtgactccggtagctaatagttctggtaaagcatccagcagcctttccttgactgctgctgagaggcagcgagaaaagctgcagaagatgttggatgaaatgaatgatgaaagtgatggtcgttcagcaccaattgttaagcttggtgatgcttctatggcttcacctttcacagcaaagcatgcatctgttacccctactcttgatatcatccgtcagggaagaagcaccctagtcactacacttcaaatgttcaagattcttgggctcaattgccttgcgacagcttacgttctcagtgtcatgtacttggatggtgtcaaactgggcgatgttcaggctacaattagtggtgtcttcactgcagccttcttcctcttcatctccaatgctcggccactccaaacgctgtctgcagagcggcctcagcctaacatattctgtgcatacgttctgctctcgattcttggccagttcgccatgcacatattcttccttatcacggctgtcaatgaagcatcaaagcatatgccagaggaatgcattgagcctgactcagacttccatccaaaccttgtgaatacggtttcgtacatggtgaacatgatgatccaggtggcaacctttgctgtaaactacatgggccacccatttaatcagagcatatccgagaacaagcccttcaagtatgcattgtatggagcggttgctttcttcacagtgatcacatcagatatgttcaggggtttgaatgactacatgaaacttgaacctttgccagagggaatgcgtggcaaattgatgttgtgggctattctaatgttttgtggttgctacggatgggagcggctcctgcgatgggtgttcccggggaagattccggcgtgggagaagcgccagaaacaggcagttgcaagcttggagaaaaaacaccactagaattcttttagttgtctgcacttctttaccctttgatgcccatttcgatacttggtagtacatactgatcatgtcttgtcatggtttcaatctaatctgtagcctaggggaattttggcagtgaaagccctaaatgatagcatagagggtcacttatcaggattgttaaattttcggttacaatatgaaagttaatattagatggcaatgcatatcgggtgatgtacaaggcaaaatacagaaactatgccaggatttccttcattcttctactcttacaatgcgcattgatcttaatgtgtacaccctatgagaaaaggaatccctgtattctgctgctttatttatttatttatttaataatagcgtaaacatccatgttggtacagcgaaatgttggttacagcgaaagtatcaagacggaggaagggcaaaaggatcaagatgaagagtaaaattttcttttctattttttgtgtaaattaaattctaaaccaaagcttaatagtgtgatgaagcgttttgtaccttaattttcatgacaaatactagcatgacaatttgatgtataagcttaaatcattttgaattgaattgttcaaatataa

SEQ ID NO: 62962 - DNA, 4570 bp, Zea Mays
atacttttgtcatactttagctttagcatcttcaccatacagttgagtgtctctcggatccacctgtttttgctctgtacaaactttgcttaaattacgaaagaaaaaggaaaaggaaaagtctctcgagaattcgaaataattggaattagatcgtcgtggggattccacatcgtaaccactgaagacgaggcggcggacgagacggagagcagaaccgcgcagcgaagcagcagcggcgacaagccctcgcgtcggtagaggcgccgtccgccgtccgccccctcaactccggtagccgctggccgctgcaggtcgagtcccgtcgagccgactcggtaaaacctccccaaacctccacttgtatcacctctttggtctacatcaggacacgatccgactctgggtagctccgcagcgcttcccgatctgggtggccgcggcgccggcatggcgcggttcgaggtgaacggcaagtcggtgcaaggcgtggacttgctgcggcggcgccactggccgtcgcgcctcgacttctggcccttccttgcactctatgcgctctggctgctgcttgctgtcccggcgctcgacttcactgacgctctcatcatccttgccgcgctctccgctgctcacattctcaccttcctcttcaccgcctggttcgtcgatttccgtgccttcgtcgggtactctaaggtcaaggatatccatgccgctaacacgtgtaaggtgactcctgctaagttctcggggtcaaaggagattgtacctctgcacaaacagaaaaatgtggcctcaacttcagctgcaggtgagacagaggagatttactttgattttcggaagcagaggttcatctactcggctgagaaagataactttttaaaactccggtacccaacgaaggaattgatcggtcattatggcaagggcactggttatggaactgaggccaagattagcaccgcagtggacaagtggggcagaaatgtattcgaatatccacagcccacatttcagaaattaatgaaggagcaaatcatggaaccattttttgttttccaggttttttgtgttgctctatggtgcctggatgcgtattggtactacagtttgtttacacttttcatgcttttcctgtttgagtctactatggcaaagaataggctgaagacattgactgagctaagacgtgtgaaagttgatagccagattgtgttgacctatagatgtgggaaatgggttaaagtccctggaactgaactactaccaggagatattgtgtcaataggccgctcaactagtggtgaagatagatctgtaccagcagatatgctattgttagctgggtctgcaatagtaaatgaagctattcttacaggagaatctactccacagtggaaggtttcaattgctggacgtggtcctgatgatatgctatctataaggcgagataagaaccatatcctatttggtggcactaaagtattgcaacacactgcagataagtctgtaaatcttcgatcacctgatggtggctgtctagcttttgtattgaggactggatttgagactagccaagggaaattgatgaggactatcttattttcaactgagagggttactgcaaataacaaagaaagtggcctgtttatactctttttgcttttctttgcaatcattgcgtccggttatgtgcttgtgaagggattagaggacccaacaaggagcagatataaacttttattgagctgttcgttgattattacttctgtgataccaccggaattgccaatggagctctccatagcagtcaatacatctttaattgcattggctcggcatggtattttctgcacagagccattcagaataccatttgctgggaaggttgacatatgctgctttgataagacagggactctgacatcagatgatatggaatttcaaggtattgttacatcggaaggtgatgacttaatatctgatgcaaataagctgcctctccgaactcaagaagtgctttccagttgccatgcactggtatttgttgacaacaagctggttggcgatcccctagaaaaggctgctataaagggcatagactggatctacacatctgatgagaaggccatgtccaaaagcctggtggtcaacctgttcaaattgtgcacagataccattttgcttctcacttgaagagaatgtctgttatcgtccgtattcagcagaaattttacgctttcattaagggtgcaccagagaccatccaagagaaattagttgatttacctgctgcatatgtggagacatataagaaatacacacggcaaggttctcgggtcttggctcttgcatataaattgcttcctgagatgcctgttagtgaagttagaagtttggaaagggatcaagtagagagcgatctaacatttgctggttttgcggtcttcaattgtcctataaggagcgactctggtgctgtcctacaagaactgggacaatcttcccatgacttggtcatgatcaccggagaccaagctttgactgcctgccatgttgctagccaagtacatatatcttccaaacctgttttgattttgacacggataaagactggtggttttgagtgggtttcgccagatgaaactgatagagctccatacagtgctgtggaggttgcagtgttatcagaatctcatgacctttgtattaatggggactgttttgaaatgctacaaagtactgaggctgttctccaggttatcccttatgtgaaggttttttcacgtgttgctccagaacaaaaagaacttgtactaactacattcaaaagtgttgggagggtgacactgatgtgtggagatggaaccaatgatgttggtgcactgaagcaggcacatgtcggcgttgctcttttgaatgctgaaccagttcagaaagtggattcaaaatctaaagctgaaaataaatctgggaaattgaaaaacaagaagcctgctaatgaagcatcatcacaagtgactccggtagctaatagttctggtaaagcatccagcagcctttccttgactgctgctgagaggcagcgagaaaagctgcagaagatgttggatgaaatgaatgatgaaagtgatggtcgttcagcaccaattgttaagcttggtgatgcttctatggcttcacctttcacagcaaagcatgcatctgttacccctactcttgatatcatccgtcagggaagaagcaccctagtcactacacttcaaatgttcaagattcttgggctcaattgccttgcgacagcttacgttctcagtgtcatgtacttggatggtgtcaaactgggcgatgttcaggctacaattagtggtgtcttcactgcagccttcttcctcttcatctccaatgctcggccactccaaacgctgtctgcagagcggcctcagcctaacatattctgtgcatacgttctgctctcgattcttggccagttcgccatgcacatattcttccttatcacggctgtcaatgaagcatcaaagcatatgccagaggaatgcattgagcctgactcagacttccatccaaaccttgtgaatacggtttcgtacatggtgaacatgatgatccaggtggcaacctttgctgtaaactacatgggccacccatttaatcagagcatatccgagaacaagcccttcaagtatgcattgtatggagcggttgctttcttcacagtgatcacatcagatatgttcaggggtttgaatgactacatgaaacttgaacctttgccagagggaatgcgtggcaaattgatgttgtgggctattctaatgttttgtggttgctacggatgggagcggctcctgcgatgggtgttcccggggaagattccggcgtgggagaagcgccagaaacaggcagttgcaagcttggagaaaaaacaccactagaattcttttagttgtctgcacttctttaccctttgatgcccatttcgatacttggtagtacatactgatcatgtcttgtcatggtttcaatctaatctgtagcctaggggaattttggcagtgaaagccctaaatgatagcatagagggtcacttatcaggattgttaaattttcggttacaatatgaaagttaatattagatggcaatgcatatcgggtgatgtacaaggcaaaatacagaaactatgccaggatttccttcattcttctactcttacaatgcgcattgatcttaatgtgtacaccctatgagaaaaggaatccctgtattctgctgctttatttatttatttatttaataatagcgtaaacatccatgttggtacagcgaaatgttggttacagcgaaagtatcaagacggaggaagggcaaaaggatcaagatgaagagtaaaattttcttttctattttttgtgtaaattaaattctaaaccaaagcttaatagtgtgatgaagcgttttgtaccttaattttcatgacaaatactagcatgacaatttgatgtataagcttaaatcattttgaattgaattgttcaaatataa

SEQ ID NO: 62963 - DNA, 4822 bp, Zea Mays
atacttttgtcatactttagctttagcatcttcaccatacagttgagtgtctctcggatccacctgtttttgctctgtacaaactttgcttaaattacgaaagaaaaaggaaaaggaaaagtctctcgagaattcgaaataattggaattagatcgtcgtggggattccacatcgtaaccactgaagacgaggcggcggacgagacggagagcagaaccgcgcagcgaagcagcagcggcgacaagccctcgcgtcggtagaggcgccgtccgccgtccgccccctcaactccggtagccgctggccgctgcaggtcgagtcccgtcgagccgactcggtaaaacctccccaaacctccacttgtatcacctctttggtctacatcaggacacgatccgactctgggtagctccgcagcgcttcccgatctgggtggccgcggcgccggcatggcgcggttcgaggtgaacggcaagtcggtgcaaggcgtggacttgctgcggcggcgccactggccgtcgcgcctcgacttctggcccttccttgcactctatgcgctctggctgctgcttgctgtcccggcgctcgacttcactgacgctctcatcatccttgccgcgctctccgctgctcacattctcaccttcctcttcaccgcctggttcgtcgatttccgtgccttcgtcgggtactctaaggtcaaggatatccatgccgctaacacgtgtaaggtgactcctgctaagttctcggggtcaaaggagattgtacctctgcacaaacagaaaaatgtggcctcaacttcagctgcaggtgagacagaggagatttactttgattttcggaagcagaggttcatctactcggctgagaaagataactttttaaaactccggtacccaacgaaggaattgatcggtcattatggcaagggcactggttatggaactgaggccaagattagcaccgcagtggacaagtggggcagaaatgtattcgaatatccacagcccacatttcagaaattaatgaaggagcaaatcatggaaccattttttgttttccaggttttttgtgttgctctatggtgcctggatgcgtattggtactacagtttgtttacacttttcatgcttttcctgtttgagtctactatggcaaagaataggctgaagacattgactgagctaagacgtgtgaaagttgatagccagattgtgttgacctatagatgtgggaagtatgaattctccatttcatttaatttttttctgtttcagcatatatcccatcctaattgcatgttctttgttcagatgggttaaagtccctggaactgaactactaccaggagatattgtgtcaataggccgctcaactagtggtgaagatagatctgtaccagcagatatgctattgttagctgggtctgcaatagtaaatgaagctattcttacaggagaatctactccacagtggaaggtttcaattgctggacgtggtcctgatgatatgctatctataaggcgagataagaaccatatcctatttggtggcactaaagtattgcaacacactgcagataaggtagatacatcttctgagctagctgtctgtgcccaatttcgttgctgacatgtttagttttgtagtctgtaaatcttcgatcacctgatggtggctgtctagcttttgtattgaggactggatttgagactagccaagggaaattgatgaggactatcttattttcaactgagagggttactgcaaataacaaagaaagtggcctgtttatactctttttgcttttctttgcaatcattgcgtccggttatgtgcttgtgaagggattagaggacccaacaaggagcagatataaacttttattgagctgttcgttgattattacttctgtgataccaccggaattgccaatggagctctccatagcagtcaatacatctttaattgcattggctcggcatggtattttctgcacagagccattcagaataccatttgctgggaaggttgacatatgctgctttgataagacagggactctgacatcagatgatatggaatttcaaggtattgttacatcggaaggtgatgacttaatatctgatgcaaataagctgcctctccgaactcaagaagtgctttccagttgccatgcactggtatttgttgacaacaagctggttggcgatcccctagaaaaggctgctataaagggcatagactggatctacacatctgatgagaaggccatgtccaaaaagcctggtggtcaacctgttcaaattgtgcacagataccattttgcttctcacttgaagagaatgtctgttatcgtccgtattcagcagaaattttacgctttcattaagttaaaagggtgaatatggcagctggcaaaaaaagtaaaatcacaatatctgttgagtttcgtaatttggataacaagaaggcatgttttttccccagtccataagaacttggtgcaccagagaccatccaagagaaattagttgatttacctgctgcatatgtggagacatataagaaatacacacggcaaggttctcgggtcttggctcttgcatataaattgcttcctgagatgcctgttagtgaagttagaagtttggaaagggatcaagtagagagcgatctaacatttgctggttttgcggtcttcaattgtcctataaggagcgactctggtgctgtcctacaagaactgggacaatcttcccatgacttggtcatgatcaccggagaccaagctttgactgcctgccatgttgctagccaagtacatatatcttccaaacctgttttgattttgacacggataaagactggtggttttgagtgggtttcgccagatgaaactgatagagctccatacagtgctgtggaggttgcagtgttatcagaatctcatgacctttgtattaatggggactgttttgaaatgctacaaagtactgaggctgttctccaggttatcccttatgtgaaggttttttcacgtgttgctccagaacaaaaagaacttgtactaactacattcaaaagtgttgggagggtgacactgatgtgtggagatggaaccaatgatgttggtgcactgaagcaggcacatgtcggcgttgctcttttgaatgctgaaccagttcagaaagtggattcaaaatctaaagctgaaaataaatctgggaaattgaaaaacaagaagcctgctaatgaagcatcatcacaagtgactccggtagctaatagttctggtaaagcatccagcagcctttccttgactgctgctgagaggcagcgagaaaagctgcagaagatgttggatgaaatgaatgatgaaagtgatggtcgttcagcaccaattgttaagcttggtgatgcttctatggcttcacctttcacagcaaagcatgcatctgttacccctactcttgatatcatccgtcagggaagaagcaccctagtcactacacttcaaatgttcaagattcttgggctcaattgccttgcgacagcttacgttctcagtgtcatgtacttggatggtgtcaaactgggcgatgttcaggctacaattagtggtgtcttcactgcagccttcttcctcttcatctccaatgctcggccactccaaacgctgtctgcagagcggcctcagcctaacatattctgtgcatacgttctgctctcgattcttggccagttcgccatgcacatattcttccttatcacggctgtcaatgaagcatcaaagcatatgccagaggaatgcattgagcctgactcagacttccatccaaaccttgtgaatacggtttcgtacatggtgaacatgatgatccaggtggcaacctttgctgtaaactacatgggccacccatttaatcagagcatatccgagaacaagcccttcaagtatgcattgtatggagcggttgctttcttcacagtgatcacatcagatatgttcaggggtttgaatgactacatgaaacttgaacctttgccagagggaatgcgtggcaaattgatgttgtgggctattctaatgttttgtggttgctacggatgggagcggctcctgcgatgggtgttcccggggaagattccggcgtgggagaagcgccagaaacaggcagttgcaagcttggagaaaaaacaccactagaattcttttagttgtctgcacttctttaccctttgatgcccatttcgatacttggtagtacatactgatcatgtcttgtcatggtttcaatctaatctgtagcctaggggaattttggcagtgaaagccctaaatgatagcatagagggtcacttatcaggattgttaaattttcggttacaatatgaaagttaatattagatggcaatgcatatcgggtgatgtacaaggcaaaatacagaaactatgccaggatttccttcattcttctactcttacaatgcgcattgatcttaatgtgtacaccctatgagaaaaggaatccctgtattctgctgctttatttatttatttatttaataatagcgtaaacatccatgttggtacagcgaaatgttggttacagcgaaagtatcaagacggaggaagggcaaaaggatcaagatgaagagtaaaattttcttttctattttttgtgtaaattaaattctaaaccaaagcttaatagtgtgatgaagcgttttgtaccttaattttcatgacaaatactagcatgacaatttgatgtataagcttaaatcattttgaattgaattgttcaaatataa

SEQ ID NO: 62964 - DNA, 4527 bp, Zea Mays
atacttttgtcatactttagctttagcatcttcaccatacagttgagtgtctctcggatccacctgtttttgctctgtacaaactttgcttaaattacgaaagaaaaaggaaaaggaaaagtctctcgagaattcgaaataattggaattagatcgtcgtggggattccacatcgtaaccactgaagacgaggcggcggacgagacggagagcagaaccgcgcagcgaagcagcagcggcgacaagccctcgcgtcggtagaggcgccgtccgccgtccgccccctcaactccggtagccgctggccgctgcaggtcgagtcccgtcgagccgactcgcgcttcccgatctgggtggccgcggcgccggcatggcgcggttcgaggtgaacggcaagtcggtgcaaggcgtggacttgctgcggcggcgccactggccgtcgcgcctcgacttctggcccttccttgcactctatgcgctctggctgctgcttgctgtcccggcgctcgacttcactgacgctctcatcatccttgccgcgctctccgctgctcacattctcaccttcctcttcaccgcctggttcgtcgatttccgtgccttcgtcgggtactctaaggtcaaggatatccatgccgctaacacgtgtaaggtgactcctgctaagttctcggggtcaaaggagattgtacctctgcacaaacagaaaaatctgcaggtgagacagaggagatttactttgattttcggaagcagaggttcatctactcggctgagaaagataactttttaaaactccggtacccaacgaaggaattgatcggtcattatggcaagggcactggttatggaactgaggccaagattagcaccgcagtggacaagtggggcagaaatgtattcgaatatccacagcccacatttcagaaattaatgaaggagcaaatcatggaaccattttttgttttccaggttttttgtgttgctctatggtgcctggatgcgtattggtactacagtttgtttacacttttcatgcttttcctgtttgagtctactatggcaaagaataggctgaagacattgactgagctaagacgtgtgaaagttgatagccagattgtgttgacctatagatgtgggaagtatgaattctccatttcatttaatttttttctgtttcagcatatatcccatcctaattgcatgttctttgttcagatgggttaaagtccctggaactgaactactaccaggagatattgtgtcaataggccgctcaactagtggtgaagatagatctgtaccagcagatatgctattgttagctgggtctgcaatagtaaatgaagctattcttacaggagaatctactccacagtggaaggtttcaattgctggacgtggtcctgatgatatgctatctataaggcgagataagaaccatatcctatttggtggcactaaagtattgcaacacactgcagataagtctgtaaatcttcgatcacctgatggtggctgtctagcttttgtattgaggactggatttgagactagccaagggaaattgatgaggactatcttattttcaactgagagggttactgcaaataacaaagaaagtggcctgtttatactctttttgcttttctttgcaatcattgcgtccggttatgtgcttgtgaagggattagaggacccaacaaggagcagatataaacttttattgagctgttcgttgattattacttctgtgataccaccggaattgccaatggagctctccatagcagtcaatacatctttaattgcattggctcggcatggtattttctgcacagagccattcagaataccatttgctgggaagacagggactctgacatcagatgatatggaatttcaaggtattgttacatcggaaggtgatgacttaatatctgatgcaaataagctgcctctccgaactcaagaagtgctttccagttgccatgcactggtatttgttgacaacaagctggttggcgatcccctagaaaaggctgctataaagggcatagactggatctacacatctgatgagaaggccatgtccaaaaagcctggtggtcaacctgttcaaattgtgcacagataccattttgcttctcacttgaagagaatgtctgttatcgtccgtattcagcagaaattttacgctttcattaagggtgcaccagagaccatccaagagaaattagttgatttacctgctgcatatgtggagacatataagaaatacacacggcaaggttctcgggtcttggctcttgcatataaattgcttcctgagatgcctgttagtgaagttagaagtttggaaagggatcaagtagagagcgatctaacatttgctggttttgcggtcttcaattgtcctataaggagcgactctggtgctgtcctacaagaactgggacaatcttcccatgacttggtcatgatcaccggagaccaagctttgactgcctgccatgttgctagccaagtacatatatcttccaaacctgttttgattttgacacggataaagactggtggttttgagtgggtttcgccagatgaaactgatagagctccatacagtgctgtggaggttgcagtgttatcagaatctcatgacctttgtattaatggggactgttttgaaatgctacaaagtactgaggctgttctccaggttatcccttatgtgaaggttttttcacgtgttgctccagaacaaaaagaacttgtactaactacattcaaaagtgttgggagggtgacactgatgtgtggagatggaaccaatgatgttggtgcactgaagcaggcacatgtcggcgttgctcttttgaatgctgaaccagttcagaaagtggattcaaaatctaaagctgaaaataaatctgggaaattgaaaaacaagaagcctgctaatgaagcatcatcacaagtgactccggtagctaatagttctggtaaagcatccagcagcctttccttgactgctgctgagaggcagcgagaaaagctgcagaagatgttggatgaaatgaatgatgaaagtgatggtcgttcagcaccaattgttaagcttggtgatgcttctatggcttcacctttcacagcaaagcatgcatctgttacccctactcttgatatcatccgtcagggaagaagcaccctagtcactacacttcaaatgttcaagattcttgggctcaattgccttgcgacagcttacgttctcagtgtcatgtacttggatggtgtcaaactgggcgatgttcaggctacaattagtggtgtcttcactgcagccttcttcctcttcatctccaatgctcggccactccaaacgctgtctgcagagcggcctcagcctaacatattctgtgcatacgttctgctctcgattcttggccagttcgccatgcacatattcttccttatcacggctgtcaatgaagcatcaaagcatatgccagaggaatgcattgagcctgactcagacttccatccaaaccttgtgaatacggtttcgtacatggtgaacatgatgatccaggtggcaacctttgctgtaaactacatgggccacccatttaatcagagcatatccgagaacaagcccttcaagtatgcattgtatggagcggttgctttcttcacagtgatcacatcagatatgttcaggggtttgaatgactacatgaaacttgaacctttgccagagggaatgcgtggcaaattgatgttgtgggctattctaatgttttgtggttgctacggatgggagcggctcctgcgatgggtgttcccggggaagattccggcgtgggagaagcgccagaaacaggcagttgcaagcttggagaaaaaacaccactagaattcttttagttgtctgcacttctttaccctttgatgcccatttcgatacttggtagtacatactgatcatgtcttgtcatggtttcaatctaatctgtagcctaggggaattttggcagtgaaagccctaaatgatagcatagagggtcacttatcaggattgttaaattttcggttacaatatgaaagttaatattagatggcaatgcatatcgggtgatgtacaaggcaaaatacagaaactatgccaggatttccttcattcttctactcttacaatgcgcattgatcttaatgtgtacaccctatgagaaaaggaatccctgtattctgctgctttatttatttatttatttaataatagcgtaaacatccatgttggtacagcgaaatgttggttacagcgaaagtatcaagacggaggaagggcaaaaggatcaagatgaagagtaaaattttcttttctattttttgtgtaaattaaattctaaaccaaagcttaatagtgtgatgaagcgttttgtaccttaattttcatgacaaatactagcatgacaatttgatgtataagcttaaatcattttgaattgaattgttcaaatataa

SEQ ID NO: 62965 - DNA, 4390 bp, Zea Mays
atacttttgtcatactttagctttagcatcttcaccatacagttgagtgtctctcggatccacctgtttttgctctgtacaaactttgcttaaattacgaaagaaaaaggaaaaggaaaagtctctcgagaattcgaaataattggaattagatcgtcgtggggattccacatcgtaaccactgaagacgaggcggcggacgagacggagagcagaaccgcgcagcgaagcagcagcggcgacaagccctcgcgtcggtagaggcgccgtccgccgtccgccccctcaactccggtagccgctggccgctgcaggtcgagtcccgtcgagccgactcgcgcttcccgatctgggtggccgcggcgccggcatggcgcggttcgaggtgaacggcaagtcggtgcaaggcgtggacttgctgcggcggcgccactggccgtcgcgcctcgacttctggcccttccttgcactctatgcgctctggctgctgcttgctgtcccggcgctcgacttcactgacgctctcatcatccttgccgcgctctccgctgctcacattctcaccttcctcttcaccgcctggttcgtcgatttccgtgccttcgtcgggtactctaaggtcaaggatatccatgccgctaacacgtgtaaggtgactcctgctaagttctcggggtcaaaggagattgtacctctgcacaaacagaaaaatgtggcctcaacttcagctgcaggtgagacagaggagatttactttgattttcggaagcagaggttcatctactcggctgagaaagataactttttaaaactccggtacccaacgaaggaattgatcggtcattatggcaagggcactggttatggaactgaggccaagattagcaccgcagtggacaagtggggcagaaatgtgttttttgtgttgctctatggtgcctggatgcgtattggtactacagtttgtttacacttttcatgcttttcctgtttgagtctactatggcaaagaataggctgaagacattgactgagctaagacgtgtgaaagttgatagccagattgtgttgacctatagatgtgggaaatgggttaaagtccctggaactgaactactaccaggagatattgtgtcaataggccgctcaactagtggtgaagatagatctgtaccagcagatatgctattgttagctgggtctgcaatagtaaatgaagctattcttacaggagaatctactccacagtggaaggtttcaattgctggacgtggtcctgatgatatgctatctataaggcgagataagaaccatatcctatttggtggcactaaagtattgcaacacactgcagataagtctgtaaatcttcgatcacctgatggtggctgtctagcttttgtattgaggactggatttgagactagccaagggaaattgatgaggactatcttattttcaactgagagggttactgcaaataacaaagaaagtggcctgtttatactctttttgcttttctttgcaatcattgcgtccggttatgtgcttgtgaagggattagaggacccaacaaggagcagatataaacttttattgagctgttcgttgattattacttctgtgataccaccggaattgccaatggagctctccatagcagtcaatacatctttaattgcattggctcggcatggtattttctgcacagagccattcagaataccatttgctgggaagggactctgacatcagatgatatggaatttcaaggtattgttacatcggaaggtgatgacttaatatctgatgcaaataagctgcctctccgaactcaagaagtgctttccagttgccatgcactggtatttgttgacaacaagctggttggcgatcccctagaaaaggctgctataaagggcatagactggatctacacatctgatgagaaggccatgtccaaaaagcctggtggtcaacctgttcaaattgtgcacagataccattttgcttctcacttgaagagaatgtctgttatcgtccgtattcagcagaaattttacgctttcattaagggtgcaccagagaccatccaagagaaattagttgatttacctgctgcatatgtggagacatataagaaatacacacggcaaggttctcgggtcttggctcttgcatataaattgcttcctgagatgcctgttagtgaagttagaagtttggaaagggatcaagtagagagcgatctaacatttgctggttttgcggtcttcaattgtcctataaggagcgactctggtgctgtcctacaagaactgggacaatcttcccatgacttggtcatgatcaccggagaccaagctttgactgcctgccatgttgctagccaagtacatatatcttccaaacctgttttgattttgacacggataaagactggtggttttgagtgggtttcgccagatgaaactgatagagctccatacagtgctgtggaggttgcagtgttatcagaatctcatgacctttgtattaatggggactgttttgaaatgctacaaagtactgaggctgttctccaggttatcccttatgtgaaggttttttcacgtgttgctccagaacaaaaagaacttgtactaactacattcaaaagtgttgggagggtgacactgatgtgtggagatggaaccaatgatgttggtgcactgaagcaggcacatgtcggcgttgctcttttgaatgctgaaccagttcagaaagtggattcaaaatctaaagctgaaaataaatctgggaaattgaaaaacaagaagcctgctaatgaagcatcatcacaagtgactccggtagctaatagttctggtaaagcatccagcagcctttccttgactgctgctgagaggcagcgagaaaagctgcagaagatgttggatgaaatgaatgatgaaagtgatggtcgttcagcaccaattgttaagcttggtgatgcttctatggcttcacctttcacagcaaagcatgcatctgttacccctactcttgatatcatccgtcagggaagaagcaccctagtcactacacttcaaatgttcaagattcttgggctcaattgccttgcgacagcttacgttctcagtgtcatgtacttggatggtgtcaaactgggcgatgttcaggctacaattagtggtgtcttcactgcagccttcttcctcttcatctccaatgctcggccactccaaacgctgtctgcagagcggcctcagcctaacatattctgtgcatacgttctgctctcgattcttggccagttcgccatgcacatattcttccttatcacggctgtcaatgaagcatcaaagcatatgccagaggaatgcattgagcctgactcagacttccatccaaaccttgtgaatacggtttcgtacatggtgaacatgatgatccaggtggcaacctttgctgtaaactacatgggccacccatttaatcagagcatatccgagaacaagcccttcaagtatgcattgtatggagcggttgctttcttcacagtgatcacatcagatatgttcaggggtttgaatgactacatgaaacttgaacctttgccagagggaatgcgtggcaaattgatgttgtgggctattctaatgttttgtggttgctacggatgggagcggctcctgcgatgggtgttcccggggaagattccggcgtgggagaagcgccagaaacaggcagttgcaagcttggagaaaaaacaccactagaattcttttagttgtctgcacttctttaccctttgatgcccatttcgatacttggtagtacatactgatcatgtcttgtcatggtttcaatctaatctgtagcctaggggaattttggcagtgaaagccctaaatgatagcatagagggtcacttatcaggattgttaaattttcggttacaatatgaaagttaatattagatggcaatgcatatcgggtgatgtacaaggcaaaatacagaaactatgccaggatttccttcattcttctactcttacaatgcgcattgatcttaatgtgtacaccctatgagaaaaggaatccctgtattctgctgctttatttatttatttatttaataatagcgtaaacatccatgttggtacagcgaaatgttggttacagcgaaagtatcaagacggaggaagggcaaaaggatcaagatgaagagtaaaattttcttttctattttttgtgtaaattaaattctaaaccaaagcttaatagtgtgatgaagcgttttgtaccttaattttcatgacaaatactagcatgacaatttgatgtataagcttaaatcattttgaattgaattgttcaaatataa

SEQ ID NO: 62966 - DNA, 4430 bp, Zea Mays
atacttttgtcatactttagctttagcatcttcaccatacagttgagtgtctctcggatccacctgtttttgctctgtacaaactttgcttaaattacgaaagaaaaaggaaaaggaaaagtctctcgagaattcgaaataattggaattagatcgtcgtggggattccacatcgtaaccactgaagacgaggcggcggacgagacggagagcagaaccgcgcagcgaagcagcagcggcgacaagccctcgcgtcggtagaggcgccgtccgccgtccgccccctcaactccggtagccgctggccgctgcaggtcgagtcccgtcgagccgactcgcgcttcccgatctgggtggccgcggcgccggcatggcgcggttcgaggtgaacggcaagtcggtgcaaggcgtggacttgctgcggcggcgccactggccgtcgcgcctcgacttctggcccttccttgcactctatgcgctctggctgctgcttgctgtcccggcgctcgacttcactgacgctctcatcatccttgccgcgctctccgctgctcacattctcaccttcctcttcaccgcctggttcgtcgatttccgtgccttcgtcgggtactctaaggtcaaggatatccatgccgctaacacgtgtaaggtgactcctgctaagttctcggggtcaaaggagattgtacctctgcacaaacagaaaaatgtggcctcaacttcagctgcaggtgagacagaggagatttactttgattttcggaagcagaggttcatctactcggctgagaaagataactttttaaaactccggtacccaacgaaggaattgatcggtcattatggcaagggcactggttatggaactgaggccaagattagcaccgcagtggacaagtggggcagaaatgtattcgaatatccacagcccacatttcagaaattaatgaaggagcaaatcatggaaccattttttgttttccaggttttttgtgttgctctatggtgcctggatgcgtattggtactacagtttgtttacacttttcatgcttttcctgtttgagtctactatggcaaagaataggctgaagacattgactgagctaagacgtgtgaaagttgatagccagattgtgttgacctatagatgtgggaaatgggttaaagtccctggaactgaactactaccaggagatattgtgtcaataggccgctcaactagtggtgaagatagatctgtaccagcagatatgctattgttagctgggtctgcaatagtaaatgaagctattcttacaggagaatctactccacagtggaaggtttcaattgctggacgtggtcctgatgatatgctatctataaggcgagataagaaccatatcctatttggtggcactaaagtattgcaacacactgcagataagtctgtaaatcttcgatcacctgatggtggctgtctagcttttgtattgaggactggatttgagactagccaagggaaattgatgaggactatcttattttcaactgagagggttactgcaaataacaaagaaagtggcctgtttatactctttttgcttttctttgcaatcattgcgtccggttatgtgcttgtgaagggattagaggacccaacaaggagcagatataaacttttattgagctgttcgttgattattacttctgtgataccaccggaattgccaatggagctctccatagcagtcaatacatctttaattgcattggctcggcatggtattttctgcacagagccattcagaataccatttgctgggaaggtattgttacatcggaaggtgatgacttaatatctgatgcaaataagctgcctctccgaactcaagaagtgctttccagttgccatgcactggtatttgttgacaacaagctggttggcgatcccctagaaaaggctgctataaagggcatagactggatctacacatctgatgagaaggccatgtccaaaaagcctggtggtcaacctgttcaaattgtgcacagataccattttgcttctcacttgaagagaatgtctgttatcgtccgtattcagcagaaattttacgctttcattaagggtgcaccagagaccatccaagagaaattagttgatttacctgctgcatatgtggagacatataagaaatacacacggcaaggttctcgggtcttggctcttgcatataaattgcttcctgagatgcctgttagtgaagttagaagtttggaaagggatcaagtagagagcgatctaacatttgctggttttgcggtcttcaattgtcctataaggagcgactctggtgctgtcctacaagaactgggacaatcttcccatgacttggtcatgatcaccggagaccaagctttgactgcctgccatgttgctagccaagtacatatatcttccaaacctgttttgattttgacacggataaagactggtggttttgagtgggtttcgccagatgaaactgatagagctccatacagtgctgtggaggttgcagtgttatcagaatctcatgacctttgtattaatggggactgttttgaaatgctacaaagtactgaggctgttctccaggttatcccttatgtgaaggttttttcacgtgttgctccagaacaaaaagaacttgtactaactacattcaaaagtgttgggagggtgacactgatgtgtggagatggaaccaatgatgttggtgcactgaagcaggcacatgtcggcgttgctcttttgaatgctgaaccagttcagaaagtggattcaaaatctaaagctgaaaataaatctgggaaattgaaaaacaagaagcctgctaatgaagcatcatcacaagtgactccggtagctaatagttctggtaaagcatccagcagcctttccttgactgctgctgagaggcagcgagaaaagctgcagaagatgttggatgaaatgaatgatgaaagtgatggtcgttcagcaccaattgttaagcttggtgatgcttctatggcttcacctttcacagcaaagcatgcatctgttacccctactcttgatatcatccgtcagggaagaagcaccctagtcactacacttcaaatgttcaagattcttgggctcaattgccttgcgacagcttacgttctcagtgtcatgtacttggatggtgtcaaactgggcgatgttcaggctacaattagtggtgtcttcactgcagccttcttcctcttcatctccaatgctcggccactccaaacgctgtctgcagagcggcctcagcctaacatattctgtgcatacgttctgctctcgattcttggccagttcgccatgcacatattcttccttatcacggctgtcaatgaagcatcaaagcatatgccagaggaatgcattgagcctgactcagacttccatccaaaccttgtgaatacggtttcgtacatggtgaacatgatgatccaggtggcaacctttgctgtaaactacatgggccacccatttaatcagagcatatccgagaacaagcccttcaagtatgcattgtatggagcggttgctttcttcacagtgatcacatcagatatgttcaggggtttgaatgactacatgaaacttgaacctttgccagagggaatgcgtggcaaattgatgttgtgggctattctaatgttttgtggttgctacggatgggagcggctcctgcgatgggtgttcccggggaagattccggcgtgggagaagcgccagaaacaggcagttgcaagcttggagaaaaaacaccactagaattcttttagttgtctgcacttctttaccctttgatgcccatttcgatacttggtagtacatactgatcatgtcttgtcatggtttcaatctaatctgtagcctaggggaattttggcagtgaaagccctaaatgatagcatagagggtcacttatcaggattgttaaattttcggttacaatatgaaagttaatattagatggcaatgcatatcgggtgatgtacaaggcaaaatacagaaactatgccaggatttccttcattcttctactcttacaatgcgcattgatcttaatgtgtacaccctatgagaaaaggaatccctgtattctgctgctttatttatttatttatttaataatagcgtaaacatccatgttggtacagcgaaatgttggttacagcgaaagtatcaagacggaggaagggcaaaaggatcaagatgaagagtaaaattttcttttctattttttgtgtaaattaaattctaaaccaaagcttaatagtgtgatgaagcgttttgtaccttaattttcatgacaaatactagcatgacaatttgatgtataagcttaaatcattttgaattgaattgttcaaatataa

SEQ ID NO: 62967 - DNA, 4345 bp, Zea Mays
atacttttgtcatactttagctttagcatcttcaccatacagttgagtgtctctcggatccacctgtttttgctctgtacaaactttgcttaaattacgaaagaaaaaggaaaaggaaaagtctctcgagaattcgaaataattggaattagatcgtcgtggggattccacatcgtaaccactgaagacgaggcggcggacgagacggagagcagaaccgcgcagcgaagcagcagcggcgacaagccctcgcgtcggtagaggcgccgtccgccgtccgccccctcaactccggtagccgctggccgctgcaggtcgagtcccgtcgagccgactcgcgcttcccgatctgggtggccgcggcgccggcatggcgcggttcgaggtgaacggcaagtcggtgcaaggcgtggacttgctgcggcggcgccactggccgtcgcgcctcgacttctggcccttccttgcactctatgcgctctggctgctgcttgctgtcccggcgctcgacttcactgacgctctcatcatccttgccgcgctctccgctgctcacattctcaccttcctcttcaccgcctggttcgtcgatttccgtgccttcgtcgggtactctaaggtcaaggatatccatgccgctaacacgtgtaaggtgactcctgctaagttctcggggtcaaaggagattgtacctctgcacaaacagaaaaatgtggcctcaacttcagctgcaggaattgatcggtcattatggcaagggcactggttatggaactgaggccaagattagcaccgcagtggacaagtggggcagaaatgtattcgaatatccacagcccacatttcagaaattaatgaaggagcaaatcatggaaccattttttgttttccaggttttttgtgttgctctatggtgcctggatgcgtattggtactacagtttgtttacacttttcatgcttttcctgtttgagtctactatggcaaagaataggctgaagacattgactgagctaagacgtgtgaaagttgatagccagattgtgttgacctatagatgtgggaaatgggttaaagtccctggaactgaactactaccaggagatattgtgtcaataggccgctcaactagtggtgaagatagatctgtaccagcagatatgctattgttagctgggtctgcaatagtaaatgaagctattcttacaggagaatctactccacagtggaaggtttcaattgctggacgtggtcctgatgatatgctatctataaggcgagataagaaccatatcctatttggtggcactaaagtattgcaacacactgcagataagtctgtaaatcttcgatcacctgatggtggctgtctagcttttgtattgaggactggatttgagactagccaagggaaattgatgaggactatcttattttcaactgagagggttactgcaaataacaaagaaagtggcctgtttatactctttttgcttttctttgcaatcattgcgtccggttatgtgcttgtgaagggattagaggacccaacaaggagcagatataaacttttattgagctgttcgttgattattacttctgtgataccaccggaattgccaatggagctctccatagcagtcaatacatctttaattgcattggctcggcatggtattttctgcacagagccattcagaataccatttgctgggaaggttgacatatgctgctttgataagacagggactctgacatcagatgatatggaatttcaaggtattgttacatcggaaggtgatgacttaatatctgatgcaaataagctgcctctccgaactcaagaagtgctttccagttgccatgcactggtatttgttgacaacaagctggttggcgatcccctagaaaaggctgctataaagggcatagactggatctacacatctgatgagaaggccatgtccaaaaagcctggtggtcaacctgttcaaattgtgcacagataccattttgcttctcacttgaagagaatgtctgttatcgtccgtattcagcagaaattttacgctttcattaagggtgcaccagagaccatccaagagaaattagttgatttacctgctgcatatgtggagacatataagaaatacacacggcaaggttctcgggtcttggctcttgcatataaattgcttcctgagatgcctgttagtgaagttagaagtttggaaagggatcaagtagagagcgatctaacatttgctggttttgcggtcttcaattgtcctataaggagcgactctggtgctgtcctacaagaactgggacaatcttcccatgacttggtcatgatcaccggagaccaagctttgactgcctgccatgttgctagccaagtacatatatcttccaaacctgttttgattttgacacggataaagactggtggttttgagtgggtttcgccagatgaaactgatagagctccatacagtgctgtggaggttgcagtgttatcagaatctcatgacctttgtattaatggggactgttttgaaatgctacaaagtactgaggctgttctccaggttatcccttatgtgaaggttttttcacgtgttgctccagaacaaaaagaacttgtactaactacattcaaaagtgttgggagggtgacactgatgtgtggagatggaaccaatgatgttggtgcactgaagcaggcacatgtcggcgttgctcttttgaatgctgaaccagttcagaaagtggattcaaaatctaaagctgaaaataaatctgggaaattgaaaaacaagaagcctgctaatgaagcatcatcacaagtgactccggtagctaatagttctggtaaagcatccagcagcctttccttgactgctgctgagaggcagcgagaaaagctgcagaagatgttggatgaaatgaatgatgaaagtgatggtcgttcagcaccaattgttaagcttggtgatgcttctatggcttcacctttcacagcaaagcatgcatctgttacccctactcttgatatcatccgtcagggaagaagcaccctagtcactacacttcaaatgttcaagattcttgggctcaattgccttgcgacagcttacgttctcagtgtcatgtacttggatggtgtcaaactgggcgatgttcaggctacaattagtggtgtcttcactgcagccttcttcctcttcatctccaatgctcggccactccaaacgctgtctgcagagcggcctcagcctaacatattcttccttatcacggctgtcaatgaagcatcaaagcatatgccagaggaatgcattgagcctgactcagacttccatccaaaccttgtgaatacggtttcgtacatggtgaacatgatgatccaggtggcaacctttgctgtaaactacatgggccacccatttaatcagagcatatccgagaacaagcccttcaagtatgcattgtatggagcggttgctttcttcacagtgatcacatcagatatgttcaggggtttgaatgactacatgaaacttgaacctttgccagagggaatgcgtggcaaattgatgttgtgggctattctaatgttttgtggttgctacggatgggagcggctcctgcgatgggtgttcccggggaagattccggcgtgggagaagcgccagaaacaggcagttgcaagcttggagaaaaaacaccactagaattcttttagttgtctgcacttctttaccctttgatgcccatttcgatacttggtagtacatactgatcatgtcttgtcatggtttcaatctaatctgtagcctaggggaattttggcagtgaaagccctaaatgatagcatagagggtcacttatcaggattgttaaattttcggttacaatatgaaagttaatattagatggcaatgcatatcgggtgatgtacaaggcaaaatacagaaactatgccaggatttccttcattcttctactcttacaatgcgcattgatcttaatgtgtacaccctatgagaaaaggaatccctgtattctgctgctttatttatttatttatttaataatagcgtaaacatccatgttggtacagcgaaatgttggttacagcgaaagtatcaagacggaggaagggcaaaaggatcaagatgaagagtaaaattttcttttctattttttgtgtaaattaaattctaaaccaaagcttaatagtgtgatgaagcgttttgtaccttaattttcatgacaaatactagcatgacaatttgatgtataagcttaaatcattttgaattgaattgttcaaatataa

SEQ ID NO: 62968 - DNA, 4418 bp, Zea Mays
atacttttgtcatactttagctttagcatcttcaccatacagttgagtgtctctcggatccacctgtttttgctctgtacaaactttgcttaaattacgaaagaaaaaggaaaaggaaaagtctctcgagaattcgaaataattggaattagatcgtcgtggggattccacatcgtaaccactgaagacgaggcggcggacgagacggagagcagaaccgcgcagcgaagcagcagcggcgacaagccctcgcgtcggtagaggcgccgtccgccgtccgccccctcaactccggtagccgctggccgctgcaggtcgagtcccgtcgagccgactcgcgcttcccgatctgggtggccgcggcgccggcatggcgcggttcgaggtgaacggcaagtcggtgcaaggcgtggacttgctgcggcggcgccactggccgtcgcgcctcgacttctggcccttccttgcactctatgcgctctggctgctgcttgctgtcccggcgctcgacttcactgacgctctcatcatccttgccgcgctctccgctgctcacattctcaccttcctcttcaccgcctggttcgtcgatttccgtgccttcgtcgggtactctaaggtcaaggatatccatgccgctaacacgtgtaaggtgactcctgctaagttctcggggtcaaaggagattgtacctctgcacaaacagaaaaatgtggcctcaacttcagctgcaggtgagacagaggagatttactttgattttcggaagcagaggttcatctactcggctgagaaagataactttttaaaactccggtacccaacgaaggaattgatcggtcattatggcaagggcactggttatggaactgaggccaagattagcaccgcagtggacaagtggggcagaaatgtgttttttgtgttgctctatggtgcctggatgcgtattggtactacagtttgtttacacttttcatgcttttcctgtttgagtctactatggcaaagaataggctgaagacattgactgagctaagacgtgtgaaagttgatagccagattgtgttgacctatagatgtgggaaatgggttaaagtccctggaactgaactactaccaggagatattgtgtcaataggccgctcaactagtggtgaagatagatctgtaccagcagatatgctattgttagctgggtctgcaatagtaaatgaagctattcttacaggagaatctactccacagtggaaggtttcaattgctggacgtggtcctgatgatatgctatctataaggcgagataagaaccatatcctatttggtggcactaaagtattgcaacacactgcagataagtctgtaaatcttcgatcacctgatggtggctgtctagcttttgtattgaggactggatttgagactagccaagggaaattgatgaggactatcttattttcaactgagagggttactgcaaataacaaagaaagtggcctgtttatactctttttgcttttctttgcaatcattgcgtccggttatgtgcttgtgaagggattagaggacccaacaaggagcagatataaacttttattgagctgttcgttgattattacttctgtgataccaccggaattgccaatggagctctccatagcagtcaatacatctttaattgcattggctcggcatggtattttctgcacagagccattcagaataccatttgctgggaaggttgacatatgctgctttgataagacagggactctgacatcagatgatatggaatttcaaggtattgttacatcggaaggtgatgacttaatatctgatgcaaataagctgcctctccgaactcaagaagtgctttccagttgccatgcactggtatttgttgacaacaagctggttggcgatcccctagaaaaggctgctataaagggcatagactggatctacacatctgatgagaaggccatgtccaaaaagcctggtggtcaacctgttcaaattgtgcacagataccattttgcttctcacttgaagagaatgtctgttatcgtccgtattcagcagaaattttacgctttcattaagggtgcaccagagaccatccaagagaaattagttgatttacctgctgcatatgtggagacatataagaaatacacacggcaaggttctcgggtcttggctcttgcatataaattgcttcctgagatgcctgttagtgaagttagaagtttggaaagggatcaagtagagagcgatctaacatttgctggttttgcggtcttcaattgtcctataaggagcgactctggtgctgtcctacaagaactgggacaatcttcccatgacttggtcatgatcaccggagaccaagctttgactgcctgccatgttgctagccaagtacatatatcttccaaacctgttttgattttgacacggataaagactggtggttttgagtgggtttcgccagatgaaactgatagagctccatacagtgctgtggaggttgcagtgttatcagaatctcatgacctttgtattaatggggactgttttgaaatgctacaaagtactgaggctgttctccaggttatcccttatgtgaaggttttttcacgtgttgctccagaacaaaaagaacttgtactaactacattcaaaagtgttgggagggtgacactgatgtgtggagatggaaccaatgatgttggtgcactgaagcaggcacatgtcggcgttgctcttttgaatgctgaaccagttcagaaagtggattcaaaatctaaagctgaaaataaatctgggaaattgaaaaacaagaagcctgctaatgaagcatcatcacaagtgactccggtagctaatagttctggtaaagcatccagcagcctttccttgactgctgctgagaggcagcgagaaaagctgcagaagatgttggatgaaatgaatgatgaaagtgatggtcgttcagcaccaattgttaagcttggtgatgcttctatggcttcacctttcacagcaaagcatgcatctgttacccctactcttgatatcatccgtcagggaagaagcaccctagtcactacacttcaaatgttcaagattcttgggctcaattgccttgcgacagcttacgttctcagtgtcatgtacttggatggtgtcaaactgggcgatgttcaggctacaattagtggtgtcttcactgcagccttcttcctcttcatctccaatgctcggccactccaaacgctgtctgcagagcggcctcagcctaacatattctgtgcatacgttctgctctcgattcttggccagttcgccatgcacatattcttccttatcacggctgtcaatgaagcatcaaagcatatgccagaggaatgcattgagcctgactcagacttccatccaaaccttgtgaatacggtttcgtacatggtgaacatgatgatccaggtggcaacctttgctgtaaactacatgggccacccatttaatcagagcatatccgagaacaagcccttcaagtatgcattgtatggagcggttgctttcttcacagtgatcacatcagatatgttcaggggtttgaatgactacatgaaacttgaacctttgccagagggaatgcgtggcaaattgatgttgtgggctattctaatgttttgtggttgctacggatgggagcggctcctgcgatgggtgttcccggggaagattccggcgtgggagaagcgccagaaacaggcagttgcaagcttggagaaaaaacaccactagaattcttttagttgtctgcacttctttaccctttgatgcccatttcgatacttggtagtacatactgatcatgtcttgtcatggtttcaatctaatctgtagcctaggggaattttggcagtgaaagccctaaatgatagcatagagggtcacttatcaggattgttaaattttcggttacaatatgaaagttaatattagatggcaatgcatatcgggtgatgtacaaggcaaaatacagaaactatgccaggatttccttcattcttctactcttacaatgcgcattgatcttaatgtgtacaccctatgagaaaaggaatccctgtattctgctgctttatttatttatttatttaataatagcgtaaacatccatgttggtacagcgaaatgttggttacagcgaaagtatcaagacggaggaagggcaaaaggatcaagatgaagagtaaaattttcttttctattttttgtgtaaattaaattctaaaccaaagcttaatagtgtgatgaagcgttttgtaccttaattttcatgacaaatactagcatgacaatttgatgtataagcttaaatcattttgaattgaattgttcaaatataa

SEQ ID NO: 62969 - DNA, 4573 bp, Zea Mays
atacttttgtcatactttagctttagcatcttcaccatacagttgagtgtctctcggatccacctgtttttgctctgtacaaactttgcttaaattacgaaagaaaaaggaaaaggaaaagtctctcgagaattcgaaataattggaattagatcgtcgtggggattccacatcgtaaccactgaagacgaggcggcggacgagacggagagcagaaccgcgcagcgaagcagcagcggcgacaagccctcgcgtcggtagaggcgccgtccgccgtccgccccctcaactccggtagccgctggccgctgcaggtcgagtcccgtcgagccgactcgctccgcagcgcttcccgatctgggtggccgcggcgccggcatggcgcggttcgaggtgaacggcaagtcggtgcaaggcgtggacttgctgcggcggcgccactggccgtcgcgcctcgacttctggcccttccttgcactctatgcgctctggctgctgcttgctgtcccggcgctcgacttcactgacgctctcatcatccttgccgcgctctccgctgctcacattctcaccttcctcttcaccgcctggttcgtcgatttccgtgccttcgtcgggtactctaaggtcaaggatatccatgccgctaacacgtgtaaggtgactcctgctaagttctcggggtcaaaggagattgtacctctgcacaaacagaaaaatgtggcctcaacttcagctgcaggtgagacagaggagatttactttgattttcggaagcagaggttcatctactcggctgagaaagataactttttaaaactccggtacccaacgaaggaattgatcggtcattatggcaagggcactggttatggaactgaggccaagattagcaccgcagtggacaagtggggcagaaatattcgaatatccacagcccacatttcagaaattaatgaaggagcaaatcatggaaccattttttgttttccaggttttttgtgttgctctatggtgcctggatgcgtattggtactacagtttgtttacacttttcatgcttttcctgtttgagtctactatggcaaagaataggctgaagacattgactgagctaagacgtgtgaaagttgatagccagattgtgttgacctatagatgtgggaagtatgaattctccatttcatttaatttttttctgtttcagcatatatcccatcctaattgcatgttctttgttcagatgggttaaagtccctggaactgaactactaccaggagatattgtgtcaataggccgctcaactagtggtgaagatagatctgtaccagcagatatgctattgttagctgggtctgcaatagtaaatgaagctattcttacaggagaatctactccacagtggaaggtttcaattgctggacgtggtcctgatgatatgctatctataaggcgagataagaaccatatcctatttggtggcactaaagtattgcaacacactgcagataagtctgtaaatcttcgatcacctgatggtggctgtctagcttttgtattgaggactggatttgagactagccaagggaaattgatgaggactatcttattttcaactgagagggttactgcaaataacaaagaaagtggcctgtttatactctttttgcttttctttgcaatcattgcgtccggttatgtgcttgtgaagggattagaggacccaacaaggagcagatataaacttttattgagctgttcgttgattattacttctgtgataccaccggaattgccaatggagctctccatagcagtcaatacatctttaattgcattggctcggcatggtattttctgcacagagccattcagaataccatttgctgggaaggttgacatatgctgctttgataagacagggactctgacatcagatgatatggaatttcaaggtattgttacatcggaaggtgatgacttaatatctgatgcaaataagctgcctctccgaactcaagaagtgctttccagttgccatgcactggtatttgttgacaacaagctggttggcgatcccctagaaaaggctgctataaagggcatagactggatctacacatctgatgagaaggccatgtccaaaaagcctggtggtcaacctgttcaaattgtgcacagataccattttgcttctcacttgaagagaatgtctgttatcgtccgtattcagcagaaattttacgctttcattaagggtgcaccagagaccatccaagagaaattagttgatttacctgctgcatatgtggagacatataagaaatacacacggcaaggttctcgggtcttggctcttgcatataaattgcttcctgagatgcctgttagtgaagttagaagtttggaaagggatcaagtagagagcgatctaacatttgctggttttgcggtcttcaattgtcctataaggagcgactctggtgctgtcctacaagaactgggacaatcttcccatgacttggtcatgatcaccggagaccaagctttgactgcctgccatgttgctagccaagtacatatatcttccaaacctgttttgattttgacacggataaagactggtggttttgagtgggtttcgccagatgaaactgatagagctccatacagtgctgtggaggttgcagtgttatcagaatctcatgacctttgtattaatggggactgttttgaaatgctacaaagtactgaggctgttctccaggttatcccttatgtgaaggttttttcacgtgttgctccagaacaaaaagaacttgtactaactacattcaaaagtgttgggagggtgacactgatgtgtggagatggaaccaatgatgttggtgcactgaagcaggcacatgtcggcgttgctcttttgaatgctgaaccagttcagaaagtggattcaaaatctaaagctgaaaataaatctgggaaattgaaaaacaagaagcctgctaatgaagcatcatcacaagtgactccggtagctaatagttctggtaaagcatccagcagcctttccttgactgctgctgagaggcagcgagaaaagctgcagaagatgttggatgaaatgaatgatgaaagtgatggtcgttcagcaccaattgttaagcttggtgatgcttctatggcttcacctttcacagcaaagcatgcatctgttacccctactcttgatatcatccgtcagggaagaagcaccctagtcactacacttcaaatgttcaagattcttgggctcaattgccttgcgacagcttacgttctcagtgtcatgtacttggatggtgtcaaactgggcgatgttcaggctacaattagtggtgtcttcactgcagccttcttcctcttcatctccaatgctcggccactccaaacgctgtctgcagagcggcctcagcctaacatattctgtgcatacgttctgctctcgattcttggccagttcgccatgcacatattcttccttatcacggctgtcaatgaagcatcaaagcatatgccagaggaatgcattgagcctgactcagacttccatccaaaccttgtgaatacggtttcgtacatggtgaacatgatgatccaggtggcaacctttgctgtaaactacatgggccacccatttaatcagagcatatccgagaacaagcccttcaagtatgcattgtatggagcggttgctttcttcacagtgatcacatcagatatgttcaggggtttgaatgactacatgaaacttgaacctttgccagagggaatgcgtggcaaattgatgttgtgggctattctaatgttttgtggttgctacggatgggagcggctcctgcgatgggtgttcccggggaagattccggcgtgggagaagcgccagaaacaggcagttgcaagcttggagaaaaaacaccactagaattcttttagttgtctgcacttctttaccctttgatgcccatttcgatacttggtagtacatactgatcatgtcttgtcatggtttcaatctaatctgtagcctaggggaattttggcagtgaaagccctaaatgatagcatagagggtcacttatcaggattgttaaattttcggttacaatatgaaagttaatattagatggcaatgcatatcgggtgatgtacaaggcaaaatacagaaactatgccaggatttccttcattcttctactcttacaatgcgcattgatcttaatgtgtacaccctatgagaaaaggaatccctgtattctgctgctttatttatttatttatttaataatagcgtaaacatccatgttggtacagcgaaatgttggttacagcgaaagtatcaagacggaggaagggcaaaaggatcaagatgaagagtaaaattttcttttctattttttgtgtaaattaaattctaaaccaaagcttaatagtgtgatgaagcgttttgtaccttaattttcatgacaaatactagcatgacaatttgatgtataagcttaaatcattttgaattgaattgttcaaatataa

SEQ ID NO: 62970 - DNA, 2218 bp, Zea Mays
atacttttgtcatactttagctttagcatcttcaccatacagttgagtgtctctcggatccacctgtttttgctctgtacaaactttgcttaaattacgaaagaaaaaggaaaaggaaaagtctctcgagaattcgaaataattggaattagatcgtcgtggggattccacatcgtaaccactgaagacgaggcggcggacgagacggagagcagaaccgcgcagcgaagcagcagcggcgacaagccctcgcgtcggtagaggcgccgtccgccgtccgccccctcaactccggtagccgctggccgctgcaggtcgagtcccgtcgagccgactcgcgcttcccgatctgggtggccgcggcgccggcatggcgcggttcgaggtgaacggcaagtcggtgcaaggcgtggacttgctgcggcggcgccactggccgtcgcgcctcgacttctggcccttccttgcactctatgcgctctggctgctgcttgctgtcccggcgctcgacttcactgacgctctcatcatccttgccgcgctctccgctgctcacattctcaccttcctcttcaccgcctggttcgtcgatttccgtgccttcgtcgggtactctaaggtcaaggatatccatgccgctaacacgtgtaaggtgactcctgctaagttctcggggtcaaaggagattgtacctctgcacaaacagaaaaatgtggcctcaacttcagctgcaggtgagacagaggagatttactttgattttcggaagcagaggttcatctactcggctgagaaagataactttttaaaactccggtacccaacgaaggaattgatcggtcattatggcaagggcactggttatggaactgaggccaagattagcaccgcagtggacaagtggggcagaaatgtattcgaatatccacagcccacatttcagaaattaatgaaggagcaaatcatggaaccattttttgttttccaggttttttgtgttgctctatggtgcctggatgcgtattggtactacagtttgtttacacttttcatgcttttcctgtttgagtctactatggcaaagaataggctgaagacattgactgagctaagacgtgtgaaagttgatagccagattgtgttgacctatagatgtgggaaatgggttaaagtccctggaactgaactactaccaggagatattgtgtcaataggccgctcaactagtggtgaagatagatctgtaccagcagatatgctattgttagctgggtctgcaatagtaaatgaagctattcttacaggagaatctactccacagtggaaggtttcaattgctggacgtggtcctgatgatatgctatctataaggcgagataagaaccatatcctatttggtggcactaaagtattgcaacacactgcagataagtctgtaaatcttcgatcacctgatggtggctgtctagcttttgtattgaggactggatttgagactagccaagggaaattgatgaggactatcttattttcaactgagagggttactgcaaataacaaagaaagtggcctgtttatactctttttgcttttctttgcaatcattgcgtccggttatgtgcttgtgaagggattagaggacccaacaaggagcagatataaacttttattgagctgttcgttgattattacttctgtgataccaccggaattgccaatggagctctccatagcagtcaatacatctttaattgcattggctcggcatggtattttctgcacagagccattcagaataccatttgctgggaaggttgacatatgctgctttgataagacagggactctgacatcagatgatatggaatttcaaggtattgttacatcggaaggtgatgacttaatatctgatgcaaataagctgcctctccgaactcaagaagtgctttccagttgccatgcactggtatttgttgacaacaagctggttggcgatcccctagaaaaggctgctataaagggcatagactggatctacacatctgatgagaaggccatgtccaaaaagcctggtggtcaacctgttcaaattgtgcacagataccattttgcttctcacttgaagagaatgtctgttatcgtccgtattcagcagaaattttacgctttcattaagaattttcccaaaacagcaatgtcgagtcttcaggaaaaaaat

SEQ ID NO: 62971 - DNA, 1138 bp, Zea Mays
  misc_feature (1138)..(1138): n is a, c, g, or t
cacacccaaacccgtggcgcggggcagccggcagggcgcgccttcgccaccacaattccacaaagagacctcgcgccccaccagtctaatctcccgcgggcgggcagataacggctcgcggtacggaaagggcgagagagggggagcggagagcaccagtccaccgagaggcgcggagcaggagggcacacatggaactggaggaggcggtgccgccggccgcgatggtgggggaggacaacgcggcggcgccgacccaagactttgggctccccgctgagctgatagccgtgctgccatcggacccgttcgctcagctggacgtagcgcgcaagatcacctccatcgcgctctcgcaccgcctcggcctcctcgaggccgaagcagcgcgcctgcgctcgcagctcgccgaacgcgacgccgaggccgaggacctccgggagcacgtcgagcagctcgacgccgcgctcgccgtcgccaccggccgcctccgccacgccgaggaggaaaaggacgcactgcagcgggacaactctgagctgtccaacaccgttaggaagttgaacagagatgtcgccaagttggaagttttcaagaagacacttgtgcagtcactccaggaagatgacagcagtgataatactgctcccagggaaagagctgcagcagcttcaaatttctcctctgcaccatcagattctgcattttcgacttccaaatcatcacaggtttcagaaaccgcaagttcagtttcagaggaaaataaccaagttgacccagatgcacctaggcggccaccccggccacatgtatttttgcaatcatacaacagcacaccgaggatgactcccccagactcacctccaaggcgttttgcatcggtatcaccgccaaggcgacattcaatctctgttacatcgatgaatatgtttaatgacaggtcctcaggcttttctggtcagcatagctctccatttgacgctccaagtcaaacaggacgaacaagagttgatggaaaggagttctttcgtcaggtcagaaatagattatcttatgagcagtttggtgcattcctggctaatgtgaaggagctgaacgcacataggcagaccagagaggataccttaagacaagcttn

SEQ ID NO: 62972 - DNA, 1221 bp, Zea Mays
  misc_feature (1221)..(1221): n is a, c, g, or t
cacacccaaacccgtggcgcggggcagccggcagggcgcgccttcgccaccacaattccacaaagagacctcgcgccccaccagtctaatctcccgcgggcgggcagataacggctcgcggtacggaaagggcgagagagggggagcggagagcaccagtccaccgagaggcgcggagcaggagggcacacatggaactggaggaggcggtgccgccggccgcgatggtgggggaggacaacgcggcggcgccgacccaagactttgggctccccgctgagctgatagccgtgctgccatcggacccgttcgctcagctggacgtagcgcgcaagatcacctccatcgcgctctcgcaccgcctcggcctcctcgaggccgaagcagcgcgcctgcgctcgcagctcgccgaacgcgacgccgaggccgaggacctccgggagcacgtcgagcagctcgacgccgcgctcgccgtcgccaccggccgcctccgccacgccgaggaggaaaagctgcgtgatttgggcaactcaaattacttatagtcgaatgcttcttcaccttctgatcgtggacgatggacgtacaggacgcactgcagcgggacaactctgagctgtccaacaccgttaggaagttgaacagagatgtcgccaagttggaagttttcaagaagacacttgtgcagtcactccaggaagatgacagcagtgataatactgctcccagggaaagagctgcagcagcttcaaatttctcctctgcaccatcagatgaagattctgcattttcgacttccaaatcatcacaggtttcagaaaccgcaagttcagtttcagaggaaaataaccaagttgacccagatgcacctaggcggccaccccggccacatgtatttttgcaatcatacaacagcacaccgaggatgactcccccagactcacctccaaggcgttttgcatcggtatcaccgccaaggcgacattcaatctctgttacatcgatgaatatgtttaatgacaggtcctcaggcttttctggtcagcatagctctccatttgacgctccaagtcaaacaggacgaacaagagttgatggaaaggagttctttcgtcaggtcagaaatagattatcttatgagcagtttggtgcattcctggctaatgtgaaggagctgaacgcacataggcagaccagagaggataccttaagacaagcttn

SEQ ID NO: 62973 - DNA, 3868 bp, Zea Mays
ctcgtattccccttgcgtgcaaagctcactccccgtgccctcgccacgggcacccgaggaaagcctcgtgcactcgcggataggcagtgggccctgggtggaagagagtttgctccggggacgcgaagccgggtggggagaggcaaaccgggtgggatttcttgggattatttaagggcgagggagggagataggcacacgaaagcaacagcgaggagagagaagggaaaagggtgaaggaagccagggcccagggagttgttgaatttcggttctggtcggcgtcggaggggaagggacgacgagcggcgaggaagaggtgtgcgaggggaggagggatatggtggccagctgagtctgcggattgcggcggcagcggggatcggaggcagtgaggggcggcggcactcggatggtactggctttcgccagccccggaggcggcgatcgtggatgggcagcggcgggattgcggggcgggggttgtaggagcggtggcggcggggaagttggactcggagcgggtgcttgtgctggtctccgggctggggcagggagaggaggtgagggagcggcggggagggatgaggcgggggaagggggcaaggaatgggttgctgccgagttcgctgcggatcatatcgtcctgcctcaagacggtgacctccaacgccggctccgtcgcgtccagcgtgcgctcggccggcgcctccgtcgccgcatccatctcctcccaggcagaggacgagaaggatcaggttttgtgggctggattcgataaactagagcttcatccatcatcattcaagcatgtcctgcttgttggttattcaaatgggtttcaagtgcttgatgttgaggatgctgcaaatgtttgtgaattggtctcaaaacatgatggcccagttacgtttttacaaatgcaacccactccagtcggctctgaaggcattgaaggattcagagcatcacatcccatgcttctagttgttgctggtgatgagacaaacggcctgggtgcgattcaaggtggtcgcttaagtgctcttatcagagacacaaacagtgagcatcaagctgtaaattgcatttcaaccccaacagttgtccgtttctactctttgaagtctcacacctatgtacatgttcttcgattccggtctgctgtatatttagttcgctgcagtcctaggattgttgctgtagcacttgcagcacaaatctactgctttgacgctgttactcttgagaacaagctcagcgtcttgtcatatcctttgcaaggtgcacctggggtaaatattgggtatggcccgatggctgttggccccagatggttagcctatgccacaaatactcctttattgtcaaacacaggccgcctaagtccacagaacctcacaccttcgccaggagtgagcccatctacttctcccagcagtggaagtttagttgctagatatgcaatggagtctagcaagcagttagcttctggtattattgacatgggatatacattttcaaagtactgccaggaacttctgccagatggttctaactcccctttgtcatcgagcccaggcaggagatctggtaaaattctttccagtgtgcatccactggaagctgacaatgcaggcatggtagtcatcaaggatttcacatccaaaattgttgtctcacagtttaaggctcacacaagatcatgccaacctgcattgctaatggctcaggcgcaacacgttatgattggacagcttctcatgttcatctctataaactgtatcgtggcatgacatcagctgtcatacaagacatctcgtttagtcattttagtcaatggatatctattgtttcatctcgagtcaaggccatggtggtcaaagccatcctttcttatggaccaacagcttcaccaagttccctcaactgtgacacattcggttgtcagtaggataaagaataacacttctggttggctaaataatgtcagcaatgtggctgcttctgcaagtggaaaactatctgtaccatctggcgctgtaactgctgttttccataattccatctaccagggttctttgccagttccatctaaggctaatgctttagagcatctactggtgtattcgccatctggtcatgtcattcaacatgaacttttaccttcttcaggttctgagtcctctggtagcagcccaagagttggttcaggtcctaacttgcaactacaagatgatgagatgcatgttactgctgaaccaattcaatggtgggatgtgtgccgtaggacaaactggccagaaagagatgaaaacattgccaacattgtattgtataaccaaagaagcagtatgatggctatgggtgcttctgactgtgaagatagcgagcattcggattccactgcatcaaatgatggtatctctgggaaagagattatgagaatccgagaaaggtcaagctggtatctatctaatgcagaagtacagataaactcgtggcggattcccatctggcagaaatctaagatttgcttctatgtgatgggctatcctgctgcagagttggtcgaatcagttagcagtggtggtggagaaattgagattgagaagttacctcttcacgaggttgagatcaggagaagggaattgctccctgtattcaagcagttccaatattctgatcgacattccagtgataggaatattgcaaatggaggctttcagaatgccttgtcccacatcagtaatgcacagaatagctctgtaaaggataatggtgaatatgaaaccaaaccggtggctttgtctgggttttacgcagagaatgggaacaatggctatatatccacgccacctgaaacaaaagcgtctatcagatcattgagcagctattctctcttggatggacatgtggacggaatgctgtctccaaatagcgcatcacacaagccagaaacaacaaataattctgtgctcagcaatgctgcaagcactgatgtacaaaatgggtgtctcaccactgtcgattctggacagcaggaggcgtctcattctcacagctcagtggagtttacccagtatttccaagagggctattgtaaaatatcagaactcgatgactgccgtgagttaactgaagctgttactgatgctgacagcagcagcagccactgcgagagagagaagcccgaggaagatggggataacgatgatttgctcggaggagtttttgccttcagcgaagaaggttgaacttactatatactgccttacttgagatcgagatataacgaaaaatgtgctcaaaacaaaacattcagtgtgcaatagtatgtaggggatggctttcatggaataaagctgtgtggaatcgatcatctggtacatatttttcaaggagttggtgttgtcgagaagttgctattgcctgccgtaacaccagttccttagcgttggtttgtacatatactgtaagacccatttgttttgtgccatacttccgggacatttgggtggttctggatctcgtaccttggcagccgtatttgttgaccgcctctgccagggcctgtgaatgttccatgtttatttgtacatatactctctgttttttttgggagaaaggaaaaaaaatgtagtgacaaattaactttataaacattcagtaaaggatttgcgttcatgatgatgtgcttatttgcatgtgctaggctcgctcctgtgtccgtcttcgtagtttgtacccgtgtctctttgatggagtcgagaaagttcccatttccaatccggtagacactgcatgcttccaagtattcttctctgaccacttgtctcactgttgtctttttttcttttaacgaaga

SEQ ID NO: 62974 - DNA, 3895 bp, Zea Mays
ctcgtattccccttgcgtgcaaagctcactccccgtgccctcgccacgggcacccgaggaaagcctcgtgcactcgcggataggcagtgggccctgggtggaagagagtttgctccggggacgcgaagccgggtggggagaggcaaaccgggtgggatttcttgggattatttaagggcgagggagggagataggcacacgaaagcaacagcgaggagagagaagggaaaagggtgaaggaagccagggcccagggagttgttgaatttcggttctggtcggcgtcggaggggaagggacgacgagcggcgaggaagaggtgtgcgaggggaggagggatatggtggccagctgagtctgcggattgcggcggcagcggggatcggaggcagtgaggggcggcggcactcggatggtactggctttcgccagccccggaggcggcgatcgtggatgggcagcggcgggattgcggggcgggggttgtaggagcggtggcggcggggaagttggactcggagcgggtgcttgtgctggtctccgggctggggcagggagaggaggtgagggagcggcggggagggatgaggcgggggaagggggcaaggaatgggttgctgccgagttcgctgcggatcatatcgtcctgcctcaagacggtgacctccaacgccggctccgtcgcgtccagcgtgcgctcggccggcgcctccgtcgccgcatccatctcctcccaggcagaggacgagaaggatcaggttttgtgggctggattcgataaactagagcttcatccatcatcattcaagcatgtcctgcttgttggttattcaaatgggtttcaagtgcttgatgttgaggatgctgcaaatgtttgtgaattggtctcaaaacatgatggcccagttacgtttttacaaatgcaacccactccagtcggctctgaaggcattgaaggattcagagcatcacatcccatgcttctagttgttgctggtgatgagacaaacggcctgggtgcgattcaaggtggtcgcttaagtgctcttatcagagacacaaacagtgagcatcaagctgtaaattgcatttcaaccccaacagttgtccgtttctactctttgaagtctcacacctatgtacatgttcttcgattccggtctgctgtatatttagttcgctgcagtcctaggattgttgctgtagcacttgcagcacaaatctactgctttgacgctgttactcttgagaacaagctcagcgtcttgtcatatcctttgcaaggtgcacctggggtaaatattgggtatggcccgatggctgttggccccagatggttagcctatgccacaaatactcctttattgtcaaacacaggccgcctaagtccacagaacctcacaccttcgccaggagtgagcccatctacttctcccagcagtggaagtttagttgctagatatgcaatggagtctagcaagcagttagcttctggtattattgacatgggatatacattttcaaagtactgccaggaacttctgccagatggttctaactcccctttgtcatcgagcccaggcaggagatctggtaaaattctttccagtgtgcatccactggaagctgacaatgcaggcatggtagtcatcaaggatttcacatccaaaattgttgtctcacagtttaaggctcacacaagatcatgccaacctgcattgctaatggctcaggcgcaacacgttatgattggacagcttctcatgttcatctctataaactgtatcgtggcatgacatcagctgtcatacaagacatctcgtttagtcattttagtcaatggatatctattgtttcatctcgagtcaaggccatggtggtcaaagccatcctttcttatggaccaacagcttcaccaagttccctcaactgtgacacattcggttgtcagtaggataaagaataacacttctggttggctaaataatgtcagcaatgtggctgcttctgcaagtggaaaactatctgtaccatctggcgctgtaactgctgttttccataattccatctaccagggttctttgccagttccatctaaggctaatgctttagagcatctactggtgtattcgccatctggtcatgtcattcaacatgaacttttaccttcttcaggttctgagtcctctggtagcagcccaagagttggttcaggtcctaacttgcaactacaagatgatgagatgcatgttactgctgaaccaattcaatggtgggatgtgtgccgtaggacaaactggccagaaagagatgaaaacattgccaacattgtattgtataaccaaagaagcagtatgatggctatgggtgcttctgactgtgaagatagcgagcattcggattccactgcatcaaatgatggtatctctgggaaagagattatgagaatccgagaaaggtcaagctggtatctatctaatgcagaagtacagataaactcgtggcggattcccatctggcagaaatctaagatttgcttctatgtgatgggctatcctgctgcagagttggtcgaatcagttagcagtggtggtggagaaattgagattgagaagttacctcttcacgaggttgagatcaggagaagggaattgctccctgtattcaagcagttccaatattctgatcgacattccagtgataggaatattgcaaatggaggctttcagaatgccttgtcccacatcagtaatgcacagaatagctctgtaaaggataatggtgaatatgaaaccaaaccggtggctttgtctgggttttacgcagacacgaggaaaacagctaacacaaatgagaatgggaacaatggctatatatccacgccacctgaaacaaaagcgtctatcagatcattgagcagctattctctcttggatggacatgtggacggaatgctgtctccaaatagcgcatcacacaagccagaaacaacaaataattctgtgctcagcaatgctgcaagcactgatgtacaaaatgggtgtctcaccactgtcgattctggacagcaggaggcgtctcattctcacagctcagtggagtttacccagtatttccaagagggctattgtaaaatatcagaactcgatgactgccgtgagttaactgaagctgttactgatgctgacagcagcagcagccactgcgagagagagaagcccgaggaagatggggataacgatgatttgctcggaggagtttttgccttcagcgaagaaggttgaacttactatatactgccttacttgagatcgagatataacgaaaaatgtgctcaaaacaaaacattcagtgtgcaatagtatgtaggggatggctttcatggaataaagctgtgtggaatcgatcatctggtacatatttttcaaggagttggtgttgtcgagaagttgctattgcctgccgtaacaccagttccttagcgttggtttgtacatatactgtaagacccatttgttttgtgccatacttccgggacatttgggtggttctggatctcgtaccttggcagccgtatttgttgaccgcctctgccagggcctgtgaatgttccatgtttatttgtacatatactctctgttttttttgggagaaaggaaaaaaaatgtagtgacaaattaactttataaacattcagtaaaggatttgcgttcatgatgatgtgcttatttgcatgtgctaggctcgctcctgtgtccgtcttcgtagtttgtacccgtgtctctttgatggagtcgagaaagttcccatttccaatccggtagacactgcatgcttccaagtattcttctctgaccacttgtctcactgttgtctttttttcttttaacgaaga

SEQ ID NO: 62975 - DNA, 1756 bp, Zea Mays
aaaacacgatacggtggccttccctgctcacacacagcgaatcaacgctgaattcaccatccaacggactgcacccaacatgcttgcgaacgtctgccggcggcggctcaccatccccctctccccaatcctcgccgccgccgccgccgccgccagcggcaagaatcccatccactccaaccacgcgcgcgccctcctctctcaaagctactactcgtccgccgttcaggcggcgcccgaccgcgagccctgccccactacggtctcctacctggtttcctgcggtgtctcccccgccgtcgccgccgctcgcaaggtccgcatccgggacacggaccgggccgacgcagttcgggccctcctgcgcaagtacggcttctccgaggcggatatcacccgcacggtgcgtttagacccgctgctgctcaccttcgatccagaccgcaccattcgccccaagctcgacttcttcgtctcgctcgggatccagccccgcttgctcgccaccgagccccacatcctcgcccgcagcctggaaaaacacatcataccctgcatcgagtttttccgcaccatccttcgtaccgatgacaacatccgcatcgccgtctcccgcgtgccccgcgcgctcatgaccgatatcgagagcaccatgcgccccgccgtcgaggcgttcctcagccacggtctctccatggaagccatcgccaagcttctcatgattcacatgggaatgatcaagacaccgccggagcgcatccgcgaggccttccatgacctcaaggcgctcggcctccgcgtcacggatacgggcttcctctacggcttccgcgtcatttgcagccttaggagggagactatggtgcgcaaggtggcggttttcaagagcttcggggtgtccgaatctgaccttttcagggcgttcaagacgcagcccaccatactgctcgtcggagatgagaccataaagaagaagttcaggtttttcttggatgtgatgaagcttgagatagctgatgtgatggcgcagccactgactctggcgttgagcttggagaagaatatcatgccaaggtgcgccgtgctgagcatattgatgaaggagggtaagcttaagcggacacagaagttgattccaccactgctttccaattctagggtcttctcggagaggtatgtgttgaggcatgctaaggatgtgcctgatgttgttaaggcatttgagggcaagattaaatttcaagggtttggggaatcagaggttaggacttctgtgccactgaatgactgaagcccaaaccccaggattctgaaatcatgcttatttgttagaggaacatgtacgttgtgacgttctcagctgtggtcgatctggcatgtgtggcctgccagttcttaaatcatgctgtggttcatatgcttatgacccggatggatttgttcattttgaaactctgattatttgtactgctctgctgagtggaaatgctcatgttactggaagttctgtgattttcttctctccccaaatgtaatattcaccctatcgattttgttttggttagtgagaactatgctgatgatgtgccagtcctccggatatgttatggtattttagtgtagttaaatctgatcacgtatggggaatctgaatatttgtgactggagtcaatctgattcttctgagatcaaatttgttctttgttagggaccatctttcatttcagacaaatttgttgtgaggcggaagtccatt

SEQ ID NO: 62976 - DNA, 1385 bp, Zea Mays
cgccacacggatggtataagagtaaagacaaccttttcgccgaaccccccctcggaaggatggcggcggcggtttccagggccatctgcgtccagaaaccgggctccaaatgcagcagggacagggaagcgacctccttcgcccgccgaacggtcgcggcgccgaggcccccgcgcgccaaagccgccggcgtcatccgctccgactccggcgcgggacggggcccagcagtgctcgccgctgagggcccgtcgttgacgccgcgtcgatacagacgaccaaaaagagcaaatggcgcctcagtctcccgcgcgcaagctacaacggttcagggtccggtgctgcggcggctgagccgtctaccgtgggagacaccttggaacgggaggagggcggcggcacagaggcaggcgcttcggctgatgagtcatccaaccggaagcagccgccccctgttgaccccaagattgagaaggagctcaagaaggtagttcagaagactgcggcaacctttgcaccaagggcgtccacgaaaacaaagaaccctgctgtccctggaagtaccctgtacaccgtctttgaagtccagggctatgtttccatgctgttgggcggagcactttccttcaatctcatattcccatcgaatgagccagacatctggaggttaatgggaatgtggtccatttggatgttcactataccttcgcttcgggctcgtgactgctccaataaagagaaagaagctctcaactacttatttctcctgattcctctgatcaacgttatgattccattcttcgtgaagtcctttgctgttgtttggtcagcagatacagttgctttcttcgtgatgtatgcatggaagcttggatggctgcaaaggttgaaatgaagatttttggtgtgctctcttggtgatcttggatatttggtttgaaaaggtggagtcggtagcttttttgctgagagaaacatttgtcctcaaaattttcacatcttttggagggagctgcatgattagtttattccaagatttagttcatatagccttttatatcttgtgtatatgcagggagtacgaaaaaacagcctttcacatttaggccttgttcggttagcttccaatccacatggattgagtgggattgggtgggtttaaatcccaactaagtcaaactctttcttaattttttccaatctcatccaattcatgggtaacgggattaaccgaacaaggccttaagtgataaatatatgtacctgaagtctgaacatttttgttgactacgaactgaacagctctaaatggttcttgatttctcaatactttttgtcccagacaatatctatgttgactgctttttctgaaaatgaaacggggt

SEQ ID NO: 62977 - DNA, 1339 bp, Zea Mays
gcctcgtcgtccggagccacaggcctggagacgtcctggataaggtgaccagccgctgcgataggggcgcgtgtgaaccccgtcgcgccacacggatggtataagagtaaagacaaccttttcgccgaaccccccctcggaaggatggcggcggcggtttccagggccatctgcgtccagaaaccgggctccaaatgcagcagggacagggaagcgacctccttcgcccgccgaacggtcgcggcgccgaggcccccgcgcgccaaagccgccggcgtcatccgctccgactccggcgcgggacggggcccagcagtgctcgccgctgagggcccgtcgttgacgccgcgtcgatacagacgaccaaaaagagcaaatggcgcctcagtctcccgcgcgcaagctacaacggttcagggtccggtgctgcggcggctgagccgtctaccgtgggagacaccttggaacgggaggagggcggcggcacagaggcaggcgcttcggctgatgagtcatccaaccggaagcagccgccccctgttgaccccaagattgagaaggagctcaagaaggtagttcagaagactgcggcaacctttgcaccaagggcgtccacgaaaacaaagaaccctgctgtccctggaagtaccctgtacaccgtctttgaagtccagggctatgtttccatgctgttgggcggagcactttccttcaatctcatattcccatcgaatgagccagacatctggaggttaatgggaatgtggtccatttggatgttcagtaactataccttcgcttcgggctcgtgactgctccaataaagagaaagaagctctcaactacttatttctcctgattcctctgatcaacgttatgattccattcttcgtgaagtcctttgctgttgtttggtcagcagatacagttgctttcttcgtgatgtatgcatggaagcttggatggctgcaaaggttgaaatgaagatttttggtgtgctctcttggtgatgtgtgtatgaaagcttggatatttggtttgaaaaggtggagtcggtagcttttttgctgagagaaacatttgtcctcaaaattttcacatcttttggagggagctgcatgattagtttattccaagatttagttcatatagccttttatatcttgtgtatatgcagggagtacgaaaaaacagccttaagtgataaatatatgtacctgaagtctgaacatttttgttgactacgaactgaacagctctaaatggttcttgatttctcaatactttttgtcccagacaatatctatgttgactgctttttctgaaaatgaaacggggt

SEQ ID NO: 62978 - DNA, 3124 bp, Zea Mays
ggcatcggcatgtcatggacatcccccgctcactgttcgaagagaagcttgagcacatgaaggaatccaaggggctgaagaacgacaccgacctcacggcctctgacctcaaagagctcgtgggtcagtacaaggaggtctacctctcagccaagggagagccattcccctcagaccccaagaagcagctggagctggcagtgctggctgtgttcaactcgtgggagagccccagggccaagaagtacaggagcatcaaccagatcactggcctcaggggcaccgccgtgaacgtgcagtgcatggtgttcggcaacatggggaacacttctggcaccggcgtgctcttcaccaggaaccccaacaccggagagaagaagctgtatggcgagttcctggtgaacgctcagggtgaggatgtggttgccggaataagaaccccagaggaccttgacgccatgaagaacctcatgccacaggcctacgacgagcttgttgagaactgcaacatcctggagagccactataaggaaatgcaggatatcgagttcactgtccaggaaaacaggctgtggatgttgcagtgcaggacagggaaacgtacgggcaaaagtgccgtgaagatcgccgtggacatggttaacgagggccttgttgagccccgctcagcgatcaagatggtagagccaggccacctggaccagcttctccatcctcagtttgagaacccgtcggcgtacaaggatcaagtcattgccactggtctgccagcctcacctggggctgctgtgggccaggttgtgttcactgctgaggatgctgaagcatggcattcccaagggaaagctgctattctggtaagggcggagaccagccctgaggacgttggtggcatgcacgctgctgtggggattcttacagagaggggtggcatgacttcccacgctgctgtggtcgcacgtgggtgggggaaatgctgcgtctcgggatgctcaggcattcgcgtaaacgatgcggagaagctcgtgacgatcggaggccatgtgctgcgcgaaggtgagtggctgtcgctgaatgggtcgactggtgaggtgatccttgggaagcagccgctttccccaccagcccttagtggtgatctgggaactttcatggcctgggtggatgatgttagaaagctcaaggtcctggctaacgccgatacccctgatgatgcattgactgcgcgaaacaatggggcacaaggaattggattatgccggacagagcacatgttctttgcttcagacgagaggattaaggctgtcaggcagatgattatggctcccacgcttgagctgaggcagcaggcgctcgaccgtctcttgccgtatcagaggtctgacttcgaaggcattttccgtgctatggatggactcccggtgaccatccgactcctggaccctcccctccacgagttccttccagaagggaacatcgaggacattgtaagtgaattatgtgctgagacgggagccaaccaggaggatgccctcgcgcgaattgaaaagctttcagaagtaaacccgatgcttggcttccgtgggtgcaggcttggtatatcgtaccctgaattgacagagatgcaagcccgggccatttttgaagctgctatagcaatgaccaaccagggtgttcaagtgttcccagagataatggttcctcttgttggaacaccacaggaactggggcatcaagtgactcttatccgccaagttgctgagaaagtgttcgccaatgtgggcaagactatcgggtacaaagttggaacaatgattgagatccccagggcagctctggtggctgatgagatagcggagcaggctgaattcttctccttcggaacgaacgacctgacgcagatgacctttgggtacagcagggatgatgtgggaaagttcattcccgtctatcttgctcagggcatcctccaacatgaccccttcgaggtcctggaccagaggggagtgggcgagctggtgaagtttgctacagagaggggccgcaaagctaggcctaacttgaaggtgggcatttgtggagaacacggtggagagccttcgtctgtggccttcttcgcgaaggctgggctggattacgtttcttgctcccctttcagggttccgattgctaggctagctgcagctcaggtgcttgtctgaggctgcctcctcgttggcaaccggattgcctgctgctggtggatgtggtgatcaacagtattattacagagccatgctatgtgaacattactagtagcagtgctcataaaagctacaatcccatctcccttttttttccagtcatgtaaaacttccaaactgctccatggttcaaaactctgttcttcaatacatcatcaattatcgattatatacgtggcaaggttttttctttgtttgcttttttcttttctttctggcatgtgtttttttggttttcttggtgtgtgtgtgaggtgtgcatgtcgctgttgaggcccttgctgcacagaccacctcaaactttaagcctcgaaaaagctggtactatttttttagaactctggagtctggtcaatatgcaattgactggtttgcttctgaggctcttcttgcattcatgcctttacggccactctttggcacctgtaacacaggtaaaaaaaatgttaaaagatggttcaggaacacagcagttttcaagccagggaaactgtactgtacagaaaccaagagatcgttcgacatacctgtgcccgcacatctacctaacattctcgaggaccattgccgatcaaaggcccacacatcgtcttcttgttccggcagttgataagaacctagtacataagagacagtacatcatcaaaataaggagcaggtgaaaagcaccatctgcagtatgcagtatgcaacctggcacatggcatactatgtgatactgtacatgagtacaggaaaggatagcttattacaatatcggtgagttacgacacacaaattatagacatttgtcaggataaagaagttatgccgttttgttgcgcagtgtcccacgccatgattaatccaaaccactgattgactcatttttttcggggatg

SEQ ID NO: 62979 - DNA, 3361 bp, Zea Mays
ctcctcgcttccattcccgtccgccggttgttgttactgctagcttgtcccactagctaggtgcagtaggtgcctagttttgcgcgcatcgcgtcgcgtcgacgacgacccatcctccaccgcgctgccgtggccgcaaccaaggctggatggagcttttgtctgtttgccaggccagccgttgctttgggttaaaagtgcaaaaaaaaatgatgaaggtcacgctacgaactaaacagaccatatacgtcatggacatcccccgctcactgttcgaagagaagcttgagcacatgaaggaatccaaggggctgaagaacgacaccgacctcacggcctctgacctcaaagagctcgtgggtcagtacaaggaggtctacctctcagccaagggagagccattcccctcagaccccaagaagcagctggagctggcagtgctggctgtgttcaactcgtgggagagccccagggccaagaagtacaggagcatcaaccagatcactggcctcaggggcaccgccgtgaacgtgcagtgcatggtgttcggcaacatggggaacacttctggcaccggcgtgctcttcaccaggaaccccaacaccggagagaagaagctgtatggcgagttcctggtgaacgctcagggtgaggatgtggttgccggaataagaaccccagaggaccttgacgccatgaagaacctcatgccacaggcctacgacgagcttgttgagaactgcaacatcctggagagccactataaggaaatgcaggatatcgagttcactgtccaggaaaacaggctgtggatgttgcagtgcaggacagggaaacgtacgggcaaaagtgccgtgaagatcgccgtggacatggttaacgagggccttgttgagccccgctcagcgatcaagatggtagagccaggccacctggaccagcttctccatcctcagtttgagaacccgtcggcgtacaaggatcaagtcattgccactggtctgccagcctcacctggggctgctgtgggccaggttgtgttcactgctgaggatgctgaagcatggcattcccaagggaaagctgctattctggtaagggcggagaccagccctgaggacgttggtggcatgcacgctgctgtggggattcttacagagaggggtggcatgacttcccacgctgctgtggtcgcacgtgggtgggggaaatgctgcgtctcgggatgctcaggcattcgcgtaaacgatgcggagaagctcgtgacgatcggaggccatgtgctgcgcgaaggtgagtggctgtcgctgaatgggtcgactggtgaggtgatccttgggaagcagccgctttccccaccagcccttagtggtgatctgggaactttcatggcctgggtggatgatgttagaaagctcaaggtcctggctaacgccgatacccctgatgatgcattgactgcgcgaaacaatggggcacaaggaattggattatgccggacagagcacatgttctttgcttcagacgagaggattaaggctgtcaggcagatgattatggctcccacgcttgagctgaggcagcaggcgctcgaccgtctcttgccgtatcagaggtctgacttcgaaggcattttccgtgctatggatggactcccggtgaccatccgactcctggaccctcccctccacgagttccttccagaagggaacatcgaggacattgtaagtgaattatgtgctgagacgggagccaaccaggaggatgccctcgcgcgaattgaaaagctttcagaagtaaacccgatgcttggcttccgtgggtgcaggcttggtatatcgtaccctgaattgacagagatgcaagcccgggccatttttgaagctgctatagcaatgaccaaccagggtgttcaagtgttcccagagataatggttcctcttgttggaacaccacaggaactggggcatcaagtgactcttatccgccaagttgctgagaaagtgttcgccaatgtgggcaagactatcgggtacaaagttggaacaatgattgagatccccagggcagctctggtggctgatgagatagcggagcaggctgaattcttctccttcggaacgaacgacctgacgcagatgacctttgggtacagcagggatgatgtgggaaagttcattcccgtctatcttgctcagggcatcctccaacatgaccccttcgaggtcctggaccagaggggagtgggcgagctggtgaagtttgctacagagaggggccgcaaagctaggcctaacttgaaggtgggcatttgtggagaacacggtggagagccttcgtctgtggccttcttcgcgaaggctgggctggattacgtttcttgctcccctttcagggttccgattgctaggctagctgcagctcaggtgcttgtctgaggctgcctcctcgttggcaaccggattgcctgctgctggtggatgtggtgatcaacagtattattacagagccatgctatgtgaacattactagtagcagtgctcataaaagctacaatcccatctcccttttttttccagtcatgtaaaacttccaaactgctccatggttcaaaactctgttcttcaatacatcatcaattatcgattatatacgtggcaaggttttttctttgtttgcttttttcttttctttctggcatgtgtttttttggttttcttggtgtgtgtgtgaggtgtgcatgtcgctgttgaggcccttgctgcacagaccacctcaaactttaagcctcgaaaaagctggtactatttttttagaactctggagtctggtcaatatgcaattgactggtttgcttctgaggctcttcttgcattcatgcctttacggccactctttggcacctgtaacacaggtaaaaaaaatgttaaaagatggttcaggaacacagcagttttcaagccagggaaactgtactgtacagaaaccaagagatcgttcgacatacctgtgcccgcacatctacctaacattctcgaggaccattgccgatcaaaggcccacacatcgtcttcttgttccggcagttgataagaacctagtacataagagacagtacatcatcaaaataaggagcaggtgaaaagcaccatctgcagtatgcagtatgcaacctggcacatggcatactatgtgatactgtacatgagtacaggaaaggatagcttattacaatatcggtgagttacgacacacaaattatagacatttgtcaggataaagaagttatgccgttttgttgcgcagtgtcccacgccatgattaatccaaaccactgattgactcatttttttcggggatg

SEQ ID NO: 62980 - DNA, 2959 bp, Zea Mays
acccgttcgcctctcaccttttcgctgtactcactcgccacacacaccccctctccagctccgttggagctccggacagcagcaggcgcggggcggtcacgtagtaagcagctctcggctccctctccccttgctccatatgatcgtgcaacccatcgagctacgcgcgtggactgccttccctgggtcggcgcaggaggggatcggaaggatggcggcgtcggtttccagggccatctgcgttcagaagccgggctcaaaatgcaccagggacagggaagcgacctccttcgcccgccgatcggtcgcagcgccgaggcccccgcacgccaaagccgccagcattgctcgccgctgagggccgtcgttgacgccgcgccgatacagacgaccaaaaagagggtgttccacttcggcaagggcaagagcgagggcaacaagaccatgaaggaactggtcatggacatcccccgctcactgttcgaagagaagcttgagcacatgaaggaatccaaggggctgaagaacgacaccgacctcacggcctctgacctcaaagagctcgtgggtcagtacaaggaggtctacctctcagccaagggagagccattcccctcagaccccaagaagcagctggagctggcagtgctggctgtgttcaactcgtgggagagccccagggccaagaagtacaggagcatcaaccagatcactggcctcaggggcaccgccgtgaacgtgcagtgcatggtgttcggcaacatggggaacacttctggcaccggcgtgctcttcaccaggaaccccaacaccggagagaagaagctgtatggcgagttcctggtgaacgctcagggtgaggatgtggttgccggaataagaaccccagaggaccttgacgccatgaagaacctcatgccacaggcctacgacgagcttgttgagaactgcaacatcctggagagccactataaggaaatgcaggatatcgagttcactgtccaggaaaacaggctgtggatgttgcagtgcaggacagggaaacgtacgggcaaaagtgccgtgaagatcgccgtggacatggttaacgagggccttgttgagccccgctcagcgatcaagatggtagagccaggccacctggaccagcttctccatcctcagtttgagaacccgtcggcgtacaaggatcaagtcattgccactggtctgccagcctcacctggggctgctgtgggccaggttgtgttcactgctgaggatgctgaagcatggcattcccaagggaaagctgctattctggtaagggcggagaccagccctgaggacgttggtggcatgcacgctgctgtggggattcttacagagaggggtggcatgacttcccacgctgctgtggtcgcacgtgggtgggggaaatgctgcgtctcgggatgctcaggcattcgcgtaaacgatgcggagaagctcgtgacgatcggaggccatgtgctgcgcgaaggtgagtggctgtcgctgaatgggtcgactggtgaggtgatccttgggaagcagccgctttccccaccagcccttagtggtgatctgggaactttcatggcctgggtggatgatgttagaaagctcaaggtcctggctaacgccgatacccctgatgatgcattgactgcgcgaaacaatggggcacaaggaattggattatgccggacagagcacatgttctttgcttcagacgagaggattaaggctgtcaggcagatgattatggctcccacgcttgagctgaggcagcaggcgctcgaccgtctcttgccgtatcagaggtcctggaccagaggggagtgggcgagctggtgaagtttgctacagagaggggccgcaaagctaggcctaacttgaaggtgggcatttgtggagaacacggtggagagccttcgtctgtggccttcttcgcgaaggctgggctggattacgtttcttgctcccctttcagggttccgattgctaggctagctgcagctcaggtgcttgtctgaggctgcctcctcgttggcaaccggattgcctgctgctggtggatgtggtgatcaacagtattattacagagccatgctatgtgaacattactagtagcagtgctcataaaagctacaatcccatctcccttttttttccagtcatgtaaaacttccaaactgctccatggttcaaaactctgttcttcaatacatcatcaattatcgattatatacgtggcaaggttttttctttgtttgcttttttcttttctttctggcatgtgtttttttggttttcttggtgtgtgtgtgaggtgtgcatgtcgctgttgaggcccttgctgcacagaccacctcaaactttaagcctcgaaaaagctggtactatttttttagaactctggagtctggtcaatatgcaattgactggtttgcttctgaggctcttcttgcattcatgcctttacggccactctttggcacctgtaacacaggtaaaaaaaatgttaaaagatggttcaggaacacagcagttttcaagccagggaaactgtactgtacagaaaccaagagatcgttcgacatacctgtgcccgcacatctacctaacattctcgaggaccattgccgatcaaaggcccacacatcgtcttcttgttccggcagttgataagaacctagtacataagagacagtacatcatcaaaataaggagcaggtgaaaagcaccatctgcagtatgcagtatgcaacctggcacatggcatactatgtgatactgtacatgagtacaggaaaggatagcttattacaatatcggtgagttacgacacacaaattatagacatttgtcaggataaagaagttatgccgttttgttgcgcagtgtcccacgccatgattaatccaaaccactgattgactcatttttttcggggatg

SEQ ID NO: 62981 - DNA, 3899 bp, Zea Mays
gtcgcgccccacggatggtataagaataaaggcattccgcgtgcaggattcacccgttcgcctctcaccttttcgctgtactcactcgccacacacaccccctctccagctccgttggagctccggacagcagcaggcgcggggcggtcacgtagaggggatcggaaggatggcggcgtcggtttccagggccatctgcgttcagaagccgggctcaaaatgcaccagggacagggaagcgacctccttcgcccgccgatcggtcgcagcgccgaggcccccgcacgccaaagccgccagcattgctcgccgctgagggccgtcgttgacgccgcgccgatacagacgaccaaaaagagggtgttccacttcggcaagggcaagagcgagggcaacaagaccatgaaggaactgctgggcggcaagggcgcgaacctggcggagatggcgagcatcgggctgtcggtgccgccggggttcacggtgtcgacggaggcgtgccagcagtaccaggacgccgggtgcgccctccccgcgggcctctgggccgagatcgtcgacggcctgcagtgggtggaggagtacatgggcgccaccctgggcgatccgcagcgcccgctcctgctctccgtccgctccggcgccgccgtgtccatgcccggcatgatggacacggtgctcaacctggggctcaacgacgaagtggccgccgggctggcggccaagagcggggagcgcttcgcctacgactccttccgccgcttcctcgacatgttcggcaacgtcgtcatggacatcccccgctcactgttcgaagagaagcttgagcacatgaaggaatccaaggggctgaagaacgacaccgacctcacggcctctgacctcaaagagctcgtgggtcagtacaaggaggtctacctctcagccaagggagagccattcccctcagaccccaagaagcagctggagctggcagtgctggctgtgttcaactcgtgggagagccccagggccaagaagtacaggagcatcaaccagatcactggcctcaggggcaccgccgtgaacgtgcagtgcatggtgttcggcaacatggggaacacttctggcaccggcgtgctcttcaccaggaaccccaacaccggagagaagaagctgtatggcgagttcctggtgaacgctcagggtgaggatgtggttgccggaataagaaccccagaggaccttgacgccatgaagaacctcatgccacaggcctacgacgagcttgttgagaactgcaacatcctggagagccactataaggaaatgcaggatatcgagttcactgtccaggaaaacaggctgtggatgttgcagtgcaggacagggaaacgtacgggcaaaagtgccgtgaagatcgccgtggacatggttaacgagggccttgttgagccccgctcagcgatcaagatggtagagccaggccacctggaccagcttctccatcctcagtttgagaacccgtcggcgtacaaggatcaagtcattgccactggtctgccagcctcacctggggctgctgtgggccaggttgtgttcactgctgaggatgctgaagcatggcattcccaagggaaagctgctattctggtaagggcggagaccagccctgaggacgttggtggcatgcacgctgctgtggggattcttacagagaggggtggcatgacttcccacgctgctgtggtcgcacgtgggtgggggaaatgctgcgtctcgggatgctcaggcattcgcgtaaacgatgcggagaagctcgtgacgatcggaggccatgtgctgcgcgaaggtgagtggctgtcgctgaatgggtcgactggtgaggtgatccttgggaagcagccgctttccccaccagcccttagtggtgatctgggaactttcatggcctgggtggatgatgttagaaagctcaaggtcctggctaacgccgatacccctgatgatgcattgactgcgcgaaacaatggggcacaaggaattggattatgccggacagagcacatgttctttgcttcagacgagaggattaaggctgtcaggcagatgattatggctcccacgcttgagctgaggcagcaggcgctcgaccgtctcttgccgtatcagaggtctgacttcgaaggcattttccgtgctatggatggactcccggtgaccatccgactcctggaccctcccctccacgagttccttccagaagggaacatcgaggacattgtaagtgaattatgtgctgagacgggagccaaccaggaggatgccctcgcgcgaattgaaaagctttcagaagtaaacccgatgcttggcttccgtgggtgcaggcttggtatatcgtaccctgaattgacagagatgcaagcccgggccatttttgaagctgctatagcaatgaccaaccagggtgttcaagtgttcccagagataatggttcctcttgttggaacaccacaggaactggggcatcaagtgactcttatccgccaagttgctgagaaagtgttcgccaatgtgggcaagactatcgggtacaaagttggaacaatgattgagatccccagggcagctctggtggctgatgagatagcggagcaggctgaattcttctccttcggaacgaacgacctgacgcagatgacctttgggtacagcagggatgatgtgggaaagttcattcccgtctatcttgctcagggcatcctccaacatgaccccttcgaggtcctggaccagaggggagtgggcgagctggtgaagtttgctacagagaggggccgcaaagctaggcctaacttgaaggtgggcatttgtggagaacacggtggagagccttcgtctgtggccttcttcgcgaaggctgggctggattacgtttcttgctcccctttcagggttccgattgctaggctagctgcagctcaggtgcttgtctgaggctgcctcctcgttggcaaccggattgcctgctgctggtggatgtggtgatcaacagtattattacagagccatgctatgtgaacattactagtagcagtgctcataaaagctacaatcccatctcccttttttttccagtcatgtaaaacttccaaactgctccatggttcaaaactctgttcttcaatacatcatcaattatcgattatatacgtggcaaggttttttctttgtttgcttttttcttttctttctggcatgtgtttttttggttttcttggtgtgtgtgtgaggtgtgcatgtcgctgttgaggcccttgctgcacagaccacctcaaactttaagcctcgaaaaagctggtactatttttttagaactctggagtctggtcaatatgcaattgactggtttgcttctgaggctcttcttgcattcatgcctttacggccactctttggcacctgtaacacaggtaaaaaaaatgttaaaagatggttcaggaacacagcagttttcaagccagggaaactgtactgtacagaaaccaagagatcgttcgacatacctgtgcccgcacatctacctaacattctcgaggaccattgccgatcaaaggcccacacatcgtcttcttgttccggcagttgataagaacctagtacataagagacagtacatcatcaaaataaggagcaggtgaaaagcaccatctgcagtatgcagtatgcaacctggcacatggcatactatgtgatactgtacatgagtacaggaaaggatagcttattacaatatcggtgagttacgacacacaaattatagacatttgtcaggataaagaagttatgccgttttgttgcgcagtgtcccacgccatgattaatccaaaccactgattgactcatttttttcggggatg

SEQ ID NO: 62982 - DNA, 2471 bp, Zea Mays
acccgttcgcctctcaccttttcgctgtactcactcgccacacacaccccctctccagctccgttggagctccggacagcagcaggcgcggggcggtcacgtagaggggatcggaaggatggcggcgtcggtttccagggccatctgcgttcagaagccgggctcaaaatgcaccagggacagggaagcgacctccttcgcccgccgatcggtcgcagcgccgaggcccccgcacgccaaagccgccagcattgctcgccgctgagggccgtcgttgacgccgcgccgatacagacgaccaaaaagagggtgttccacttcggcaagggcaagagcgagggcaacaagaccatgaaggaactgctgggcggcaagggcgcgaacctggcggagatggcgagcatcgggctgtcggtgccgccggggttcacggtgtcgacggaggcgtgccagcagtaccaggacgccgggtgcgccctccccgcgggcctctgggccgagatcgtcgacggcctgcagtgggtggaggagtacatgggcgccaccctgggcgatccgcagcgcccgctcctgctctccgtccgctccggcgccgccgtgtccatgcccggcatgatggacacggtgctcaacctggggctcaacgacgaagtggccgccgggctggcggccaagagcggggagcgcttcgcctacgactccttccgccgcttcctcgacatgttcggcaacgtcgtcatggacatcccccgctcactgttcgaagagaagcttgagcacatgaaggaatccaaggggctgaagaacgacaccgacctcacggcctctgacctcaaagagctcgtgggtcagtacaaggaggtctacctctcagccaagggagagccattcccctcagaccccaagaagcagctggagctggcagtgctggctgtgttcaactcgtgggagagccccagggccaagaagtacaggagcatcaaccagatcactggcctcaggggcaccgccgtgaacgtgcagtgcatggtgttcggcaacatggggaacacttctggcaccggcgtgctcttcaccaggaaccccaacaccggagagaagaagctgtatggcgagttcctggtgaacgctcagggtgaggatgtggttgccggaataagaaccccagaggaccttgacgccatgaagaacctcatgccacaggcctacgacgagcttgttgagaactgcaacatcctggagagccactataaggaaatgcaggatatcgagttcactgtccaggaaaacaggctgtggatgttgcagtgcaggacagggaaacgtacgggcaaaagtgccgtgaagatcgccgtggacatggttaacgagggccttgttgagccccgctcagcgatcaagatggtagagccaggccacctggaccagcttctccatcctcagtttgagaacccgtcggcgtacaaggatcaagtcattgccactggtctgccagcctcacctggggctgctgtgggccaggttgtgttcactgctgaggatgctgaagcatggcattcccaagggaaagctgctattctggtaagggcggagaccagccctgaggacgttggtggcatgcacgctgctgtggggattcttacagagaggggtggcatgacttcccacgctgctgtggtcgcacgtgggtgggggaaatgctgcgtctcgggatgctcaggcattcgcgtaaacgatgcggagaagctcgtgacgatcggaggccatgtgctgcgcgaaggtgagtggctgtcgctgaatgggtcgactggtgaggtgatccttgggaagcagccgctttccccaccagcccttagtggtgatctgggaactttcatggcctgggtggatgatgttagaaagctcaaggtcctggctaacgccgatacccctgatgatgcattgactgcgcgaaacaatggggcacaaggaattggattatgccggacagagcacatgttctttgcttcagacgagaggattaaggctgtcaggcagatgattatggctcccacgcttgagctgaggcagcaggcgctcgaccgtctcttgccgtatcagaggtctgacttcgaaggcattttccgtgctatggatggactcccggtgaccatccgactcctggaccctcccctccacgagttccttccagaagggaacatcgaggacattgtaagtgaattatgtgctgagacgggagccaaccaggaggatgccctcgcgcgaattgaaaagctttcagaagtaaacccgatgcttggcttccgtgggtgcaggcttggtatatcgtaccctgaattgacagagatgcaagcccgggccatttttgaagctgctatagcaatgaccaaccagggtgttcaagtgttcccagagataatggttcctcttgttggaacaccacagctaattataatagctgacgtttggta

SEQ ID NO: 62983 - DNA, 2144 bp, Zea Mays
atcatcaagtgattactgaagacttgtgtactgtggtgtgcagctttaaattagtttgcaagctaattgctatgcttatgtgataagtaatgtagctactgatcattcatttggataggtttatttagttattgccattttacatcatatatgatgtatgcatgtttatatctcgattaagtattaaggagcccttttataactagctagaaaagactgagctagtcttttctcggctaaaatgttatggtcaccccaatctatggtttcatctttgtcatcaaatctttccacttcagtcatggtctgccattcctcagtggtgtttaccccaataccccacaagcgcgtttgttacaaccatgtagaaatagtaaggttctatttacatcctcatgacattatgattaggtttgaagtagaagcactaccgtagacagttctttgtaattctgtcatgcatctgtggttctctaagcagtctttgccagaggggctgtatgttcttattagttcttcactaagagattacaataaagaattattcctttgattcttattttctaatagggtatactttagagctcatgaaaagcttatgaatcatattttcttgttttcacttttctttacccttcctgaaacaaacctttgtctgtgaagactatgtcctcaaatcagttggttataaccataccttacgattacttcgtccatgttctgtgacaggctgacagcagtctgatatctcgattattattttattgatgctttgcttgacacatacgatatcattcatactcccacaaccgcatagataaagcagtgttgtaacaccccgtccaatccctagaccggcggtacttactcctgccagctctctaggatcatatatcgtctccacagaccaacacaggtcttttgtgcgcactttgtcctcactcatacgcacccgagaaaactttccggtcggtcacccatcccaaattgctccaagccaagcacgcttgatttggaggttcttttgagataggcttccgaaaaaaagatgcaccttgttggtatgaatactctattaattctattaagccttgggccaggatatcccatcccaggggccattgatatcacaagggtggactcttttttctatgttaactacacccttgattttatgttatatcaaggaccaatctgctccacctattggtgtaaatttttgctttctgacaagctacctgttttactcgaccgcaatttgaatgcctttgctattcaaagagcaagaggactacatgaaatgaaacccagagctctccagtgttaatagaggtgcacggcagaagtgatgtctatgaaatgtagtacctgagcagacggctgaagttgatcaggacatgttggccctgcaactaaattttgaacctgctaccttttgttaaccattcttgttgtgcacacaagttatacagctggttatgggacataaagtcatagaagacatccagggcatttatcaagacgatacatcacactcaccatacatgatgcagcaaggcgaaggtgaggtgcctttgtgattggtatcgcggttccagcttcatcatagtggaggcactacatggagattttggctgaatatttattcagctgccatgcttttctgccatgttgggaaatcagcaagtttcattgttctcaagcaatcagcgctctcctttggaatctcaatagtggtgttagagctcaagtggcgatacatgcgaaatgtacttgtacagtacctcgtcgatcatatgaactgaaaggaaccaaacatgtaggagattttttcattagggtcattatagtggtgccgccgaggcatttctgtgttatctcgttttcaggctaaaaggcatgacctataatgttagcctttcgccgctaataattgacgttcgcaccagtttttaatgttcgtgcaatgattcttttgccaatcatacaagctgtactcacgatgactgtagttgtcgagcgtgtctgaaagtttttgtcttccttccatgtaccatggcctctcctttagcagctgcaaataattgtagggcctctgtcttattgctttcagattggaatccaggtgcttccaatttgtttgg

SEQ ID NO: 62984 - DNA, 1089 bp, Zea Mays
cacataaacataaatttgacattttggtaaggttctaacttctgacatagcagatattgtcataacaagtttttttaatggtgctggagcgcctgaggttcttgaagcactatttggctaaggacctgtaaggaccaatctgctccacctattggtgtaaatttttgctttctgacaagctacctgttttactcgaccgcaatttgaatgcctttgctattcaaagagcaagaggactacatgaaatgaaacccagagctctccagtgttaatagaggtgcacggcagaagtgatgtctatgaaatgtagtacctgagcagacggctgaagttgatcaggacatgttggccctgcaactaaattttgaacctgctaccttttgttaaccattcttgttgtgcacacaagttatacagctggttatgggacataaagtcatagaagacatccagggcatttatcaagacgatacatcacactcaccatacatgatgcagcaaggcgaaggtgaggtgcctttgtgattggtatcgcggttccagcttcatcatagtggaggcactacatggagattttggctgaatatttattcagctgccatgcttttctgccatgttgggaaatcagcaagtttcattgttctcaagcaatcagcgctctcctttggaatctcaatagtggtgttagagctcaagtggcgatacatgcgaaatgtacttgtacagtacctcgtcgatcatatgaactgaaaggaaccaaacatgtaggagattttttcattagggtcattatagtggtgccgccgaggcatttctgtgttatctcgttttcaggctaaaaggcatgacctataatgttagcctttcgccgctaataattgacgttcgcaccagtttttaatgttcgtgcaatgattcttttgccaatcatacaagctgtactcacgatgactgtagttgtcgagcgtgtctgaaagtttttgtcttccttccatgtaccatggcctctcctttagcagctgcaaataattgtagggcctctgtcttattgctttcagattggaatccaggtgcttccaatttgtttgg

SEQ ID NO: 62985 - DNA, 2370 bp, Zea Mays
aagaaacccatccagcacgccaggacgatgttggcctcctgcgctcctcccccgtccattccccacgcggatgagcggatccctccctagcctaaacccctcgcgccgccgccggcctacgccgccgcagcctcctcccatgtcccgccgccccgcctgttccctcctccctctgctccgaagccgccgctgcctttacgacgccaccaccgctaggcccttcacctccgtctctgtcccacccgacgtgatctcctccacctggccgccgcactccccgtcgcctcttcatcctccgcccgatccggccgggacgtggtgctcagcctcttgttcttctacctcgccggcgctcccgccctttaccgcatcccatctccgagccgccgtctccttgctcgccacctcgctcaccgcgctcccggggcctgacccggacccggtgtccgccctccacgaccactccttccctaccctcctcgccgtctcgccgctcgcgtcacttgagctcctctcgctgctccggtccaggcctcggttagggctcgctgtattctcattccgccgtgtgctctccccggtgccctctatcacggcctccttgacaactgcatcgaggtcttccacgcgctggagcgcgatcccaggtgcggtccgcctaacgtggactcgtacaacatcctcatcgccctgttcggtcgctccatcctcgttgaccacatggagcgcacgctccagtcgctggacgcttctggccaaccccgcactattggtacttacaatgcaatcatctctggttacctcaccgcatggatgtgggacaaaatggaagcgtcgtttcaggagatggtgtcgttccatgttgctccagatgctactacgcataagttgatgttaagaggatatgcacatgccgggatgatctgtaaaatggagcaagcttatgagcgtgcttgcaagcttggcataaaggttgacattttgcatatacgtgcaatgctgtgcgcatactgcaagttttaccatgtaggtagaatccaaaagattgaggatttgctcaagaagttgggtcctgatgattacaggccatggctaaatgtcctcttaattaaggtgtatgctcaggaggggttgaccgaggggatggagctgtatatttctgaggcattggaacgcaataccattgttaccgcagtaaaggtgatgcggtccatcatatgtaactattttcagtatgacgcggttgacagacttgcactttttgtccgacgggccgaagatgctggttggaagctgtgccggagtttgtaccactgcaagatggtgatgtatgggaagcactatcggttggaagagatgcatggggtgctcgatgagatggaatgtttgaagtttgatcgaacaaagaagacattttggatcatgtacaaggcatatgttagttgtggtaggaggactgaagccaacactataattggcatgatgtggaagcatgggtttgctgttcgtgacgacatgtctgatcaataacttgaccaatctgctccacctattggtgtaaatttttgctttctgacaagctacctgttttactcgaccgcaatttgaatgcctttgctattcaaagagcaagaggactacatgaaatgaaacccagagctctccagtgttaatagaggtgcacggcagaagtgatgtctatgaaatgtagtacctgagcagacggctgaagttgatcaggacatgttggccctgcaactaaattttgaacctgctaccttttgttaaccattcttgttgtgcacacaagttatacagctggttatgggacataaagtcatagaagacatccagggcatttatcaagacgatacatcacactcaccatacatgatgcagcaaggcgaagcaagtttcattgttctcaagcaatcagcgctctcctttggaatctcaatagtggtgttagagctcaagtggcgatacatgcgaaatgtacttgtacagtacctcgtcgatcatatgaactgaaaggaaccaaacatgtaggagattttttcattagggtcattatagtggtgccgccgaggcatttctgtgttatctcgttttcaggctaaaaggcatgacctataatgttagcctttcgccgctaataattgacgttcgcaccagtttttaatgttcgtgcaatgattcttttgccaatcatacaagctgtactcacgatgactgtagttgtcgagcgtgtctgaaagtttttgtcttccttccatgtaccatggcctctcctttagcagctgcaaataattgtagggcctctgtcttattgctttcagattggaatccaggtgcttccaatttgtttgg

SEQ ID NO: 62986 - DNA, 1599 bp, Zea Mays
ccaggacgatgttggcctcctgcgctcctcccccgtccattccccacgcggatgagcggatccctccctagcctaaacccctcgcgccgccgccggcctacgccgccgcagcctcctcccatgtcccgccgccccgcctgttccctcctccctctgctccgaagccgccgctgcctttacgacgccaccaccgctaggcccttcacctccgtctctgtcccacccgacgtgatctcctccacctggccgccgcactccccgtcgcctcttcatcctccgcccgatccggccgggacgtggtgctcagcctcttgttcttctacctcgccggcgctcccgccctttaccgcatcccatctccgagccgccgtctccttgctcgccacctcgctcaccgcgctcccggggcctgacccggacccggtgtccgccctccacgaccactccttccctaccctcctcgccgtctcgccgctcgcgtcacttgagctcctctcgctgctccggtccaggcctcggttagggctcgctgtattctcattccgccgtgtgctctccccggtgccctctatcacggcctccttgacaactgcatcgaggtcttccacgcgctggagcgcgatcccaggtgcggtccgcctaacgtggactcgtacaacatcctcatcgccctgttcggtcgctccatcctcgttgaccacatggagcgcacgctccagtcgctggacgcttctggccaaccccgcactattggtacttacaatgcaatcatctctggttacctcaccgcatggatgtgggacaaaatggaagcgtcgtttcaggagatggtgtcgttccatgttgctccagatgctactacgcataagttgatgttaagaggatatgcacatgccgggatgatctgtaaaatggagcaagcttatgagcgtgcttgcaagcttggcataaaggttgacattttgcatatacgtgcaatgctgtgcgcatactgcaagttttaccatgtaggtagaatccaaaagattgaggatttgctcaagaagttgggtcctgatgattacaggccatggctaaatgtcctcttaattaaggtgtatgctcaggaggggttgaccgaggggatggagctgtatatttctgaggcattggaacgcaataccattgttaccgcagtaaaggtgatgcggtccatcatatgtaactattttcagtatgacgcggttgacagacttgcactttttgtccgacgggccgaagatgctggttggaagctgtgccggagtttgtaccactgcaagatggtgatgtatgggaagcactatcggttggaagagatgcatggggtgctcgatgagatggaatgtttgaagtttgatcgaacaaagaagacattttggatcatgtacaaggcatatgttagttgtggtaggaggactgaagccaacactataattggcatgatgtggaagcatgggtttgctgttcgtgacgacatgtctgatcaataacttaattattggagatgctgagttcatatgttgtcgactccttcctgggacagcagtacatgcgccgccataggtccagaggtcggtt

SEQ ID NO: 62987 - DNA, 1573 bp, Zea Mays
ccaggacgatgttggcctcctgcgctcctcccccgtccattccccacgcggatgagcggatccctccctagcctaaacccctcgcgccgccgccggcctacgccgccgcagcctcctcccatgtcccgccgccccgcctgttccctcctccctctgctccgaagccgccgctgcctttacgacgccaccaccgctaggcccttcacctccgtctctgtcccacccgacgtgatctcctccacctggccgccgcactccccgtcgcctcttcatcctccgcccgatccggccgggacgtggtgctcagcctcttgttcttctacctcgccggcgctcccgccctttaccgcatcccatctccgagccgccgtctccttgctcgccacctcgctcaccgcgctcccggggcctgacccggacccggtgtccgccctccacgaccactccttccctaccctcctcgccgtctcgccgctcgcgtcacttgagctcctctcgctgctccggtccaggcctcggttagggctcgctgtattctcattccgccgtgtgctctccccggtgccctctatcacggcctccttgacaactgcatcgaggtcttccacgcgctggagcgcgatcccaggtgcggtccgcctaacgtggactcgtacaacatcctcatcgccctgttcggtcgctccatcctcgttgaccacatggagcgcacgctccagtcgctggacgcttctggccaaccccgcactattggtacttacaatgcaatcatctctggttacctcaccgcatggatgtgggacaaaatggaagcgtcgtttcaggagatggtgtcgttccatgttgctccagatgctactacgcataagttgatgttaagaggatatgcacatgccgggatgatctgtaaaatggagcaagcttatgagcgtgcttgcaagcttggcataaaggttgacattttgcatatacgtgcaatgctgtgcgcatactgcaagttttaccatgtaggtagaatccaaaagattgaggatttgctcaagaagttgggtcctgatgattacaggccatggctaaatgtcctcttaattaaggtgtatgctcaggaggggttgaccgaggggatggagctgtatatttctgaggcattggaacgcaataccattgttaccgcagtaaaggtgatgcggtccatcatatgtaactattttcagtatgacgcggttgacagacttgcactttttgtccgacgggccgaagatgctggttggaagctgtgccggagtttgtaccactgcaagatggtgatgtatgggaagcactatcggttggaagagatgcatggggtgctcgatgagatggaatgtttgaagtttgatcgaacaaagaagacattttggatcatgtacaaggcatatgttagttgtggtaggaggactgaagccaacactataattggcatgatgtggaagcatgggtttgctgttcgtgacgacatgtctgatcaataacttgatgcacactagagcacgacataggtgtacaactacaagaaagatctgcaacaagtgct

SEQ ID NO: 62988 - DNA, 1734 bp, Zea Mays
cagtccgtagattcgagtaatgcccactactaggcaaactttgtataaacaaagctactcaaagcatggatgatggatctcaggttttgaccggcccattcttgttgggccgacaaggattgtggaaggaatgggcggcccaggtttgcagctctgagtctctgaccgatcgctggcgtgcgtgcttgtgcttgtgcagggagtgacgaagcagatcggtggctcagtgcacgagctggcggcgaaggtggacgagtacgcccgcggcatgatcagcgggcccggctcctcgctcttcgaggagctcggtctctactacatcggccccgtcgacggccacaacatcgacgacctcatcaccatcctcaacgacgtcaagagcaccaagaccaccggccccgtcctcatccacgtcgtcaccgagaagggccgcggctacccctacgccgagcgagccgccgacaagtaccacggtgtcgccaagtttgatccggcgaccgggaagcagttcaagtcccccgccaagacgctgtcctacaccaactacttcgccgaggcgctcatcgccgaggcggagcaggacagcaagatcgtggccatccacgcggccatgggcggcggcacggggctcaactacttcctccgccgcttcccgagccggtgcttcgacgtcgggatcgcggagcagcacgccgtcacgttcgcggccggcctggcctgcgagggcctcaagcccttctgcgccatctactcgtctttcctgcagcgcggctacgaccaggtcgtgcacgacgtcgatctgcagaagctaccggtgcggttcgccatggacagggccgggctggtcggcgcggacgggccgacccactgcggtgcgttcgacgtcgcgtacatggcctgcctgcccaacatggtcgtcatggccccgtccgacgaggccgagctctgccacatggtcgccaccgccgcggccatcgacgaccgcccgtcctgcttccgctacccgagaggcaacggcgttggcgtcccgttgccgcccaactacaaaggcactcccctcgaggtcggcaaaggcaggatcctgcttgagggcgaccgggtggcgctgctggggtacgggtcggcagtgcagtactgcctgactgccgcgtccctggtgcagcgccacggcctcaaggtcaccgtcgccgacgcgaggttctgcaagccgctggaccacgccctgatcaggagcctggccaagtcccacgaggtgctcatcaccgtggaggaaggctccatcggcgggttcggctcgcacgtcgcccagttcatggccctggacggccttctcgacggcaaactcaagtggcgaccgctggtgcttcctgacaggtacatcgaccatggatcgccggccgatcagctggccgaggctgggctgacgccgtcacacatcgccgcgtcggtgttcaacatcctggggcagaacagggaggctcttgccatcatggcagtgccaaacgcgtagaacttgtgctgatctgggcctatagagatgattgtacattttgtcgttaactagagtgtctgaacttgggagattagtcttctttggatgaaagtgtcgccggaacaacagttaccgtttctttttttgaaagagaaaggcaaaagatttgccattccaatatattagaagaggtaaaaataaaactttataaacaggcacaaccccaaaaactcaacaataaa

SEQ ID NO: 62989 - DNA, 1688 bp, Zea Mays
cagtccgtagattcgagtaatgcccactactaggcaaactttgtataaacaaagctactcaaagcatggatgatggatctcaggtcgcagcaagttgactctagaaatagtttatcatgctactcgagctgtatccaagtttgactgacattgggagtgacgaagcagatcggtggctcagtgcacgagctggcggcgaaggtggacgagtacgcccgcggcatgatcagcgggcccggctcctcgctcttcgaggagctcggtctctactacatcggccccgtcgacggccacaacatcgacgacctcatcaccatcctcaacgacgtcaagagcaccaagaccaccggccccgtcctcatccacgtcgtcaccgagaagggccgcggctacccctacgccgagcgagccgccgacaagtaccacggtgtcgccaagtttgatccggcgaccgggaagcagttcaagtcccccgccaagacgctgtcctacaccaactacttcgccgaggcgctcatcgccgaggcggagcaggacagcaagatcgtggccatccacgcggccatgggcggcggcacggggctcaactacttcctccgccgcttcccgagccggtgcttcgacgtcgggatcgcggagcagcacgccgtcacgttcgcggccggcctggcctgcgagggcctcaagcccttctgcgccatctactcgtctttcctgcagcgcggctacgaccaggtcgtgcacgacgtcgatctgcagaagctaccggtgcggttcgccatggacagggccgggctggtcggcgcggacgggccgacccactgcggtgcgttcgacgtcgcgtacatggcctgcctgcccaacatggtcgtcatggccccgtccgacgaggccgagctctgccacatggtcgccaccgccgcggccatcgacgaccgcccgtcctgcttccgctacccgagaggcaacggcgttggcgtcccgttgccgcccaactacaaaggcactcccctcgaggtcggcaaaggcaggatcctgcttgagggcgaccgggtggcgctgctggggtacgggtcggcagtgcagtactgcctgactgccgcgtccctggtgcagcgccacggcctcaaggtcaccgtcgccgacgcgaggttctgcaagccgctggaccacgccctgatcaggagcctggccaagtcccacgaggtgctcatcaccgtggaggaaggctccatcggcgggttcggctcgcacgtcgcccagttcatggccctggacggccttctcgacggcaaactcaagtggcgaccgctggtgcttcctgacaggtacatcgaccatggatcgccggccgatcagctggccgaggctgggctgacgccgtcacacatcgccgcgtcggtgttcaacatcctggggcagaacagggaggctcttgccatcatggcagtgccaaacgcgtagaacttgtgctgatctgggcctatagagatgattgtacattttgtcgttaactagagtgtctgaacttgggagattagtcttctttggatgaaagtgtcgccggaacaacagttaccgtttctttttttgaaagagaaaggcaaaagatttgccattccaatatattagaagaggtaaaaataaaactttataaacaggcacaaccccaaaaactcaacaataaa

SEQ ID NO: 62990 - DNA, 2246 bp, Zea Mays
ctcgcccgcccgcccgaccgaccgctgtctcgctcgcctcgtctcgtctcgtctcgcttcgtctccgtttcctccgcacaccaccacagccgcgtcaagccgtcaaccaaccaaaccctagaaggctctcgcccccgtccccaatccttcgccgctccccgatcctcgccgcccgcaggccaaaaccccacgcctctccctcgacgccgggtatatccagtgtaatcactttgtcagaaatgccttctgcatccaagtccaagtcaaaagatagatcagctgcaaaagttgcaaaagagcaacccaaggtttctgcaaagccactgggaaatggtacgcttgcaagttcttataacaacctctctggaaagttccatgttctggaaccatcagcttctttgttgggtagccaaggcatcaataaattcaggaataccgatgagatagatgaacattctcgcagctcccatggtacaggggatttcgattgtgcctccaacaacggtagctgctctgacgagtcagaagatccaaaggaaaaaccaactagtagtgtgtctcgagtagagtctgttcctggatgtgatattgataaacgagagaaaatcagacagaaaaatgagaagaagcatcaaagacagaaggagaggcgtgcccaagaattgcacgagcgttgtaagggttatcttatgtctagaaaattggaggcacttgcgcagaagcttgttgcgatgggtttctcagcagatcaagcaacgatggcccttatacagaatgagggttgcgttgaggagtctgttacctggctctgcaactttgatggcagtgaggaagctaagcaacaacttgcagctgatcaacagtccggtgttaacttgaagattgatatagctgatgagctttcaaagattgtgagcttggaggtaaaatataagtgtacaaagcaagaagttgaaagagcagttgtttcctgtgaaggtgatctagaaagggctgatgaggccttgaagacacacaagcaagaatcaactgcagtcccaccaaagcctgagggatctagtgactcaagtgccttgcctaacaagcagcaagttgtacttgcacagaaccctgcaagggctcaaacaaatggattttcatcagtaggatctcagcagacgagaagagaggaggagataagctataagcttttgatgaatggtagtggtccaaaggatcctgcaattaaagggtttcagccaatggcagcaccaactaagccagatttgggccgtcagcaatttgttcaacctgagaagagacgtctcaatcccaactcgattccatcaattccttatgtggcatcatctcctttgcctgttgcagtgccacaactgaagtcagacatgcggcatgtggcaggaactaatgaggttaaaagttcgatgcccaatggaagcttgcgagagtcggtaattgtaatgcagcgtcctcaatctgcaggtaccaagcaaagcctaccatccactagccatagcatgtttgcgtcagaaccatctgcaagggattggtacttaaatggcgcatcaggtgtcaatatgatgttgaatgggggcttaggtcatggactaaggaatatgagcttggacagtgttagttctggcaggtcgtttgggcatgcaaaccatcaacaaagttttgtttctaatcctatagagttggctgccaatggttggggtggcacatggagttctggaggtacatcatcttcccgtcctgtggtgtcatcatttggggcgtttagagggtggagttcatccgagtcgtcccctgcattgcctcattctgattggagagccaatggggcagcaccttatgactacacctcagtagactggagcctggacacaacgttattgaacccagcagcaaagagcgagcggctgtcggacacatggtcaaccatgttcatgggtggcagatcaacaaggacacctgggaacctcagtggcgcaggcatagctgggttgcatgacagtaaccatccaatggatcctgctccatcacctcgtccatatgagtggcctactttctgcaggggaggatcttcctagttccccctaccatgtagtgaacttcgaatcgagttttctcagtccgttgggttggccaattttctcgtagtgatgactgatgagtgcagtctttgagactagacatcataaaatggcatgttcatttagatccccaaacatatcatattgact

SEQ ID NO: 62991 - DNA, 1388 bp, Zea Mays
aaaatgtagggccatgtgaaggtcgcgttcgttccttcgttccccaaggccttgccttgttctggttcagcatcagtgacgcttagcttcacaggaaccaggaccagcgaggtctctggctctctgcaacttgccatggggaccgcaacggcagcaatggacaggaatgcagatggagagcagggcaagaggaagaagaagggaggcttcaggaccatgccgctgatactaggttcttcgaccgggcagcaatagtgacggcgggcgacatctccccgtccgggcaaccagacccgtggcgcctgtcgacggtgcaccgcgtggaggagctcaagtccatcgtccgcatgctgcccatctggtcggccggcatcatgctggccaccgccagctcgcacaactacaccttcaccatcatgcaggcgcggaccatggaccggcacatggggccccacttccagctcccgccggcgacgctgtccatcttctcgaacgcggccatgctcgtcaccctggccttgtacgaccgcgtcttcgtgcccctggcgcgccgcgtcacgggcctgccgtccgggatcacctacttccagcgcatgggcatcgggctggccatctccgtgctcagcgtcgccacggcggcgctcgtggagaccaagcgccgcgacgccgccgcccggcacgggctcctggacagcccggccgccgtcgtcccgctcagcgtgttctggctggtgccccagttcgccgtccacggcgtcggcgacgccttctcgtccgtggggcacatggagttcctgtacgaccaggcgcccgagagcatgcgcagcagcgccgccgcgctcttctggctcgccgcctccatcgggaactacatgggcacggtgctcgtcacggcggtgcagcgcgccacgcgtgggcgcggcgagtggctccaggacaacatcaaccgcggcaggatcgacaactactactggctcgtcacctgcatcacgctactcaacttgggctactacctcgtctgcttctatttctacaccatgaagccgctggaggtggcggatgactgtgacaaggactgtgagctctcctccctccagaaaaatggcagtggcgcggcgctagtgtgatggtgtaattaactggaagactagaaagcaagaatggtcttgttgttaataactagctatatacaatcagcagcgctgcaatgcacacggattacaatttactatagggatattgtagtgtatatcgagagtttataactataagctgtggtcgagcatgcatacgtacggtcataggaagatacaaacgcaacgatcatgatcgtgatcatgcaagctaaaagcaccatcgcatacagtttagtgtattttattgtgtcc

SEQ ID NO: 62992 - DNA, 1857 bp, Zea Mays
gcccccgctcctacccgcacgcgctaattcccaccccgcaacggccgcacgccccgccgtccgccgcgcgcccacgcgcccctagacgccgccgcgaaatcaccgctcccgcacgcccacgccagcgaatctcgcacgcccgcaacggccgcatccaccgcacgacctgccgcacgacccgccgtccgccgcttccccccaatcccgcaaaggccgcccgcgccagcgaaaaccccgtcctccgcacgcccccgccgcgaaaccagccatcgcccgccgctcctcaagctcatccgtgaaacctccgcacaccatccgcgcgtgccctcgccccgcccagctgctacctccgtgaaatctctcgcccagctgctaccttcgcgcactctacaccgtcttgccgacgctgtcatgcccgcgtcgtcttgttgggcaccagatccgcgctgacatccgcgcccagatccagcgcacatgatgcccccgcctcccccgatccgcgcgtgccctcgcccagctgagcgcgtcgcaaaatctgcgccgacatccacgcgggcaaaccgccgcacacctacatcaaatagccggccttcgcagacctcctatggaagcatcgtgaaatacggcaccgcgaaagctccgcgacctatacagcttcctgtcggtgttggtgtcggtctgtaaagctccgcgacctatacagcttggtgttcccctacacgttcacccatcctcctgcctctcgggaataaaaagcatctgcttcttcatatagcagaggttagttgcgcaggcatagccaccactgggaggaatcattgatcgttcggtggctacaagcatttgggcagtcatccacaagctcatttggccacaacttatttggagcttcatagggatgccaactggtagggctatttcagcattttagcatgctcagtttactggtagagttgtgagtgagcttccatggtacgctagagctaccattgaccctgctatgtagaagcggggtgccggtggtgataaatcaagagaagcaacatgcacaaaaatatatggacaaagcgacttgtggttacaataaaagttatccgcaataggcaaacatgacagtcagaggggtatggatttgttgagttcttttctcatgcattaacagaaaaggctcttcataatttatatggtcatgtgatgccaaacactgaccaggcatctaagttgaactagacatcatatcaaaaggtgatggaactgaaggcaaccagcttaagcctatgattgatgtggaaatgattaatgtgactgcagcttaagcctaataatactccagcttcaaaaatattgaaagaagtcaagctgtctcaagaaatactgtgaatgctatcagggaggtgttggatgctccagcaactgcagatgtgagagtagcaaaaatgcttttggcagaagagatggtgagcatttagcgtttcaaatttaggaacatgtacagtccgtgagtcccatcccgggacatcttttccgacttactatattatgatgctaataacttctgatgtgtcccttgaaataatagaagttcagtggtgttctcattaaaaagtgtttctatgcactgaacatcaatcagattaccttgcctatgattttaatttggattagacaccactgtaattcgtaaacatgacactctggatattttggtagcgagtttccttaaaataggtgtatcaggacttctattctatgtaaaaaggtgaaaggttcatgttcaaacaaaattcttctatgacagcataggtggtggttgtaaagaaaaaacatcagatttcagagagcatccttttgtttttg

SEQ ID NO: 62993 - DNA, 1944 bp, Zea Mays
gcccccgctcctacccgcacgcgctaattcccaccccgcaacggccgcacgccccgccgtccgccgcgcgcccacgcgcccctagacgccgccgcgaaatcaccgctcccgcacgcccacgccagcgaatctcgcacgcccgcaacggccgcatccaccgcacgacctgccgcacgacccgccgtccgccgcttccccccaatcccgcaaaggccgcccgcgccagcgaaaaccccgtcctccgcacgcccccgccgcgaaaccagccatcgcccgccgctcctcaagctcatccgtgaaacctccgcacaccatccgcgcgtgccctcgccccgcccagctgctacctccgtgaaatctctcgcccagctgctaccttcgcgcactctacaccgtcttgccgacgctgtcatgcccgcgtcgtcttgttgggcaccagatccgcgctgacatccgcgcccagatccagcgcacatgatgcccccgcctcccccgatccgcgcgtgccctcgcccagctgagcgcgtcgcaaaatctgcgccgacatccacgcgggcaaaccgccgcacacctacatcaaatagccggccttcgcagacctcctatggaagcatcgtgaaatacggcaccgcgaaagctccgcgacctatacagcttcctgtcggtgttggtgtcggtctgtaaagctccgcgacctatacagcttggtgttcccctacacgttcacccatcctcctgcctctcgggaataaaaagcatctgcttcttcatatagcagaggttagttgcgcaggcatagccaccactgggaggaatcattgatcgttcggtggctacaagcttggggtggatccgaattccgacagagcttgcactctgtgcttatggaaatgtgtaagcagatggagatcgattgccactctggagcatttgggcagtcatccacaagctcatttggccacaacttatttggagcttcatagggatgccaactggtagggctatttcagcattttagcatgctcagtttactggtagagttgtgagtgagcttccatggtacgctagagctaccattgaccctgctatgtagaagcggggtgccggtggtgataaatcaagagaagcaacatgcacaaaaatatatggacaaagcgacttgtggttacaataaaagttatccgcaataggcaaacatgacagtcagaggggtatggatttgttgagttcttttctcatgcattaacagaaaaggctcttcataatttatatggtcatgtgatgccaaacactgaccaggcatctaagttgaactagacatcatatcaaaaggtgatggaactgaaggcaaccagcttaagcctatgattgatgtggaaatgattaatgtgactgcagcttaagcctaataatactccagcttcaaaaatattgaaagaagtcaagctgtctcaagaaatactgtgaatgctatcagggaggtgttggatgctccagcaactgcagatgtgagagtagcaaaaatgcttttggcagaagagatggtgagcatttagcgtttcaaatttaggaacatgtacagtccgtgagtcccatcccgggacatcttttccgacttactatattatgatgctaataacttctgatgtgtcccttgaaataatagaagttcagtggtgttctcattaaaaagtgtttctatgcactgaacatcaatcagattaccttgcctatgattttaatttggattagacaccactgtaattcgtaaacatgacactctggatattttggtagcgagtttccttaaaataggtgtatcaggacttctattctatgtaaaaaggtgaaaggttcatgttcaaacaaaattcttctatgacagcataggtggtggttgtaaagaaaaaacatcagatttcagagagcatccttttgtttttg

SEQ ID NO: 62994 - DNA, 2895 bp, Zea Mays
gcccccgctcctacccgcacgcgctaattcccaccccgcaacggccgcacgccccgccgtccgccgcgcgcccacgcgcccctagacgccgccgcgaaatcaccgctcccgcacgcccacgccagcgaatctcgcacgcccgcaacggccgcatccaccgcacgacctgccgcacgacccgccgtccgccgcttccccccaatcccgcaaaggccgcccgcgccagcgaaaaccccgtcctccgcacgcccccgccgcgaaaccagccatcgcccgccgctcctcaagctcatccgtgaaacctccgcacaccatccgcgcgtgccctcgccccgcccagctgctacctccgtgaaatctctcgcccagctgctaccttcgcgcactctacaccgtcttgccgacgctgtcatgcccgcgtcgtcttgttgggcaccagatccgcgctgacatccgcgcccagatccagcgcacatgatgcccccgcctcccccgatccgcgcgtgccctcgcccagctgagcgcgtcgcaaaatctgcgccgacatccacgcgggcaaaccgccgcacacctacatcaaatagccggccttcgcagacctcctatggaagcatcgtgaaatacggcaccgcgaaagctccgcgacctatacagcttcctgtcggtgttggtgtcggtctgtaaagctccgcgacctatacagcttggtgttcccctacacgttcacccatcctcctgcctctcgggaataaaaagcatctgcttcttcatatagcagaggttagttgcgcaggcatagccaccactgggaggaatcattgatcgttcggtggctacaaggtgagacaactgtgttaccagtttttgtgtgttgcaacatttcccacattccagttacgggtgacatgcgtagttgggataatagcagaggttagttgcgcaggcgtagccaccactgggaggaatcgttgatcgtcccatggctacaaggtgagacaactgggttaccagtttttgtgtgttgcaacatttcccacattccaattatgggtgacatgcgtagttgggataaaacgtagttgggataaaactgcataaagaagcatgtagaaagggaatgcgtactaattttctatgcattctttttactgtaggtcttaattattttgtcactggtagggatcttctgatgcaagctaattatttttgcttctgatccttgttccgagttgtttactctatagctacaatttagtggttcagaaatttagtgaaaaaataattgagacctttgaatcacattacctggcatcatatatgtagtgttcaatgtttgtaatttactgtcagtatgttaatttaagccgactgtgttatcttgcataacccactaacttctcaagcaaattgccccatctttgccacaatgctcaatgcacttcattcatggacgtccacttgagaattgacgactgaaactgaaaatacgtattttgtggacaatttagaggttcaggaataaagatgccgtctatatcagttattgggatcgtccgttagcagttattggactacaatagctcaaaattgccaatgaaaaatcacaatttgaggttgaatgcagtgtcatattttattggggttaaatactgtacaacctgtttcagattttattgaagttaataactgcaattcagtatgttagtctctggagaataatgtttttgtgtttcagtgaactccgtgtattttttgtcatgtgtattttgtgatgtgtttctggggaataagcttggggtggatccgaattccgacagagcttgcactctgtgcttatggaaatgtgtaagcagatggagatcgattgccactctggagcatttgggcagtcatccacaagctcatttggccacaacttatttggagcttcatagggatgccaactggtagggctatttcagcattttagcatgctcagtttactggtagagttgtgagtgagcttccatggtacgctagagctaccattgaccctgctatgtagaagcggggtgccggtggtgataaatcaagagaagcaacatgcacaaaaatatatggacaaagcgacttgtggttacaataaaagttatccgcaataggcaaacatgacagtcagaggggtatggatttgttgagttcttttctcatgcattaacagaaaaggctcttcataatttatatggtcatgtgatgccaaacactgaccaggcatctaagttgaactagacatcatatcaaaaggtgatggaactgaaggcaaccagcttaagcctatgattgatgtggaaatgattaatgtgactgcagcttaagcctaataatactccagcttcaaaaatattgaaagaagtcaagctgtctcaagaaatactgtgaatgctatcagggaggtgttggatgctccagcaactgcagatgtgagagtagcaaaaatgcttttggcagaagagatggtgagcatttagcgtttcaaatttaggaacatgtacagtccgtgagtcccatcccgggacatcttttccgacttactatattatgatgctaataacttctgatgtgtcccttgaaataatagaagttcagtggtgttctcattaaaaagtgtttctatgcactgaacatcaatcagattaccttgcctatgattttaatttggattagacaccactgtaattcgtaaacatgacactctggatattttggtagcgagtttccttaaaataggtgtatcaggacttctattctatgtaaaaaggtgaaaggttcatgttcaaacaaaattcttctatgacagcataggtggtggttgtaaagaaaaaacatcagatttcagagagcatccttttgtttttg

SEQ ID NO: 62995 - DNA, 1971 bp, Zea Mays
aattctcacgcccatcacaagtgaaggaaggctactggtgctggtgccggcactggcagccggtgcctaaccatatctacctcatataactttccactggccgtagtcggcttcttctctgaactgaagcaggggggagacaagcgccatggctgaggatgccagaggagagaagaaggatgcctacgcggcggcgccggcgtccaagttgccggcgaagcaacggggagggttcaggagcatgcccttcatcctagcgaatgacttctgcgaccggcttgcttcggtggggttcacgacgaacctgatctcgtacctcaccctgcagctgcacctgccgctcgtggaggcctccaacatcatcaccaactacaatggcactgctaacctcactccgctcatcggcggtctcatcgccgactcctttgccggccgcttctggaccatcacattcggctccatcatctaccagctcggcatggtctgccttaccctctccgccgcgctcccctcgctgcacccgccatcctgcgccaagcacgctgcagactgccagcgcgcgtcctcctaccagatttccgtgctgtacctgtctctgctctgcacgtcgatcggcaccgggggcacgcgcccctgcaccatggcgtttggcgccgaccagcttgagctgaacgcgcacaggcaccggggcgccaagcccaagtggagtttctttaacctctacttcttcgccgtcgagctcgcgaagctcgcggccgtcaccgccgtggtgtacatccaggacaacgtcgggtggagttggggaataggcgtgcctaccgtcgccatggtcgccgcggtgatcgccttcgtgtccgggtactcgctctacatcaggatgccacccgggggcagccccctggtccggttggcgcaggtcgctaccgcagcatacaagaagcggaaagccgtcgtgccggacccgagcctcctgtacgaggacaaggagctcgacgctggcatctccaccaccggacgccttcttcacaccgaccagctaaagtgcttagacaaggcggctattgtgacggacggcgacgtgctgccgtcgggtcagccgaagctatggcggctgtcgacggtgcaccgcatcgaggagctcaagtcgatcatacgtatgctgccgatctgtgctgccggcatcatcctggtgacatcggcgtcgcacaatcacagcttcgccatccagcaggctcgtaccatggaccgtgacatcacgccacacttcaagatcccgccggcctccatgctcatcttcaccaacttcgcgcacgggcgtgggactgacgatcgccatgctgtccaacgtggtggccgcggtcgtcgagcggagacgcaagtccgttgccgctgcgagtgggctgctcgacgctcccaaggccaccctgccgatgagcgtcttctggctggtgccgcagtacgccatccatggcatcgccaacgccttcatggacgtcggccgcatggagttcctgtacgaccaggcacccgagagcatgcggagctcagcgacggcgctctactggctgaccttctcgatcgggagctacctcggcacgctgctggtgaccatcgtgcacgacaagacgaagcgaaccgggcaatggctcccggacaaccttaaccgagggaagctagacaactactactggctagtcgtggctctggaggtggtcaacctcgtctacttcttcatctgcgttaagtactacacctttaagccattggagatggtgagcggtgaggaggttgagctctaccaccatggcaatggcaccgacgacgccaagaagcaaggtgtggaagcttagagtgagcaaatccggatcccaacaagaaggcttgggtccggatgaaataattgtacttcgacatctctttaaaaaatagcacctatcttaaagcataagagaaaaaaaaatgtttcccacc

SEQ ID NO: 62996 - DNA, 2302 bp, Zea Mays
ccagaccgctgctttcccgcggacatccatccaattccaatccaatcttaacccgattcctttataaaagcgtgcgtacaacgcatacccgtctccaattctcacgcccatcacaagtgaaggaaggctactggtgctggtgccggcactggcagccggtgcctaaccatatctacctcatataactttccactggccgtagtcggcttcttctctgaactgaagcaggggggagacaagcgccatggctgaggatgccagaggagagaagaaggatgcctacgcggcggcgccggcgtccaagttgccggcgaagcaacggggagggttcaggagcatgcccttcatcctagcgaatgacttctgcgaccggcttgcttcggtggggttcacgacgaacctgatctcgtacctcaccctgcagctgcacctgccgctcgtggaggcctccaacatcatcaccaactacaatggcactgctaacctcactccgctcatcggcggtctcatcgccgactcctttgccggccgcttctggaccatcacattcggctccatcatctaccagctcggcatggtctgccttaccctctccgccgcgctcccctcgctgcacccgccatcctgcgccaagcacgctgcagactgccagcgcgcgtcctcctaccagatttccgtgctgtacctgtctctgctctgcacgtcgatcggcaccgggggcacgcgcccctgcaccatggcgtttggcgccgaccagcttgagctgaacgcgcacaggcaccggggcgccaagcccaagtggagtttctttaacctctacttcttcgccgtcgagctcgcgaagctcgcggccgtcaccgccgtggtgtacatccaggacaacgtcgggtggagttggggaataggcgtgcctaccgtcgccatggtcgccgcggtgatcgccttcgtgtccgggtactcgctctacatcaggatgccacccgggggcagccccctggtccggttggcgcaggtcgctaccgcagcatacaagaagcggaaagccgtcgtgccggacccgagcctcctgtacgaggacaaggagctcgacgctggcatctccaccaccggacgccttcttcacaccgaccagctaaagtgcttagacaaggcggctattgtgacggacggcgacgtgctgccgtcgggtcagccgaagctatggcggctgtcgacggtgcaccgcatcgaggagctcaagtcgatcatacgtatgctgccgatctgtgctgccggcatcatcctggtgacatcggcgtcgcacaatcacagcttcgccatccagcaggctcgtaccatggaccgtgacatcacgccacacttcaagatcccgccggcctccatgctcatcttcaccaacttcgcgcacgggcgtgggactgacgatcgccatgctgtccaacgtggtggccgcggtcgtcgagcggagacgcaagtccgttgccgctgcgagtgggctgctcgacgctcccaaggccaccctgccgatgagcgtcttctggctggtgccgcagtacgccatccatggcatcgccaacgccttcatggacgtcggccgcatggagttcctgtacgaccaggcacccgagagcatgcggagctcagcgacggcgctctactggctgaccttctcgatcgggagctacctcggcacgctgctggtgaccatcgtgcacgacaagacgaagcgaaccgggcaatggctcccggacaaccttaaccgagggaagctagacaactactactggctagtcgtggctctggaggtggtcaacctcgtctacttcttcatctgcgttaagtactacacctttaagccattggagatggtgagcggtgaggaggttgagctctaccaccatggcaatggcaccgacgacgccaagaagcaaggtgtggaagcttagagtgagcaaatccggatcccaacaagaaggcttgggtccggatgaaataattgtacttcgacatctctttaaaaaatagcacctatcttaaagcagttctgaattagttaaccattttgttaattattttcatctgaataccttctggactctgaacaatcaggagcggacttgctccagtccagcacaaggcaaagcgaacacagagctctcatagctccggttctagtaagaatcactccggtaaagtcgagcagtaaaaatctaaactgctacatggtcggattggagtgaatctagtgattctagtctatgttttgtactataaagtaagagaaaaaaaaatgtttcccacc

SEQ ID NO: 62997 - DNA, 1470 bp, Zea Mays
aattctcacgcccatcacaagtgaaggaaggctactggtgctggtgccggcactggcagccggtgcctaaccatatctacctcatataactttccactggccgtagtcggcttcttctctgaactgaagcaggggggagacaagcgccatggctgaggatgccagaggagagaagaaggatgcctacgcggcggcgccggcgtccaagttgccggcgaagcaacggggagggttcaggagcatgcccttcatcctagcttgttcactaaaagatagctagcagcaggtcatggggcgggtccacctataagaggctaagagcagcaccaaaaatctcactatgcccggttttgatcttcgaattaaatttcattctactaataataatttagataaagatcaattaagctaatataattttatgcaagatatatttatatactattattagatatgcgagtaatatttatgtgctacatattttactatagagaagtaagtcgcgtattataagttgcagtatagaaacatattccattgatacataaaatcattttccaaactctatctcataaatttgagatagacttatacgtaagctttgaaaagtgatgaaatatcaaaatccaagccaaatagtctattttattaattaattctgattcctccaaaataaatagattcaaacggcccgttattgtaaatgtttaagtgtttttcttttgtctccttcgaattttcaattccgatccctgcatgcacaccttccagttttcaattctggtccctgcatgcacgccaccttttggtgttgctacgggagcggacgctgcatctgctaacacgaattgatggacgataccacatagcacgtcaatccatgcccatctggcagcctgcttttcgtagcagtttttgttgttttccctcgtggtcaaacctgtctattttgattggcacgtcacggggcaattaaactactaaaaacaggaacgtttttggatatgattacatcgaacaattcaacctgtagaacagtatcaacgtaccatctgctttgtgagtactgcagattctatactgccaagcttttgatgtcaagacaccaaccaatgaaaccattagcgacatattatttctcagaggtgttgctttgtttacatgtacccacacgcccacacacgttgtggctatctgttctcatgaaaacaaaatgactttatccgagttcagaattatggtcatgtttaaatacactagagctctaatagttagctgctaaaattagttaaaaatatctaaacagtctaagctaatagttgctatatgtttattagccagcaaattttacaagcattttttaaactaatgaactattaactctagtgtattcaaacaatccttaaacttctaggaaggatagcttagtggctcctatttaataatgcaaaagctgaacatttctgtctg

SEQ ID NO: 62998 - DNA, 4336 bp, Zea Mays
agagtctctacccgtgatttccattctaaaaattatccttcctcccgtgcctacagtcctacacctcgacgatgccaaaaccctagcgcagcagcgcgaactacacctctccccgtcctgttcctcgtggcgcggtagccatggcggagccggccatcctcgacccctcccccttcgatctccgccactatccggcgcacctcttcgacccggacatccccctcgccgccgccgacttcccactcggtgaattcgccggagacgacggctgtgatggcctagacttcgacgtgcccgtagatttctctatcgacgacttcctcctccggtctcctgaccgcgggcacgacggcgacgactccggcgagggctctgctgccggatccggccccaccgcatcttccttggcctccccggccacctccggcactaactccgccgtggccaacgtcggcaaccgcaaggtgaagcacgaggactcggacgagggaaggagcggcgccaccccgaattggagcctcaagcggaagcaggtgagtcccggagaagcaacctcggatggggccaagtgccgccgatccggcgatggggatgtttcgccatctgcatcggcgtcgcgtgcagccacggaggactccgatgagaggggcgtgggcggcgaggaagaggacaagcgccggactgcgcgcctgatgcggaaccgtgagagcgcgcagctctctcggcagaggaagaagcggtacgtggaggagctggaagagaaggtgaaatcgatgcactcggtgataaatgacctcagttgtaagatctccttcatcgctgcggagaacgccacactgaggcagcaactcggtggtgtgggggtgagtggaccaccacctggggtgtatccaccgccaccgccaggcattcatttcccttgggtttctgggtatgcaatgcggcctcatggctcccatgttccacttgttccaatcccgcgattgaagccgcagcatgcagcagctgcagtgaaggtatccaagaaaccagatgtcaagaagtctgtggagagcaagagtaagaccaagaccaagaccaagaccaagaaggtggcaagtattagccttcttggtttgctgtttgttgcatttgtctttggcgcttttgttccggggttcaatcatagtctcggactgagaggaaggagcgacaatgtgatgtttggaaattttggccagtctgatgctagggtgtttagtgtcactaaccatggtaaaggacctaaaggcagtttcaacagtagtgacatgatcagtactgatcatgacatgatgactgggcatgatgatggagcggggcagaaacaccgagctgcaaataactctagtgagatcttgcctgctttgttgtatgtgccgaggaatggaaaacatgttatgatcaatggcaatttgattattcattctgtgatggctagtgagaaagcagtggcacataagggctcaaatagtcagtcagttaaagatcacaaggagaccagtgttgctatagctcgctatctgtcaccacctggaaaggatatgaattcaaaagagatgttcccgccagatgcaccactgccacaatggttccgtgaaggaatggaaggacctgttttgaactcgggaatgtgcagtgaggggcaagctgaaaaacaggaggatcatgtataacgaggcaattccacttactggaaaaacagcgaacaacacaaagcctcaggcttttaacagtactgctgaaagcagcaaggtacctgatactgatagcaagcctgcatcatcagttatcgtctctgtgctagctgatcccagggaggctggcaatggggatggtgatccaagagtatcaccaaaacccctctccaggatatttgtcgtcgttctgctcgatggtgtcagatacgtgacttactcgtgcacacttcctttcaagagtgccagcccacaccttgtgaactaaccttggggccggtgcagctttctggtccatgagcggctaaatagttggggttttctgatgcattggaggtagatgaatgaatacagtaatgtggtgttgcttgctaacaatgaaaacagacttcaagactcgcactcggcctgaggtaatttgagtttgtcgaaggtttgtagtgtggactggcgaaatgttgtgcaagttcaaccttaacccatgagggccgcgcaagcgctctggcttcttccagtccagtccaccatccgcgccatggcgatggcgttcgcggctgcctccgcctggagcctcagtcttacagccttctccctcccgctgccccagtctctgcgcccgaaacctagccaactcctccatggcgcgaccagctcgttcccgcggccacgccgatgcgggtggggcgccgtggtgcgctgcgcgaagcgcacggggaagcagcggtacccgtcggagaagaagcggttgaacaggcgaaaacaggagttgctacgccaggccgccccggaggaggggagcaaggggcgggagtccgggtactggcggctctcgaagctcgctgttcccgcccgcgacgacccaggcaaggacttcaccggcatctccctgccgctactccaggccatcgccaaagccatcaagttcccggttccttctatgctccctgacgaggctttcactgtcatccgcaagtcatttgacgcacgaaaggttttgaaagaacctcaattcacttatattgttgatatggatgttaagaagattcttaatattgagccaagggcatgggattttattgctcggttggagcccaaacttggagttgtggaatacatgaccgaagagaagttagcagttgatctggtcagcatgctaaatgttagtagcaaaggttccaataatgtactaggaattagagacactcatagtggcatgatttatcgtcaacaaaagaagcccagagtggcagttataggaagtggaccatctggcttgtttgcttcccttgtgctaggtgaacttggtgcagaagttaccttattggagcgtggtcagcctgttgaacagagaggtcgtgacattggtgcactagcagttagacgaattctacaaccagagagcaacttttgctttggcgagggtggtgcaggtacgtggagtgatgggaagctgatgaccaggataggaaaaaacactgatggtgttcaggctgttatgaaaacatttgttcactttggagcccctccaaacattttagttgatgggaaaccacacttgggtactgataaacttgttccactgctgcgaaaattcaggcatcacttaagagagttgggtgttaccataagatttaatgctagagtagatgaccttatagtagaagatgggcaggtaaaaggaattgtggtctctgatgtggaactacagccaggtcctgccagccagaaactagcatttgacgcagttgtaatggcagttggtcattcagctcgtgacacatacagtatgctttggcagcataatgtagacatgagcccaaaaagttttgctgttggcttaagaattgagcatccccaagaattgataaacagtatccaatactctgaactggcagctgaagtacaaagaggacgtggacggattcctgtggcagattacaaaatagtgaagtctgttggtgaaagagacgcagagaatgaacttgacatagctgagccaactcgcagttgctactcgttttgtatgtgccctggtggacaggttgttctaaccagcacaaacccatcagaattgtgcatcaatggcatgtcgttctcacggcgtgcatcaaagtgggcaaactcagctcttgtagtcactgtatcatcccatgatttcaagccatttcaatcccatggtcctcttgctggcgttgaattccagagacaatttgaaagaagagcagctatgatgggtggagggaatttcgttgttcctgcacagtgtgtcaccgattttatcagcaacagactgtcagttacaacactgccaccatcaagctatagattaggagttcgtccatctaatcttcatgagctattccctccttacataactgaagctttacaagagtcactaataatgattgatagagagatgccaggctttgtttctagcaaggccctacttcatggtgtggagaccaggacaagttctcccttacaaatttcacgacatggagaaacatacgaaagtacatcactgcgaggattatatccaactggggaaggtgctggctatgctgggggcatcttaagtgctgctgtggatgcatgctgatggtgaggccgatgcccgtgcg

SEQ ID NO: 62999 - DNA, 2180 bp, Zea Mays
atttctatcttagttgatattgggatatgtatgcttgatgttgaaactactgaaacaattcatataaattggattacaaaggtccagataggcaaatagacatgatgttaagaaacaatatagttttgaaagaacctcaattcacttatattgttgatatggatgttaagaagattcttaatattgagccaagggcatgggattttattgctcggttggagcccaaacttggagttgtggaatacatgaccgaagagaagttagcagttgatctggtcagcatgctaaatgttagtagcaaaggttccaataatgtactaggaattagagacactcatagtggcatgatttatcgtcaacaaaagaagcccagagtggcagttataggaagtggaccatctggcttgtttgcttcccttgtgctaggtgaacttggtgcagaagttaccttattggagcgtggtcagcctgttgaacagagaggtcgtgacattggtgcactagcagttagacgaattctacaaccagagagcaacttttgctttggcgagggtggtgcaggtacgtggagtgatgggaagctgatgaccaggataggaaaaaacactgatggtgttcaggctgttatgaaaacatttgttcactttggagcccctccaaacattttagttgatgggaaaccacacttgggtactgataaacttgttccactgctgcgaaaattcaggcatcacttaagagagttgggtgttaccataagatttaatgctagagtagatgaccttatagtagaagatgggcaggtaaaaggaattgtggtctctgatgtggaactacagccaggtcctgccagccagaaactagcatttgacgcagttgtaatggcagttggtcattcagctcgtgacacatacagtatgctttggcagcataatgtagacatgagcccaaaaagttttgctgttggcttaagaattgagcatccccaagaattgataaacagtatccaatactctgaactggcagctgaagtacaaagaggacgtggacggattcctgtggcagattacaaaatagtgaagtctgttggtgaaagagacgcagagaatgaacttgacatagctgagccaactcgcagttgctactcgttttgtatgtgccctggtggacaggttgttctaaccagcacaaacccatcagaattgtgcatcaatggcatgtcgttctcacggcgtgcatcaaagtgggcaaactcagctcttgtagtcactgtatcatcccatgatttcaagccatttcaatcccatggtcctcttgctggcgttgaattccagagacaatttgaaagaagagcagctatgatgggtggagggaatttcgttgttcctgcacagtgtgtcaccgattttatcagcaacagactgtcagttacaacactgccaccatcaagctatagattaggagttcgtccatctaatcttcatgagctattccctccttacataactgaagctttacaagagtcactaataatgattgatagagagatgccaggctttgtttctagcaaggccctacttcatggtgtggagaccaggacaagttctcccttacaaatttcacgacatggagaaacatacgaaagtacatcactgcgaggattatatccaactggggaaggtgctggctatgctgggggcatcttaagtgctgctgtggatggtatgtattgtggttttgctttagctaaacaactttctttattccatggcgatatagagccatttctaggcaaaacacaaaaacaaacaggttttataaagtattgaatggactagtgcttggtattttgttgttccaattttttgggggaaaagatcgatgtcattatagctttaaccataggatatttttgtcatgtttagagcagctgtgattgccttactaaattcatcagctaatttgtgcacggttgatgtagaagggtagagcaaggcattgatgttgtaggagaggttctggtataggtatagctatgtaacaaataatttataacttcctatgtgatgccaccttaattttgtcaagataattcaccaagcataataccatatattctcttgtgtgatggattgatgaacattaatgtgaagaagattacaagctcaagtattaactga

SEQ ID NO: 63000 - DNA, 2561 bp, Zea Mays
atccacagggccgcgcaagcgctctggcttcttccagtccagtccaccatccgcgccatggcgatggcgttcgcggctgcctccgcctggagcctcagtcttacagccttctccctcccgctgccccagtctctgcgcccgaaacctagccaactcctccatggcgcgaccagctcgttcccgcggccacgccgatgcgggtggggcgccgtggtgcgctgcgcgaagcgcacggggaagcagcggtacccgtcggagaagaagcggttgaacaggcgaaaacaggagttgctacgccaggccgccccggaggaggggagcaaggggcgggagtccgggtactggcggctctcgaagctcgctgttcccgcccgcgacgacccaggcaaggacttcaccggcatctccctgccgctactccaggccatcgccaaagccatcaagttcccggttccttctatgctccctgacgaggctttcactgtcatccgcaagtcatttgacgcacgaaaggttttgaaagaacctcaattcacttatattgttgatatggatgttaagaagattcttaatattgagccaagggcatgggattttattgctcggttggagcccaaacttggagttgtggaatacatgaccgaagagaagttagcagttgatctggtcagcatgctaaatgttagtagcaaaggttccaataatgtactaggaattagagacactcatagtggcatgatttatcgtcaacaaaagaagcccagagtggcagttataggaagtggaccatctggcttgtttgcttcccttgtgctaggtgaacttggtgcagaagttaccttattggagcgtggtcagcctgttgaacagagaggtcgtgacattggtgcactagcagttagacgaattctacaaccagagagcaacttttgctttggcgaggtacgtggagtgatgggaagctgatgaccaggataggaaaaaacactgatggtgttcaggctgttatgaaaacatttgttcactttggagcccctccaaacattttagttgatgggaaaccacacttgggtactgataaacttgttccactgctgcgaaaattcaggcatcacttaagagagttgggtgttaccataagatttaatgctagagtagatgaccttatagtagaagatgggcaggtaaaaggaattgtggtctctgatgtggaactacagccaggtcctgccagccagaaactagcatttgacgcagttgtaatggcagttggtcattcagctcgtgacacatacagtatgctttggcagcataatgtagacatgagcccaaaaagttttgctgttggcttaagaattgagcatccccaagaattgataaacagtatccaatactctgaactggcagctgaagtacaaagaggacgtggacggattcctgtggcagattacaaaatagtgaagtctgttggtgaaagagacgcagagaatgaacttgacatagctgagccaactcgcagttgctactcgttttgtatgtgccctggtggacaggttgttctaaccagcacaaacccatcagaattgtgcatcaatggcatgtcgttctcacggcgtgcatcaaagtgggcaaactcagctcttgtagtcactgtatcatcccatgatttcaagccatttcaatcccatggtcctcttgctggcgttgaattccagagacaatttgaaagaagagcagctatgatgggtggagggaatttcgttgttcctgcacagtgtgtcaccgattttatcagcaacagactgtcagttacaacactgccaccatcaagctatagattaggagttcgtccatctaatcttcatgagctattccctccttacataactgaagctttacaagagtcactaataatgattgatagagagatgccaggctttgtttctagcaaggccctacttcatggtgtggagaccaggacaagttctcccttacaaatttcacgacatggagaaacatacgaaagtacatcactgcgaggattatatccaactggggaaggtgctggctatgctgggggcatcttaagtgctgctgtggatggtatgtattgtggttttgctttagctaaacaactttctttattccatggcgatatagagccatttctaggcaaaacacaaaaacaaacaggttttataaagtattgaatggactagtgcttggtattttgttgttccaattttttgggggaaaagatcgatgtcattatagctttaaccataggatatttttgtcatgtttagagcagctgtgattgccttactaaattcatcagctaatttgtgcacggttgatgtagaagggtagagcaaggcattgatgttgtaggagaggttctggtataggtatagctatgtaacaaataatttataacttcctatgtgatgccaccttaattttgtcaagataattcaccaagcataataccatatattctcttgtgtgatggattgatgaacattaatgtgaagaagattacaagctcaagtattaactga

SEQ ID NO: 63001 - DNA, 4813 bp, Zea Mays
agagtctctacccgtgatttccattctaaaaattatccttcctcccgtgcctacagtcctacacctcgacgatgccaaaaccctagcgcagcagcgcgaactacacctctccccgtcctgttcctcgtggcgcggtagccatggcggagccggccatcctcgacccctcccccttcgatctccgccactatccggcgcacctcttcgacccggacatccccctcgccgccgccgacttcccactcggtgaattcgccggagacgacggctgtgatggcctagacttcgacgtgcccgtagatttctctatcgacgacttcctcctccggtctcctgaccgcgggcacgacggcgacgactccggcgagggctctgctgccggatccggccccaccgcatcttccttggcctccccggccacctccggcactaactccgccgtggccaacgtcggcaaccgcaaggtgaagcacgaggactcggacgagggaaggagcggcgccaccccgaattggagcctcaagcggaagcaggtgagtcccggagaagcaacctcggatggggccaagtgccgccgatccggcgatggggatgtttcgccatctgcatcggcgtcgcgtgcagccacggaggactccgatgagaggggcgtgggcggcgaggaagaggacaagcgccggactgcgcgcctgatgcggaaccgtgagagcgcgcagctctctcggcagaggaagaagcggtacgtggaggagctggaagagaaggtgaaatcgatgcactcggtgataaatgacctcagttgtaagatctccttcatcgctgcggagaacgccacactgaggcagcaactcggtggtgtgggggtgagtggaccaccacctggggtgtatccaccgccaccgccaggcattcatttcccttgggtttctgggtatgcaatgcggcctcatggctcccatgttccacttgttccaatcccgcgattgaagccgcagcatgcagcagctgcagtgaaggtatccaagaaaccagatgtcaagaagtctgtggagagcaagagtaagaccaagaccaagaccaagaccaagaaggtggcaagtattagccttcttggtttgctgtttgttgcatttgtctttggcgcttttgttccggggttcaatcatagtctcggactgagaggaaggagcgacaatgtgatgtttggaaattttggccagtctgatgctagggtgtttagtgtcactaaccatggtaaaggacctaaaggcagtttcaacagtagtgacatgatcagtactgatcatgacatgatgactgggcatgatgatggagcggggcagaaacaccgagctgcaaataactctagtgagatcttgcctgctttgttgtatgtgccgaggaatggaaaacatgttatgatcaatggcaatttgattattcattctgtgatggctagtgagaaagcagtggcacataagggctcaaatagtcagtcagttaaagatcacaaggagaccagtgttgctatagctcgctatctgtcaccacctggaaaggatatgaattcaaaagagatgttcccgccagatgcaccactgccacaatggttccgtgaaggaatggaaggacctgttttgaactcgggaatgtgcagtgaggtatttcagtttgatatttctccagcttcggccaaatctggtggcattatacctgcttcggccaaatctgcctcaagtgtcaatgctacccagaaaattctgaaaccttctcctgcttataggggcaagctgaaaaacaggaggatcatgtataacgaggcaattccacttactggaaaaacagcgaacaacacaaagcctcaggcttttaacagtactgctgaaagcagcaaggtacctgatactgatagcaagcctgcatcatcagttatcgtctctgtgctagctgatcccagggaggctggcaatggggatggtgatccaagagtatcaccaaaacccctctccaggatatttgtcgtcgttctgctcgatggtgtcagatacgtgacttactcgtgcacacttcctttcaagagtgccagcccacaccttgtgaactaaccttggggccggtgcagctttctggtccatgagcggctaaatagttggggttttctgatgcattggaggtagatgaatgaatacagtaatgtggtgttgcttgctaacaatgaaaacagacttcaagactcgcactcggcctgagggccgcgcaagcgctctggcttcttccagtccagtccaccatccgcgccatggcgatggcgttcgcggctgcctccgcctggagcctcagtcttacagccttctccctcccgctgccccagtctctgcgcccgaaacctagccaactcctccatggcgcgaccagctcgttcccgcggccacgccgatgcgggtggggcgccgtggtgcgctgcgcgaagcgcacggggaagcagcggtacccgtcggagaagaagcggttgaacaggcgaaaacaggagttgctacgccaggccgccccggaggaggggagcaaggggcgggagtccgggtactggcggctctcgaagctcgctgttcccgcccgcgacgacccaggcaaggacttcaccggcatctccctgccgctactccaggccatcgccaaagccatcaagttcccggttccttctatgctccctgacgaggctttcactgtcatccgcaagtcatttgacgcacgaaaggttttgaaagaacctcaattcacttatattgttgatatggatgttaagaagattcttaatattgagccaagggcatgggattttattgctcggttggagcccaaacttggagttgtggaatacatgaccgaagagaagttagcagttgatctggtcagcatgctaaatgttagtagcaaaggttccaataatgtactaggaattagagacactcatagtggcatgatttatcgtcaacaaaagaagcccagagtggcagttataggaagtggaccatctggcttgtttgcttcccttgtgctaggtgaacttggtgcagaagttaccttattggagcgtggtcagcctgttgaacagagaggtcgtgacattggtgcactagcagttagacgaattctacaaccagagagcaacttttgctttggcgagggtggtgcaggtacgtggagtgatgggaagctgatgaccaggataggaaaaaacactgatggtgttcaggctgttatgaaaacatttgttcactttggagcccctccaaacattttagttgatgggaaaccacacttgggtactgataaacttgttccactgctgcgaaaattcaggcatcacttaagagagttgggtgttaccataagatttaatgctagagtagatgaccttatagtagaagatgggcaggtaaaaggaattgtggtctctgatgtggaactacagccaggtcctgccagccagaaactagcatttgacgcagttgtaatggcagttggtcattcagctcgtgacacatacagtatgctttggcagcataatgtagacatgagcccaaaaagttttgctgttggcttaagaattgagcatccccaagaattgataaacagtatccaatactctgaactggcagctgaagtacaaagaggacgtggacggattcctgtggcagattacaaaatagtgaagtctgttggtgaaagagacgcagagaatgaacttgacatagctgagccaactcgcagttgctactcgttttgtatgtgccctggtggacaggttgttctaaccagcacaaacccatcagaattgtgcatcaatggcatgtcgttctcacggcgtgcatcaaagtgggcaaactcagctcttgtagtcactgtatcatcccatgatttcaagccatttcaatcccatggtcctcttgctggcgttgaattccagagacaatttgaaagaagagcagctatgatgggtggagggaatttcgttgttcctgcacagtgtgtcaccgattttatcagcaacagactgtcagttacaacactgccaccatcaagctatagattaggagttcgtccatctaatcttcatgagctattccctccttacataactgaagctttacaagagtcactaataatgattgatagagagatgccaggctttgtttctagcaaggccctacttcatggtgtggagaccaggacaagttctcccttacaaatttcacgacatggagaaacatacgaaagtacatcactgcgaggattatatccaactggggaaggtgctggctatgctgggggcatcttaagtgctgctgtggatggtatgtattgtggttttgctttagctaaacaactttctttattccatggcgatatagagccatttctaggcaaaacacaaaaacaaacaggttttataaagtattgaatggactagtgcttggtattttgttgttccaattttttgggggaaaagatcgatgtcattatagctttaaccataggatatttttgtcatgtttagagcagctgtgattgccttactaaattcatcagctaatttgtgcacggttgatgtagaagggtagagcaaggcattgatgttgtaggagaggttctggtataggtatagctatgtaacaaataatttataacttcctatgtgatgccaccttaattttgtcaagataattcaccaagcataataccatatattctcttgtgtgatggattgatgaacattaatgtgaagaagattacaagctcaagtattaactga

SEQ ID NO: 63002 - DNA, 4322 bp, Zea Mays
agagtctctacccgtgatttccattctaaaaattatccttcctcccgtgcctacagtcctacacctcgacgatgccaaaaccctagcgcagcagcgcgaactacacctctccccgtcctgttcctcgtggcgcggtagccatggcggagccggccatcctcgacccctcccccttcgatctccgccactatccggcgcacctcttcgacccggacatccccctcgccgccgccgacttcccactcggtgaattcgccggagacgacggctgtgatggcctagacttcgacgtgcccgtagatttctctatcgacgacttcctcctccggtctcctgaccgcgggcacgacggcgacgactccggcgagggctctgctgccggatccggccccaccgcatcttccttggcctccccggccacctccggcactaactccgccgtggccaacgtcggcaaccgcaaggtgaagcacgaggactcggacgagggaaggagcggcgccaccccgaattggagcctcaagcggaagcaggtgagtcccggagaagcaacctcggatggggccaagtgccgccgatccggcgatggggatgtttcgccatctgcatcggcgtcgcgtgcagccacggaggactccgatgagaggggcgtgggcggcgaggaagaggacaagcgccggactgcgcgcctgatgcggaaccgtgagagcgcgcagctctctcggcagaggaagaagcggtacgtggaggagctggaagagaaggtgaaatcgatgcactcggtgataaatgacctcagttgtaagatctccttcatcgctgcggagaacgccacactgaggcagcaactcggtggtgtgggggtgagtggaccaccacctggggtgtatccaccgccaccgccaggcattcatttcccttgggtttctgggtatgcaatgcggcctcatggctcccatgttccacttgttccaatcccgcgattgaagccgcagcatgcagcagctgcagtgaaggtatccaagaaaccagatgtcaagaagtctgtggagagcaagagtaagaccaagaccaagaccaagaccaagaaggtggcaagtattagccttcttggtttgctgtttgttgcatttgtctttggcgcttttgttccggggttcaatcatagtctcggactgagaggaaggagcgacaatgtgatgtttggaaattttggccagtctgatgctagggtgtttagtgtcactaaccatggtaaaggacctaaaggcagtttcaacagtagtgacatgatcagtactgatcatgacatgatgactgggcatgatgatggagcggggcagaaacaccgagctgcaaataactctagtgagatcttgcctgctttgttgtatgtgccgaggaatggaaaacatgttatgatcaatggcaatttgattattcattctgtgatggctagtgagaaagcagtggcacataagggctcaaatagtcagtcagttaaagatcacaaggagaccagtgttgctatagctcgctatctgtcaccacctggaaaggatatgaattcaaaagagatgttcccgccagatgcaccactgccacaatggttccgtgaaggaatggaaggacctgttttgaactcgggaatgtgcagtgaggggcaagctgaaaaacaggaggatcatgtataacgaggcaattccacttactggaaaaacagcgaacaacacaaagcctcaggcttttaacagtactgctgaaagcagcaaggtacctgatactgatagcaagcctgcatcatcagttatcgtctctgtgctagctgatcccagggaggctggcaatggggatggtgatccaagagtatcaccaaaacccctctccaggatatttgtcgtcgttctgctcgatggtgtcagatacgtgacttactcgtgcacacttcctttcaagagtgccagcccacaccttgtgaactaaccttggggccggtgcagctttctggtccatgagcggctaaatagttggggttttctgatgcattggaggtagatgaatgaatacagtaatgtggtgttgcttgctaacaatgaaaacagacttcaagactcgcactcggcctgaggtaatttgagtttgtcgaaggtttgtagtgtggactggcgaaatgttgtgcaagttcaaccttaacccatgaggttccttctatgctccctgacgaggctttcactgtcatccgcaagtcatttgacgcacgaaaggttttgaaagaacctcaattcacttatattgttgatatggatgttaagaagattcttaatattgagccaagggcatgggattttattgctcggttggagcccaaacttggagttgtggaatacatgaccgaagagaagttagcagttgatctggtcagcatgctaaatgttagtagcaaaggttccaataatgtactaggaattagagacactcatagtggcatgatttatcgtcaacaaaagaagcccagagtggcagttataggaagtggaccatctggcttgtttgcttcccttgtgctaggtgaacttggtgcagaagttaccttattggagcgtggtcagcctgttgaacagagaggtcgtgacattggtgcactagcagttagacgaattctacaaccagagagcaacttttgctttggcgagggtggtgcaggtacgtggagtgatgggaagctgatgaccaggataggaaaaaacactgatggtgttcaggctgttatgaaaacatttgttcactttggagcccctccaaacattttagttgatgggaaaccacacttgggtactgataaacttgttccactgctgcgaaaattcaggcatcacttaagagagttgggtgttaccataagatttaatgctagagtagatgaccttatagtagaagatgggcaggtaaaaggaattgtggtctctgatgtggaactacagccaggtcctgccagccagaaactagcatttgacgcagttgtaatggcagttggtcattcagctcgtgacacatacagtatgctttggcagcataatgtagacatgagcccaaaaagttttgctgttggcttaagaattgagcatccccaagaattgataaacagtatccaatactctgaactggcagctgaagtacaaagaggacgtggacggattcctgtggcagattacaaaatagtgaagtctgttggtgaaagagacgcagagaatgaacttgacatagctgagccaactcgcagttgctactcgttttgtatgtgccctggtggacaggttgttctaaccagcacaaacccatcagaattgtgcatcaatggcatgtcgttctcacggcgtgcatcaaagtgggcaaactcagctcttgtagtcactgtatcatcccatgatttcaagccatttcaatcccatggtcctcttgctggcgttgaattccagagacaatttgaaagaagagcagctatgatgggtggagggaatttcgttgttcctgcacagtgtgtcaccgattttatcagcaacagactgtcagttacaacactgccaccatcaagctatagattaggagttcgtccatctaatcttcatgagctattccctccttacataactgaagctttacaagagtcactaataatgattgatagagagatgccaggctttgtttctagcaaggccctacttcatggtgtggagaccaggacaagttctcccttacaaatttcacgacatggagaaacatacgaaagtacatcactgcgaggattatatccaactggggaaggtgctggctatgctgggggcatcttaagtgctgctgtggatggtatgtattgtggttttgctttagctaaacaactttctttattccatggcgatatagagccatttctaggcaaaacacaaaaacaaacaggttttataaagtattgaatggactagtgcttggtattttgttgttccaattttttgggggaaaagatcgatgtcattatagctttaaccataggatatttttgtcatgtttagagcagctgtgattgccttactaaattcatcagctaatttgtgcacggttgatgtagaagggtagagcaaggcattgatgttgtaggagaggttctggtataggtatagctatgtaacaaataatttataacttcctatgtgatgccaccttaattttgtcaagataattcaccaagcataataccatatattctcttgtgtgatggattgatgaacattaatgtgaagaagattacaagctcaagtattaactga

SEQ ID NO: 63003 - DNA, 4401 bp, Zea Mays
ctcgtcaacacccgaccccgtctgcactctagagtctctacccgtgatttccattctaaaaattatccttcctcccgtgcctacagtcctacacctcgacgatgccaaaaccctagcgcagcagcgcgaactacacctctccccgtcctgttcctcgtggcgcggtagccatggcggagccggccatcctcgacccctcccccttcgatctccgccactatccggcgcacctcttcgacccggacatccccctcgccgccgccgacttcccactcggtgaattcgccggagacgacggctgtgatggcctagacttcgacgtgcccgtagatttctctatcgacgacttcctcctccggtctcctgaccgcgggcacgacggcgacgactccggcgagggctctgctgccggatccggccccaccgcatcttccttggcctccccggccacctccggcactaactccgccgtggccaacgtcggcaaccgcaaggtgaagcacgaggactcggacgagggaaggagcggcgccaccccgaattggagcctcaagcggaagcaggtgagtcccggagaagcaacctcggatggggccaagtgccgccgatccggcgatggggatgtttcgccatctgcatcggcgtcgcgtgcagccacggaggactccgatgagaggggcgtgggcggcgaggaagaggacaagcgccggactgcgcgcctgatgcggaaccgtgagagcgcgcagctctctcggcagaggaagaagcggtacgtggaggagctggaagagaaggtgaaatcgatgcactcggtgataaatgacctcagttgtaagatctccttcatcgctgcggagaacgccacactgaggcagcaactcggtggtgtgggggtgagtggaccaccacctggggtgtatccaccgccaccgccaggcattcatttcccttgggtttctgggtatgcaatgcggcctcatggctcccatgttccacttgttccaatcccgcgattgaagccgcagcatgcagcagctgcagtgaaggtatccaagaaaccagatgtcaagaagtctgtggagagcaagagtaagaccaagaccaagaccaagaccaagaaggtggcaagtattagccttcttggtttgctgtttgttgcatttgtctttggcgcttttgttccggggttcaatcatagtctcggactgagaggaaggagcgacaatgtgatgtttggaaattttggccagtctgatgctagggtgtttagtgtcactaaccatggtaaaggacctaaaggcagtttcaacagtagtgacatgatcagtactgatcatgacatgatgactgggcatgatgatggagcggggcagaaacaccgagctgcaaataactctagtgagatcttgcctgctttgttgtatgtgccgaggaatggaaaacatgttatgatcaatggcaatttgattattcattctgtgatggctagtgagaaagcagtggcacataagggctcaaatagtcagtcagttaaagatcacaaggagaccagtgttgctatagctcgctatctgtcaccacctggaaaggatatgaattcaaaagagatgttcccgccagatgcaccactgccacaatggttccgtgaaggaatggaaggacctgttttgaactcgggaatgtgcagtgaggtatttcagtttgatatttctccagcttcggccaaatctggtggcattatacctgcttcggccaaatctgcctcaagtgtcaatgctacccagaaaattctgaaaccttctcctgcttataggggcaagctgaaaaacaggaggatcatgtataacgaggcaattccacttactggaaaaacagcgaacaacacaaagcctcaggcttttaacagtactgctgaaagcagcaaggtacctgatactgatagcaagcctgcatcatcagttatcgtctctgtgctagctgatcccagggaggctggcaatggggatggtgatccaagagtatcaccaaaacccctctccaggatatttgtcgtcgttctgctcgatggtgtcagatacgtgacttactcgtgcacacttcctttcaagagtgccagcccacaccttgtgaactaaccttggggccggtgcagctttctggtccatgagcggctaaatagttggggttttctgatgcattggaggtagatgaatgaatacagtaatgtggtgttgcttgctaacaatgaaaacagacttcaagactcgcactcggcctgaggttccttctatgctccctgacgaggctttcactgtcatccgcaagtcatttgacgcacgaaaggttttgaaagaacctcaattcacttatattgttgatatggatgttaagaagattcttaatattgagccaagggcatgggattttattgctcggttggagcccaaacttggagttgtggaatacatgaccgaagagaagttagcagttgatctggtcagcatgctaaatgttagtagcaaaggttccaataatgtactaggaattagagacactcatagtggcatgatttatcgtcaacaaaagaagcccagagtggcagttataggaagtggaccatctggcttgtttgcttcccttgtgctaggtgaacttggtgcagaagttaccttattggagcgtggtcagcctgttgaacagagaggtcgtgacattggtgcactagcagttagacgaattctacaaccagagagcaacttttgctttggcgagggtggtgcaggtacgtggagtgatgggaagctgatgaccaggataggaaaaaacactgatggtgttcaggctgttatgaaaacatttgttcactttggagcccctccaaacattttagttgatgggaaaccacacttgggtactgataaacttgttccactgctgcgaaaattcaggcatcacttaagagagttgggtgttaccataagatttaatgctagagtagatgaccttatagtagaagatgggcaggtaaaaggaattgtggtctctgatgtggaactacagccaggtcctgccagccagaaactagcatttgacgcagttgtaatggcagttggtcattcagctcgtgacacatacagtatgctttggcagcataatgtagacatgagcccaaaaagttttgctgttggcttaagaattgagcatccccaagaattgataaacagtatccaatactctgaactggcagctgaagtacaaagaggacgtggacggattcctgtggcagattacaaaatagtgaagtctgttggtgaaagagacgcagagaatgaacttgacatagctgagccaactcgcagttgctactcgttttgtatgtgccctggtggacaggttgttctaaccagcacaaacccatcagaattgtgcatcaatggcatgtcgttctcacggcgtgcatcaaagtgggcaaactcagctcttgtagtcactgtatcatcccatgatttcaagccatttcaatcccatggtcctcttgctggcgttgaattccagagacaatttgaaagaagagcagctatgatgggtggagggaatttcgttgttcctgcacagtgtgtcaccgattttatcagcaacagactgtcagttacaacactgccaccatcaagctatagattaggagttcgtccatctaatcttcatgagctattccctccttacataactgaagctttacaagagtcactaataatgattgatagagagatgccaggctttgtttctagcaaggccctacttcatggtgtggagaccaggacaagttctcccttacaaatttcacgacatggagaaacatacgaaagtacatcactgcgaggattatatccaactggggaaggtgctggctatgctgggggcatcttaagtgctgctgtggatggtatgtattgtggttttgctttagctaaacaactttctttattccatggcgatatagagccatttctaggcaaaacacaaaaacaaacaggttttataaagtattgaatggactagtgcttggtattttgttgttccaattttttgggggaaaagatcgatgtcattatagctttaaccataggatatttttgtcatgtttagagcagctgtgattgccttactaaattcatcagctaatttgtgcacggttgatgtagaagggtagagcaaggcattgatgttgtaggagaggttctggtataggtatagctatgtaacaaataatttataacttcctatgtgatgccaccttaattttgtcaagataattcaccaagcataataccatatattctcttgtgtgatggattgatgaacattaatgtgaagaagattacaagctcaagtattaactga

SEQ ID NO: 63004 - DNA, 1092 bp, Zea Mays
atccacagggccgcgcaagcgctctggcttcttccagtccagtccaccatccgcgccatggcgatggcgttcgcggctgcctccgcctggagcctcagtcttacagccttctccctcccgctgccccagtctctgcgcccgaaacctagccaactcctccatggcgcgaccagctcgttcccgcggccacgccgatgcgggtggggcgccgtggtgcgctgcgcgaagcgcacggggaagcagcggtacccgtcggagaagaagcggttgaacaggcgaaaacaggagttgctacgccaggccgccccggaggaggggagcaaggggcgggagtccgggtactggcggctctcgaagctcgctgttcccgcccgcgacgacccaggcaaggacttcaccggcatctccctgccgctactccaggccatcgccaaagccatcaagttcccggttccttctatgctccctgacgaggctttcactgtcatccgcaagtcatttgacgcacgaaaggttttgaaagaacctcaattcacttatattgttgatatggatgttaagaagattcttaatattgagccaagggcatgggattttattgctcggttggagcccaaacttggagttgtggaatacatgaccgaagagaagttagcagttgatctggtgaacttggtgcagaagttaccttattggagcgtggtcagcctgttgaacagagaggtcgtgacattggtgcactagcagttagacgaattctacaaccagagagcaacttttgctttggcgagggtggtgcaggtacgtggagtgatgggaagctgatgaccaggataggaaaaaacactgatggtgttcaggctgtgagaatcttcctgacctacatcgatctgttcccataaaactttactctcatagtctcatatatcattttcttagtagtacactattttttcacggtgtccaggcgtgagaaaattcctactgtacctcagcggctcaacctcaaacattgttttgtgtaatagctcacattcatgttccaattgttcaagagttcatgacttttttttggaatgaaatagctttctc

SEQ ID NO: 63005 - DNA, 1272 bp, Zea Mays
ggcagcgccagcggtagcagcaacgcagacacacagatgtgctgtgtgagagacaagagagagaaaggagtggagagagaagggcaggaaagcttagaagaagagagatccacctcgaagtaacccctccctccctccctcctcgcttgctcctgctggagtggagtcgagcctgctgctgccgctacctcctccccggcgccaggagagggagaggcgaggagaagccgcggccatgagggaggaggaggaggccagctggttcgcgcgcggcgaggagcagcagctcctgcggccggacgagctgatgcctctcacgcaaacgctcatcacgccccatctggccgtcgccttcgacatcacgacgcacggcgccggcgggacgggcgcggcggggggcgcaggtgcggggcccggcgcgggcggccccgacatcaacggcggcggtgcgtcgtcggcagcgggttccagcggcggcggcgggggcggcggcggcgacgagccggcccggacgctcaagcgcccgcgcctcgtgtggacgccgcagctgcacaagcgattcgtcgacgccgtggcgcacctcggcatcaagaacgccgtgcccaagaccataatgcagctgatgagcgtcgacggcctcacgcgcgagaacgtcgcctcccacctccagaagtaccgcctgtacctcaagcgcatgcaggggctgggcggcggcggcggcgggggaggaggcgggggcgcggggggaagccactcctccggctccggcactgacgccgccaccgagcacctcttcgccactgggcccgtccccttcctcccgccgggtcaccgcgcgcccgccgccgccgacagctacccgcccttctcccccatgggcggcgcgcaccaccaccagcaccaccagatcggccacttccaccaccccgccacgcgcccgctcgcccactacggcggcgccgctgtgggcggtttcgaccacggcttcctgagccgcgtcgggccacccgccgggccgcccgggatgcaccaccgcatggtcggcggcggcgccgggatggggatgatggcgcccgcctccttcgccgacgagatggacctcggatcccgaggcggtggcggcagcggcagccgccgcgagctgacgctgttcccgacgtccggggaccactgagcgccgccggccgggggctccgaccgacgacggcgatgggcatcggaccgcgggcgggcgggcggccgcctccgccctcggagacagacttcgctatc

SEQ ID NO: 63006 - DNA, 1703 bp, Zea Mays
ggcattcctgcaactacaactccctctccaattccctaatcccatcacaatccataacagttcccacaatagaagtatacccaatggatcgtggaggttctcaaaagaaaagacataaatctgttacaaatgttgacatcatcagtaatctacctgatgttattaaagacaaaattctctgctgtttgccaataaaagaagctgtaagaacatgtctcttgtcaaggaaatggaggtacacatgggcttcaatgactgaattgatgttcagagaagatgattttgctttaggcaatggtaatgaagacggtgacagcgacagatttgtttacttcgtcataacgtttctctccctccatgatggccctattttgaagtttgaaatgaatgctcgacgggttcacatgttttctcctggaggacacatccacaggtggatgcttatgctgtcaagaaatggaataaaagaaattcaaattaagacaaggatatggaggaattacaaaatcccttcttctttcttctcatgcgtggaattggaatatgcttgcctgcaaggatgtatattccagttgccacctctgtttgcaggctttaagcggatgcgtacccttcatttcgttgagttctgtgcaacggaaaacaatattggggaattagtagcgagctgcccgaacttggaggaacttattctctccaggttgctcagctttgctgatatcaccatccactcaacaaagctcaaagtcctaagagttgatggcatgtttaaacatctcaatcttgtgacgccgcacgtctcttcagcagtgattaacctgcaagttaacactggttatgtcaaaagggctgggtccaactttaatctttcccaattcattggttctcttttggatattgaaaatatttcattgctcgggcacgcttttgagtgtgcagcacatggaatcgtgcctggtaaactaccgagatcgttaaatcggctgaccgagataaccctggagcttgaccttggtaacctgaaggaagcaaacgcggctcactgtttgtttcaaattgctcccaacttgcgacgcatggagctacagcttatgcacaggggctattctgcacccacctcgagtttctgggactcggttgatcgtcaggattgtctcttcaagaacctttacacagttgtcatgaacaacttcactggttcctgtgcagagtcaggcttcttgaaacttctgctcgatgacgcgcctgtacttagaagtgcgcggatagaagacaacaacaaactggacaaagaatccctcaaacgcctcctgaagatgagaagagcatccaaggacgcagaaataatcctcctttgaggcgtggtcccctggctccagtagatgcccactgttctttcctggtgaagcgatttggtctgctgtgttataggttttattcaactaggcgtttgggcacaacttcgtctgaacaaaagttgtgtcttcgcgtatacctgtgtttcagtgtgtcaccttcagcaaagctaaatgttgcacccgagtcagagtcgtgtttcttttagcattttgtgttggtacttcgaaattctcttgctgcgctggccaacatgggtttgcttatatggctttggaatgatggacaaaatagtgcttgttagttgtggaattgtccatttaggcaacaaagtttttgaaaaccac

SEQ ID NO: 63007 - DNA, 1689 bp, Zea Mays
tagaagcaagccttcttcttgcccggttgtgggcagaggctcccggttcccacaatagaagtatacccaatggatcgtggaggttctcaaaagaaaagacataaatctgttacaaatgttgacatcatcagtaatctacctgatgttattaaagacaaaattctctgctgtttgccaataaaagaagctgtaagaacatgtctcttgtcaaggaaatggaggtacacatgggcttcaatgactgaattgatgttcagagaagatgattttgctttaggcaatggtaatgaagacggtgacagcgacagatttgtttacttcgtcataacgtttctctccctccatgatggccctattttgaagtttgaaatgaatgctcgacgggttcacatgttttctcctggaggacacatccacaggtggatgcttatgctgtcaagaaatggaataaaagaaattcaaattaagacaaggatatggaggaattacaaaatcccttcttctttcttctcatgcgtggaattggaatatgcttgcctgcaaggatgtatattccagttgccacctctgtttgcaggctttaagcggatgcgtacccttcatttcgttgagttctgtgcaacggaaaacaatattggggaattagtagcgagctgcccgaacttggaggaacttattctctccaggttgctcagctttgctgatatcaccatccactcaacaaagctcaaagtcctaagagttgatggcatgtttaaacatctcaatcttgtgacgccgcacgtctcttcagcagtgattaacctgcaagttaacactggttatgtcaaaagggctgggtccaactttaatctttcccaattcattggttctcttttggatattgaaaatatttcattgctcgggcacgcttttgagtgtgcagcacatggaatcgtgcctggtaaactaccgagatcgttaaatcggctgaccgagataaccctggagcttgaccttggtaacctgaaggaagcaaacgcggctcactgtttgtttcaaattgctcccaacttgcgacgcatggagctacagcttatgcacaggggctattctgcacccacctcgagtttctgggactcggttgatcgtcaggattgtctcttcaagaacctttacacagttgtcatgaacaacttcactggttcctgtgcagagtcaggcttcttgaaacttctgctcgatgacgcgcctgtacttagaagtgcgcggatagaagacaacaacaaactggacaaagaatccctcaaacgcctcctgaagatgagaagagcatccaaggacgcagaaataatcctcctttgaggcgtggtcccctggctccagtagatgcccactgttctttcctggtgaagcgatttggtctgctgtgttataggttttattcaactaggcgtttgggcacaacttcgtctgaacaaaagttgtgtcttcgcgtatacctgtgtttcagtgtgtcaccttcagcaaagctaaatgttgcacccgagtcagagtcgtgtttcttttagcattttgtgttggtacttcgaaattctcttgctgcgctggccaacatgggtttgcttatatggctttggaatgatggacaaaatagtgcttgttagttgtggaattgtccatttaggcaacaaagtttttgaaaaccac

SEQ ID NO: 63008 - DNA, 1669 bp, Zea Mays
agggtgaccccaatatgaggagaaggttcccacaatagaagtatacccaatggatcgtggaggttctcaaaagaaaagacataaatctgttacaaatgttgacatcatcagtaatctacctgatgttattaaagacaaaattctctgctgtttgccaataaaagaagctgtaagaacatgtctcttgtcaaggaaatggaggtacacatgggcttcaatgactgaattgatgttcagagaagatgattttgctttaggcaatggtaatgaagacggtgacagcgacagatttgtttacttcgtcataacgtttctctccctccatgatggccctattttgaagtttgaaatgaatgctcgacgggttcacatgttttctcctggaggacacatccacaggtggatgcttatgctgtcaagaaatggaataaaagaaattcaaattaagacaaggatatggaggaattacaaaatcccttcttctttcttctcatgcgtggaattggaatatgcttgcctgcaaggatgtatattccagttgccacctctgtttgcaggctttaagcggatgcgtacccttcatttcgttgagttctgtgcaacggaaaacaatattggggaattagtagcgagctgcccgaacttggaggaacttattctctccaggttgctcagctttgctgatatcaccatccactcaacaaagctcaaagtcctaagagttgatggcatgtttaaacatctcaatcttgtgacgccgcacgtctcttcagcagtgattaacctgcaagttaacactggttatgtcaaaagggctgggtccaactttaatctttcccaattcattggttctcttttggatattgaaaatatttcattgctcgggcacgcttttgagtgtgcagcacatggaatcgtgcctggtaaactaccgagatcgttaaatcggctgaccgagataaccctggagcttgaccttggtaacctgaaggaagcaaacgcggctcactgtttgtttcaaattgctcccaacttgcgacgcatggagctacagcttatgcacaggggctattctgcacccacctcgagtttctgggactcggttgatcgtcaggattgtctcttcaagaacctttacacagttgtcatgaacaacttcactggttcctgtgcagagtcaggcttcttgaaacttctgctcgatgacgcgcctgtacttagaagtgcgcggatagaagacaacaacaaactggacaaagaatccctcaaacgcctcctgaagatgagaagagcatccaaggacgcagaaataatcctcctttgaggcgtggtcccctggctccagtagatgcccactgttctttcctggtgaagcgatttggtctgctgtgttataggttttattcaactaggcgtttgggcacaacttcgtctgaacaaaagttgtgtcttcgcgtatacctgtgtttcagtgtgtcaccttcagcaaagctaaatgttgcacccgagtcagagtcgtgtttcttttagcattttgtgttggtacttcgaaattctcttgctgcgctggccaacatgggtttgcttatatggctttggaatgatggacaaaatagtgcttgttagttgtggaattgtccatttaggcaacaaagtttttgaaaaccac

SEQ ID NO: 63009 - DNA, 3291 bp, Zea Mays
gaagcaaaacccacgagccgaaaactcccaaaccctcctgtcggctgggctctccctccggcgaggccaccatgctagccgccgctcgcccccttcgccgcctctcctcttcttgttcctcttccgtcggcgcccttcgccgcgtcctcctacaccctccagcacccccgccttcgcttcagcctcctctttcgcctctccggacccttacgcgcgcccttcttccgtccctcgccgccgcccacaggttctccactacatccttctctacctccgccccatcacgcctaggagaatgcgttggcgtgttgggagctccggcgatagccgaggaggaggagggggaggagacgggggcgttggtgcggcatgacacggatgcgtacgcggcggtggagctggctctggactcagtggtaaaggtgttcacggtgtcgagcagccccaactacttcttgccatggcagaacaaggcgcagcgggagagcatgggctccgggtttgtaattcctggaagaaggatcgtgacgaatgcacatgtggtagctgatcatacttttgttcttgtgaggaagcatggttcgcctactaaatacaaggcagaagtccaagctgttggtcatgagtgcgacttggctctgttgacagttgagagtgaggagttttgggatggggtgaacagtttggagcttggagacatcccctttttgcaagaagcggtcgcagtggttggctaccctcaaggtggagataatatttctgtcaccaagggggttgtatctagagttgaaccaacacaatatgcccatggtgctacacagcttatggctatacaaatagatgcagctataaatccaggtaatagtggagggcctgccattatgggtgataaagtagccggagttgctttccagaatttgtcaggagcggaaaacattggttatatcataccagtgcctgtaattaagcgtttcatttctggagtagaagagagtggtaaatattctgggttttgtactcttggtgtatcttgccaggctactgaaaatattcagttaagagagtgctttgggatgcggcctgaaatgactggagttttagttagtagaataaaccctctatctgatgcttacaaggttttgaagaaggatgacatccttcttgagtttgatggtgtgcctatcgcaaatgatggcacagttccattccggaatagagagagaatcacctttgatcatctggtgtccatgaaaaaacctgaagaaacagctgttctcaaagtattacgagatggtaaagagcaagaattgggagtaacacttagacctgtgagtccttgcaatctcattacatttgatttcaatctgtatttttgataatatgggtacaattttaggaccgcttgttggttagcaaatataatagcgatattctgttgttatttctagttcatcttcacaccaattttcgccatatagagttctagacctggtacagactcaacctgcccatcagccagcctcaatatggcaatacttactatcagttccataactcaccccacagataattgtaagtttgtaatttactgaattcattacattagtaagtggacctatatctaagtagtcgaaagggtgcagagttgaagtcctctcttatgtaggtcgtagtagtacacaaaagtagaccaaattgtattctacacagctctcacagacctcgtctttgcagtttacacacatgattttttcccatagctggtgaactcaaattccattacttataagtaactaaatgacaaagtttcacctgtttaccactgcttcttacctaataccatatctaattaaactcaagcacccagggcttgagcttaaaccagtcacctgtgaaccatattacagagtttagatcttcaacaatacaaaaacaggaagaagttagagccacacagaactaaatacggattagaacaaagatgccactagcgaaaaatggcaacatcattggtgagataaaaaacagcattcgtgttacagtcgcaatcttcaagacttcaattgatcccagtatcccaccatctttgaccaccgggttctcctggacttctttctgctggccttgttgatgacactacagtgccaaagtcttgagtacttctgctcctctgctcaagctcattacagctctctggattatgcagtcctgcccaatataaaatgaacaaacggagtgaactgatgacctcagtaggagatttcgtccttttctttacagaacaaacattattccaccctttccatagagcacagaaaactgcagttagtcccactatttctatcttatgatagagccatagagcttattgaaattggaagttggaactgatcttttatggatttgtgttgtttattatgcagctgcaacctttagtcccagtccatcaatttgataaattaccaagctactacatatttgctggttttgtttttatcccacttacccagccctatctccatgaatttggagaagactggtataatgcctcaccacgccggttatgtgaacgggcactaagagagcttccaaagaagactggtgaacagttagttatcctatctcaggttctaatggatgatatcaatgtcggttatgaaaggcttgctgaactacaggtaaagaaggtaaatggtgtggaggttgaaaacctgaagcacctgtgcagcctcgtggaaggctgcaccgaagaaaacttaaggtttgacttggacgatgaaagagtcattgtcctgaagtaccagaacgcaaggcttgccacatcccgggtcctcaaacggcacaggataccgtcagccatatcgagcgaccttgtcgaagatcaagtaactgatggcgaggttgagacgtcatgcaccagctaatgcgagcctcttttttagacctaattgggagttccctgctgtagctcagctcaaggagcgagctgcattgttggcgaggcaagcgcacctggctgcctggctgcctggagtacatggtatcacttcctctaggacggctttagttttgacataaggaggagtgtctttagaaaataagattatgagctccagggcttttcagtctgaatgtaacggtaacataaccattctttactagaacatttattttttccatcattgacaaagcaccccacatggtctgtatcatcaggaaacatatacatcgtataaaaaacatcggaaaaaggaaagagttgcagttcaatgtttgttggccagtgtgatt

SEQ ID NO: 63010 - DNA, 1964 bp, Zea Mays
cggctcctccctctcggattcccaaacgccaaaatctcgttgtcacgcccacgcaccgcatcgttcgcttcctttcgtcaactccacttctcttctccgcgtcacctcctcttcgccgccgccgacgcttcacccggcagccagccatggatgaggagtacgacgtgatcgtactaggcacggggctcaaggagtgcatcctcagcggtctcctctctgtagacggcctcaaggttttgcatatggacagaaatgactactatggaggagattccacctcactcaaccttaatcagctctggaagaggtttagaggggaagacaagcccccagcacatctaggtgcaagcagagactacaatgtggacatggtgccaaaggactttctattatcagtttatgatggcaaatgggacattggttcgaaccctcattcacaccgacgtgacaaagtacttgtcattcaaagctgttgatgggagctatgttttcagcaaagggaagatttacaaggtccctgccactgatatggaggctctgaagtcccctttgatgggcctattcgagaagcgcagagcaaggaacttcttcatttatgtccaagattacaatgaagctgatccaaggacacatcaaggattggaccttactagggtgacaactagagaacttatagcaaaatatggtttaagtgatgatacagtggatttcgttggacatgcacttgctcttcatagagatgatcgttatctcgatgaaccggcacttgatacagtgaaaaggatgaaactatatgcagactctcttgcacgctttcaaggaggctcaccttatatctatccactatatgggttgggtgagctaccacagggttttgcacgactgagtgctgtttatggtggtacttacatgttaaacaagccagattgcaaggttgaattcgatatggaggggaaagtgtgtggtgtcacatctgaaggtgaaactgcaaagtgcaagaaggtggtgtgtgatccttcgtatttacaaaacaaggtcaggaagattggtagagttgttcgtgcaattgctatcatgagccacccaatccctaatacaaacgagtcacactcggttcaaattattttgcctcagaagcaacttggacgcagatcagacatgtatgttttctgttgctcatacacgcacaatgttgcaccaagagggaagttcattgcatttgtgtctgcagaagcagagactgataatccccagtctgagctaaagcctggaattgatctacttggttctgtagatgagattttctatgatatctatgacagatatgaaccagtgaatgaaccatctcttgataattgctttgtctcgacaagctatgatgccaccacacattttgagacaactgtaacagatgttctgaacatgtatacaatgatcaccggaaagactgtagaccttagtgtggatttgagtgctgctagtgctgccgaagaatactgatttcagtcatagtgtcatgtttatcaaagatcacatcgttggcgacagcacatgacccacattaatgaatggctggaatgcgtttattcggttccagattatatcatgccacatgtactgttctgcgtaatgtctactgggctggcagaactatgcacaatgttgattcaagttgatggatggtggtggttctgttatttactagttagtcgaatggtgcacaacattaaacagtgaccatcatggctgtgtgatgtatcataataactgttcagtaaatttgtgctctgcctgagttctgctcgatgctattgacggcgccctaggtgcttgttccactgtgaatgaaccaagtctgtcacccatcatgttcttcaaagatttttaccaaagatctttttggtctgatgtgtcagaccggctcttgtgatggacgtattgtttgccaaattatgcgattattt

SEQ ID NO: 63011 - DNA, 2028 bp, Zea Mays
tccggctcctccctctcggattcccaaacgccaaaatctcgttgtcacgcccacgcaccgcatcgttcgcttcctttcgtcaactccacttctcttctccgcgtcacctcctcttcgccgccgccgacgcttcacccggcagccagccatggatgaggagtacgacgtgatcgtactaggcacggggctcaaggagtgcatcctcagcggtctcctctctgtagacggcctcaaggttttgcatatggacagaaatgactactatggaggagattccacctcactcaaccttaatcagctctggaagaggtttagaggggaagacaagcccccagcacatctaggtgcaagcagagactacaatgtggacatggtgccaaagtttatgatggcaaatgggacattggttcgaaccctcattcacaccgacgtgacaaagtacttgtcattcaaagctgttgatgggagctatgttttcagcaaagggaagatttacaaggtccctgccactgatatggaggctctgaagtcccctttgatgggcctattcgagaagcgcagagcaaggaacttcttcatttatgtccaagattacaatgaagctgatccaaggacacatcaaggattggaccttactagggtgacaactagagaacttatagcggttgtgctcctacaggatccattgtgaacattgctgcctcgcagattatacatgaatagcattttattccatatgcgaaaatatggtttaagtgatgatacagtggatttcgttggacatgcacttgctcttcatagagatgatcgttatctcgatgaaccggcacttgatacagtgaaaaggatgaaactatatgcagactctcttgcacgctttcaaggaggctcaccttatatctatccactatatgggttgggtgagctaccacagggttttgcacgactgagtgctgtttatggtggtacttacatgttaaacaagccagattgcaaggttgaattcgatatggaggggaaagtgtgtggtgtcacatctgaaggtgaaactgcaaagtgcaagaaggtggtgtgtgatccttcgtatttacaaaacaaggtcaggaagattggtagagttgttcgtgcaattgctatcatgagccacccaatccctaatacaaacgagtcacactcggttcaaattattttgcctcagaagcaacttggacgcagatcagacatgtatgttttctgttgctcatacacgcacaatgttgcaccaagagggaagttcattgcatttgtgtctgcagaagcagagactgataatccccagtctgagctaaagcctggaattgatctacttggttctgtagatgagattttctatgatatctatgacagatatgaaccagtgaatgaaccatctcttgataattgctttgtctcgacaagctatgatgccaccacacattttgagacaactgtaacagatgttctgaacatgtatacaatgatcaccggaaagactgtagaccttagtgtggatttgagtgctgctagtgctgccgaagaatactgatttcagtcatagtgtcatgtttatcaaagatcacatcgttggcgacagcacatgacccacattaatgaatggctggaatgcgtttattcggttccagattatatcatgccacatgtactgttctgcgtaatgtctactgggctggcagaactatgcacaatgttgattcaagttgatggatggtggtggttctgttatttactagttagtcgaatggtgcacaacattaaacagtgaccatcatggctgtgtgatgtatcataataactgttcagtaaatttgtgctctgcctgagttctgctcgatgctattgacggcgccctaggtgcttgttccactgtgaatgaaccaagtctgtcacccatcatgttcttcaaagatttttaccaaagatctttttggtctgatgtgtcagaccggctcttgtgatggacgtattgtttgccaaattatgcgattattt

SEQ ID NO: 63012 - DNA, 1822 bp, Zea Mays
aattagccagagcccagagcccagagcccggaacaggcgcggcggatataacacactccaccctctccgcgactccgcctcgcggcggagacgttccgcggccattcatacggcgtggctaggagcactccttcgaatcggcatcgcaattcatacggctacaacgtctattctgtgggcacttcgtctccgatcgattcacggcaagagcgagagttcatggattcgacagggcccatgagggtctccatcaaagcccaccgccccgactggaaatcggagaacaaattgcctcagaagagttagaaaggacagaaatgacttgctttggaagatcaggaagcagggactgcccggcaatgtcatggaaaaggtcagatctgctgtcaggagcgtcatatctgatgaggtagagaaactcaaacagtccaatacagaaaacgaggaccaagaaatggatgtcatatgggagtatcaaggactgcatgctgctaagcctgctgaaattgaaagtgaagatatattgcttgaaatggaaagacttgtttgtgaagatattagagaagaagtaatcagaaaacaactagaggcacttgatgaggaagatgcatatttagctcaaagtgttttggatcatatgcaactaaatgacattgaggctgccgaaactgctaagctctggtgtccagtatgcaagcaaggagatctacgagaaacacgtaatctcatatactgtactctctgtaatctacggcttgaccttggagaagataagatgacgctggagttcttacgagaacggttggccaatgcacatatggatcactttgacagaggatgcaaatcagcacccaagttctgtttacagactatgtttggcctgactgcgctctacatacagtgtgcagaatgcagtacatttgatatcgtggtataaccaacaagatgctgatatgaatcaacacttcaacggaggaaagaaatgttacaaaacttacttgaagttatttcatcgcttcatgtaagattagctggtgaagttatggcaagatggctgcaatccgaaaggtggcacacactcagcacctgaacacgttcatccattccagcttctggtcaaaacaattgacatgcatgcatgcatgtggaatttccacgtatgtccaatttaaatgttgcaaccggtgtaaggtggttagtaaatatgcacttgactatggcaacatctagtttccagcttacttgaaagttgaaactgcaactacaattggaaccaaacactacccaattgatcttgaagtcgtctttgggctagctcgcattcctttgcagatctgctaccggtggcgagcgtgtagagatggcaatggttacccgcgacccgatacctgatgggtatttactctattagggtatatatgtaggctaaataatctacccgtgggtctgttattggacaaaaatcttcacccaatgggtaaacgggtattagaacattccgccttcacccatacccgttaacccgtgggtataaaatacccaatataaacttagcccaagcataaacttgaactttattcattcatcttttttactatttaacaatcttttatgccataatgtcatagaaggtttaacggcaatttaatgaccatgtaatggaacatgtaatatactatgtagtactatcctagtgttactactttatccaattatctttggtgtgttgaatgtgtggttaaatgatgctagaaattttgtaatggtatttatatggatatacttgacatttgtataatataatattttgatagatgtacaa

SEQ ID NO: 63013 - DNA, 1750 bp, Zea Mays
aattagccagagcccagagcccagagcccggaacaggcgcggcggatataacacactccaccctctccgcgactccgcctcgcggcggagacgttccgcggccattcatacggcgtggctaggagcactccttcgaatcggcatcgcaattcatacggctacaacgtctattctgtgggcacttcgtctccgatcgattcacggcaagagcgagagttcatggattcgacagggcccatgagggtctccatcaaagcccaccgccccgactggaaatcggagcttagaacaaattgcctcagaagagttagaaaggacagaaatgacttgctttggaagatcaggaagcagggactgcccggcaatgtcatggaaaaggtcagatctgctgtcaggagcgtcatatctgatgaggtagagaaactcaaacagtccaatacagaaaacgaggaccaagaaatggatgtcatatgggagtatcaaggactgcatgctgctaagcctgctgaaattgaaagtgaagatatattgcttgaaatggaaagacttgtttgtgaagatattagagaagaagtaatcagaaaacgctgccgaaactgctaagctctggtgtccagtatgcaagcaaggagatctacgagaaacacgtaatctcatatactgtactctctgtaatctacggcttgaccttggagaagataagatgacgctggagttcttacgagaacggttggccaatgcacatatggatcactttgacagaggatgcaaatcagcacccaagttctgtttacagactatgtttggcctgactgcgctctacatacagtgtgcagaatgcagtacatttgatatcgtggtataaccaacaagatgctgatatgaatcaacacttcaacggaggaaagaaatgttacaaaacttacttgaagttatttcatcgcttcatgtaagattagctggtgaagttatggcaagatggctgcaatccgaaaggtggcacacactcagcacctgaacacgttcatccattccagcttctggtcaaaacaattgacatgcatgcatgcatgtggaatttccacgtatgtccaatttaaatgttgcaaccggtgtaaggtggttagtaaatatgcacttgactatggcaacatctagtttccagcttacttgaaagttgaaactgcaactacaattggaaccaaacactacccaattgatcttgaagtcgtctttgggctagctcgcattcctttgcagatctgctaccggtggcgagcgtgtagagatggcaatggttacccgcgacccgatacctgatgggtatttactctattagggtatatatgtaggctaaataatctacccgtgggtctgttattggacaaaaatcttcacccaatgggtaaacgggtattagaacattccgccttcacccatacccgttaacccgtgggtataaaatacccaatataaacttagcccaagcataaacttgaactttattcattcatcttttttactatttaacaatcttttatgccataatgtcatagaaggtttaacggcaatttaatgaccatgtaatggaacatgtaatatactatgtagtactatcctagtgttactactttatccaattatctttggtgtgttgaatgtgtggttaaatgatgctagaaattttgtaatggtatttatatggatatacttgacatttgtataatataatattttgatagatgtacaa

SEQ ID NO: 63014 - DNA, 1899 bp, Zea Mays
aattagccagagcccagagcccagagcccggaacaggcgcggcggatataacacactccaccctctccgcgactccgcctcgcggcggagacgttccgcggccattcatacggcgtggctaggagcactccttcgaatcggcatcgcaattcatacggctacaacgtctattctgtgggcacttcgtctccgatcgattcacggcaagagcgagagttcatggattcgacagggcccatgagggtctccatcaaagcccaccgccccgactggaaatcggagcttagaacaaattgcctcagaagagttagaaaggacagaaatgacttgctttggaagatcaggaagcagggactgcccggcaatgtcatggaaaaggtcagatctgctgtcaggagcgtcatatctgatgaggtagagaaactcaaacagtccaatacagaaaacgaggaccaagaaatggatgtcatatgggagtatcaaggactgcatgctgctaagcctgctgaaattgaaagtgaagatatattgcttgaaatggaaagacttgtttgtgaagatattagagaagaagtaatcagaaaacgtgtggtgcctataacctctgttattctttcattcccactgcttactgaccagcaatctgtttgcccatcttattgctggagtttagctgcaaaaacaacctgattaactgtttttgcatagttgtgcggttgtgccaattctatgatacttattttactcattggtccggaatttttcatcagttaatcatttgcagaactagaggcacttgatgaggaagatgcatatttagctcaaagtgttttggatcatatgcaactaaatgacattgaggctgccgaaactgctaagctctggtgtccagtatgcaagcaaggagatctacgagaaacacgtaatctcatatactgtactctctgtaatctacggcttgaccttggagaagataagtgtgcagaatgcagtacatttgatatcgtggtataaccaacaagatgctgatatgaatcaacacttcaacggaggaaagaaatgttacaaaacttacttgaagttatttcatcgcttcatgtaagattagctggtgaagttatggcaagatggctgcaatccgaaaggtggcacacactcagcacctgaacacgttcatccattccagcttctggtcaaaacaattgacatgcatgcatgcatgtggaatttccacgtatgtccaatttaaatgttgcaaccggtgtaaggtggttagtaaatatgcacttgactatggcaacatctagtttccagcttacttgaaagttgaaactgcaactacaattggaaccaaacactacccaattgatcttgaagtcgtctttgggctagctcgcattcctttgcagatctgctaccggtggcgagcgtgtagagatggcaatggttacccgcgacccgatacctgatgggtatttactctattagggtatatatgtaggctaaataatctacccgtgggtctgttattggacaaaaatcttcacccaatgggtaaacgggtattagaacattccgccttcacccatacccgttaacccgtgggtataaaatacccaatataaacttagcccaagcataaacttgaactttattcattcatcttttttactatttaacaatcttttatgccataatgtcatagaaggtttaacggcaatttaatgaccatgtaatggaacatgtaatatactatgtagtactatcctagtgttactactttatccaattatctttggtgtgttgaatgtgtggttaaatgatgctagaaattttgtaatggtatttatatggatatacttgacatttgtataatataatattttgatagatgtacaa

SEQ ID NO: 63015 - DNA, 1841 bp, Zea Mays
aattagccagagcccagagcccagagcccggaacaggcgcggcggatataacacactccaccctctccgcgactccgcctcgcggcggagacgttccgcggccattcatacggcgtggctaggagcactccttcgaatcggcatcgcaattcatacggctacaacgtctattctgtgggcacttcgtctccgatcgattcacggcaagagcgagagttcatggattcgacagggcccatgagggtctccatcaaagcccaccgccccgactggaaatcggagcttagaacaaattgcctcagaagagttagaaaggacagaaatgacttgctttggaagatcaggaagcagggactgcccggcaatgtcatggaaaaggtcagatctgctgtcaggagcgtcatatctgatgaggtagagaaactcaaacagtccaatacagaaaacgaggaccaagaaatggatgtcatatgggagtatcaaggactgcatgctgctaagcctgctgaaattgaaagtgaagatatattgcttgaaatggaaagacttgtttgtgaagatattagagaagaagtaatcagaaaacttaatcatttgcagaactagaggcacttgatgaggaagatgcatatttagctcaaagtgttttggatcatatgcaactaaatgacattgaggctgccgaaactgctaagctctggtgtccagtatgcaagcaaggagatctacgagaaacacgtaatctcatatactgtactctctgtaatctacggcttgaccttggagaagataagatgacgctggagttcttacgagaacggttggccaatgcacatatggatcactttgacagaggatgcaaatcagcacccaagttctgtttacagactatgtttggcctgactgcgctctacatacagtgtgcagaatgcagtacatttgatatcgtggtataaccaacaagatgctgatatgaatcaacacttcaacggaggaaagaaatgttacaaaacttacttgaagttatttcatcgcttcatgtaagattagctggtgaagttatggcaagatggctgcaatccgaaaggtggcacacactcagcacctgaacacgttcatccattccagcttctggtcaaaacaattgacatgcatgcatgcatgtggaatttccacgtatgtccaatttaaatgttgcaaccggtgtaaggtggttagtaaatatgcacttgactatggcaacatctagtttccagcttacttgaaagttgaaactgcaactacaattggaaccaaacactacccaattgatcttgaagtcgtctttgggctagctcgcattcctttgcagatctgctaccggtggcgagcgtgtagagatggcaatggttacccgcgacccgatacctgatgggtatttactctattagggtatatatgtaggctaaataatctacccgtgggtctgttattggacaaaaatcttcacccaatgggtaaacgggtattagaacattccgccttcacccatacccgttaacccgtgggtataaaatacccaatataaacttagcccaagcataaacttgaactttattcattcatcttttttactatttaacaatcttttatgccataatgtcatagaaggtttaacggcaatttaatgaccatgtaatggaacatgtaatatactatgtagtactatcctagtgttactactttatccaattatctttggtgtgttgaatgtgtggttaaatgatgctagaaattttgtaatggtatttatatggatatacttgacatttgtataatataatattttgatagatgtacaa

SEQ ID NO: 63016 - DNA, 1768 bp, Zea Mays
aattagccagagcccagagcccagagcccggaacaggcgcggcggatataacacactccaccctctccgcgactccgcctcgcggcggagacgttccgcggccattcatacggcgtggctaggagcactccttcgaatcggcatcgcaattcatacggctacaacgtctattctgtgggcacttcgtctccgatcgattcacggcaagagcgagagttcatggattcgacagggcccatgagggtctccatcaaagcccaccgccccgactggaaatcggagcttagaacaaattgcctcagaagagttagaaaggacagaaatgacttgctttggaagatcaggaagcagggactgcccggcaatgtcatggaaaaggtcagatctgctgtcaggagcgtcatatctgatgaggtagagaaactcaaacagtccaatacagaaaacgaggaccaagaaatggatgtcatatgggagtatcaaggactgcatgctgctaagcctgctgaaattgaaagtgaagatatattgcttgaaatggaaagacttgtttgtgaagatattagagaagaagtaatcagaaaacaactagaggcacttgatgaggaagatgcatatttagctcaaagtgttttggatcatatgcaactaaatgacattgaggctgccgaaactgctaagctctggtgtccagtatgcaagcaaggagatctacgagaaacacgtaatctcatatactgtactctctgtaatctacggcttgaccttggagaagataagaggatgcaaatcagcacccaagttctgtttacagactatgtttggcctgactgcgctctacatacagtgtgcagaatgcagtacatttgatatcgtggtataaccaacaagatgctgatatgaatcaacacttcaacggaggaaagaaatgttacaaaacttacttgaagttatttcatcgcttcatgtaagattagctggtgaagttatggcaagatggctgcaatccgaaaggtggcacacactcagcacctgaacacgttcatccattccagcttctggtcaaaacaattgacatgcatgcatgcatgtggaatttccacgtatgtccaatttaaatgttgcaaccggtgtaaggtggttagtaaatatgcacttgactatggcaacatctagtttccagcttacttgaaagttgaaactgcaactacaattggaaccaaacactacccaattgatcttgaagtcgtctttgggctagctcgcattcctttgcagatctgctaccggtggcgagcgtgtagagatggcaatggttacccgcgacccgatacctgatgggtatttactctattagggtatatatgtaggctaaataatctacccgtgggtctgttattggacaaaaatcttcacccaatgggtaaacgggtattagaacattccgccttcacccatacccgttaacccgtgggtataaaatacccaatataaacttagcccaagcataaacttgaactttattcattcatcttttttactatttaacaatcttttatgccataatgtcatagaaggtttaacggcaatttaatgaccatgtaatggaacatgtaatatactatgtagtactatcctagtgttactactttatccaattatctttggtgtgttgaatgtgtggttaaatgatgctagaaattttgtaatggtatttatatggatatacttgacatttgtataatataatattttgatagatgtacaa

SEQ ID NO: 63017 - DNA, 1655 bp, Zea Mays
aattagccagagcccagagcccagagcccggaacaggcgcggcggatataacacactccaccctctccgcgactccgcctcgcggcggagacgttccgcggccattcatacggcgtggctaggagcactccttcgaatcggcatcgcaattcatacggctacaacgtctattctgtgggcacttcgtctccgatcgattcacggcaagagcgagagttcatggattcgacagggcccatgagggtctccatcaaagcccaccgccccgactggaaatcggagcttagaacaaattgcctcagaagagttagaaaggacagaaatgacttgctttggaagatcaggaagcagggactgcccggcaatgtcatggaaaaggtcagatctgctgtcaggagcgtcatatctgatgagaactagaggcacttgatgaggaagatgcatatttagctcaaagtgttttggatcatatgcaactaaatgacattgaggctgccgaaactgctaagctctggtgtccagtatgcaagcaaggagatctacgagaaacacgtaatctcatatactgtactctctgtaatctacggcttgaccttggagaagataagatgacgctggagttcttacgagaacggttggccaatgcacatatggatcactttgacagaggatgcaaatcagcacccaagttctgtttacagactatgtttggcctgactgcgctctacatacagtgtgcagaatgcagtacatttgatatcgtggtataaccaacaagatgctgatatgaatcaacacttcaacggaggaaagaaatgttacaaaacttacttgaagttatttcatcgcttcatgtaagattagctggtgaagttatggcaagatggctgcaatccgaaaggtggcacacactcagcacctgaacacgttcatccattccagcttctggtcaaaacaattgacatgcatgcatgcatgtggaatttccacgtatgtccaatttaaatgttgcaaccggtgtaaggtggttagtaaatatgcacttgactatggcaacatctagtttccagcttacttgaaagttgaaactgcaactacaattggaaccaaacactacccaattgatcttgaagtcgtctttgggctagctcgcattcctttgcagatctgctaccggtggcgagcgtgtagagatggcaatggttacccgcgacccgatacctgatgggtatttactctattagggtatatatgtaggctaaataatctacccgtgggtctgttattggacaaaaatcttcacccaatgggtaaacgggtattagaacattccgccttcacccatacccgttaacccgtgggtataaaatacccaatataaacttagcccaagcataaacttgaactttattcattcatcttttttactatttaacaatcttttatgccataatgtcatagaaggtttaacggcaatttaatgaccatgtaatggaacatgtaatatactatgtagtactatcctagtgttactactttatccaattatctttggtgtgttgaatgtgtggttaaatgatgctagaaattttgtaatggtatttatatggatatacttgacatttgtataatataatattttgatagatgtacaa

SEQ ID NO: 63018 - DNA, 1814 bp, Zea Mays
aattagccagagcccagagcccagagcccggaacaggcgcggcggatataacacactccaccctctccgcgactccgcctcgcggcggagacgttccgcggccattcatacggcgtggctaggagcactccttcgaatcggcatcgcaattcatacggctacaacgtctattctgtgggcacttcgtctccgatcgattcacggcaagagcgagagttcatggattcgacagggcccatgagggtctccatcaaagcccaccgccccgactggaaatcggagcttagaacaaattgcctcagaagagttagaaaggacagaaatgacttgctttggaagatcaggaagcagggactgcccggcaatgtcatggaaaaggtcagatctgctgtcaggagcgtcatatctgatgaggtagagaaactcaaacagtccaatacagaaaacgaggaccaagaaatggatgtcatatgggagtatcaaggactgcatgctgctaagcctgctgaaattgaaagtgaagatatattgcttgaaatggaaagacttgtttgtgaagatattagagaagaaaactagaggcacttgatgaggaagatgcatatttagctcaaagtgttttggatcatatgcaactaaatgacattgaggctgccgaaactgctaagctctggtgtccagtatgcaagcaaggagatctacgagaaacacgtaatctcatatactgtactctctgtaatctacggcttgaccttggagaagataagatgacgctggagttcttacgagaacggttggccaatgcacatatggatcactttgacagaggatgcaaatcagcacccaagttctgtttacagactatgtttggcctgactgcgctctacatacagtgtgcagaatgcagtacatttgatatcgtggtataaccaacaagatgctgatatgaatcaacacttcaacggaggaaagaaatgttacaaaacttacttgaagttatttcatcgcttcatgtaagattagctggtgaagttatggcaagatggctgcaatccgaaaggtggcacacactcagcacctgaacacgttcatccattccagcttctggtcaaaacaattgacatgcatgcatgcatgtggaatttccacgtatgtccaatttaaatgttgcaaccggtgtaaggtggttagtaaatatgcacttgactatggcaacatctagtttccagcttacttgaaagttgaaactgcaactacaattggaaccaaacactacccaattgatcttgaagtcgtctttgggctagctcgcattcctttgcagatctgctaccggtggcgagcgtgtagagatggcaatggttacccgcgacccgatacctgatgggtatttactctattagggtatatatgtaggctaaataatctacccgtgggtctgttattggacaaaaatcttcacccaatgggtaaacgggtattagaacattccgccttcacccatacccgttaacccgtgggtataaaatacccaatataaacttagcccaagcataaacttgaactttattcattcatcttttttactatttaacaatcttttatgccataatgtcatagaaggtttaacggcaatttaatgaccatgtaatggaacatgtaatatactatgtagtactatcctagtgttactactttatccaattatctttggtgtgttgaatgtgtggttaaatgatgctagaaattttgtaatggtatttatatggatatacttgacatttgtataatataatattttgatagatgtacaa

SEQ ID NO: 63019 - DNA, 741 bp, Zea Mays
aattagccagagcccagagcccagagcccggaacaggcgcggcggatataacacactccaccctctccgcgactccgcctcgcggcggagacgttccgcggccattcatacggcgtggctaggagcactccttcgaatcggcatcgcaattcatacggctacaacgtctattctgtgggcacttcgtctccgatcgattcacggcaagagcgagagttcatggattcgacagggcccatgagggtctccatcaaagcccaccgccccgactggaaatcggagcttagaacaaattgcctcagaagagttagaaaggacagaaatgacttgctttggaagatcaggaagcagggactgcccggcaatgtcatggaaaaggtcagatctgctgtcaggagcgtcatatctgatgaggtagagaaactcaaacagtccaatacagaaaacgaggaccaagaaatggatgtcatatgggagtatcaaggactgcatgctgctaagcctgctgaaattgaaagtgaagatatattgcttgaaatggaaagacttgtttgtgaagatattagagaagaagtaatcagaaaacaactagaggcacttgatgaggaagatgcatatttagctcaaagtgttttggatcatatgcaactaaatgacattgagggggagtatttgttaaatctgcacacttcgattgtgatatggactttggacccgggccaatactgacgcagataaatc

SEQ ID NO: 63020 - DNA, 420 bp, Zea Mays
aattagccagagcccagagcccagagcccggaacaggcgcggcggatataacacactccaccctctccgcgactccgcctcgcggcggagacgttccgcggccattcatacggcgtggctaggagcactccttcgaatcggcatcgcaattcatacggctacaacgtctattctgtgggcacttcgtctccgatcgattcacggcaagagcgagagttcatggattcgacagggcccatgagggtctccatcaaagcccaccgccccgactggaaatcggagcttagaacaaattgcctcagaagagttagaaaggacagaaatgacttgctttggaagatcaggaagcagggactgcccggcaatgtcatggaaaaaattctcactgacgtgctgacactgagggcataaatagcaatg

SEQ ID NO: 63021 - DNA, 1360 bp, Zea Mays
ttctataaactaggtcataaactgggaaaagttccacttttgtcccttgaagccatacatcagctgcacattttcatatttgttctggcaatcacacatgttattttcagcgtcacaactatgcttttaggaggtgcacagatacaccaatggaaacagtgggagaatggaattaaaaaagatgctcctggaaatgggcctaaggtaaccaatgtacatcatcatgaatttatcaagaaacgttttaagggtattggcaaagattctataatattgagttggctgcattcttttggtaagcagttttatagatcagtatctaaatcagattacaccacaatgcgtcttggttttatcatgactcactgccctggaaatccaaaatttgatttccatagatacatggtaagggttttagaggcggattttaagaaagtggtaggcataagctggtacttgtgggtcttcgtggtgatatttctgttgctgaatgttaatggctggcacacatacttttggattgctttccttccccttattcttctgttagccattggcactaagctggagcatgtcatagctcagctagcccatgatgtagctgagaagcacacagcggtcgagggcgatgtgatcgtaaaaccatcagatgaacacttctggttcggcaagcctagggttatcctttacctgatccacttcatcctctttcagaatgcgtttgagattgcgtttttcttctggatactgagcacttatggattcgactcgtgcatcatgggacaagttcgttttattgtgccaaggcttgtcatcggggtggttattcagcttctctgcagctacagcaccttgcctctgtatgcaattgtaacccagatggggagctgctacaagaaggagatcttcaacgagcatgtgcagcagggcgtcctgggctgggctcagaaggtcaagatgaaaaagggactgaagggagctgcatctgctagcaaggacgaatcgattaccaatgccgattcggcaggaccttccgttaagattgaaatggcgaaggctggggaggatgttgagatcgttggaaacacaggttgattgggacaatagggtgcccgtgttgtaatgatgtaacaggttaatatgccatcatctttttttgtagatactagatagcttgctgtggcaataccgcaatagcggtgaactagagaaggtgagtttgggcccgggagcctcatctgttatcggtccagtaggaagcaaattcttatatacgggatatcgataagaaatgaactaagaacatgttcctggattcattaccactaaaaattagctagctaaaagctgttattttttt

SEQ ID NO: 63022 - DNA, 1587 bp, Zea Mays
gcgatggccaaaccattgcccctgagttgatgcttctggggttcatctccctgctgctgacggtgttccaggggatgatccggaggacgtgcatccctgaacgctggacattccacatgctgccatgcgagaagccagatgagaaggccggtgaggccgccaccatggagcattttgtagggacgcttggcaggatcggtaggcgtctgttgcaggaaggcactgctggggctgagcaatgccagaagaagggaaaagttccacttttgtcccttgaagccatacatcagctgcacattttcatatttgttctggcaatcacacatgttattttcagcgtcacaactatgcttttaggaggtgcacagatacaccaatggaaacagtgggagaatggaattaaaaaagatgctcctggaaatgggcctaaggtaaccaatgtacatcatcatgaatttatcaagaaacgttttaagggtattggcaaagattctataatattgagttggctgcattcttttggtaagcagttttatagatcagtatctaaatcagattacaccacaatgcgtcttggttttatcatgactcactgccctggaaatccaaaatttgatttccatagatacatggtaagggttttagaggcggattttaagaaagtggtaggcataagctggtacttgtgggtcttcgtggtgatatttctgttgctgaatgttaatggctggcacacatacttttggattgctttccttccccttattcttctgttagccattggcactaagctggagcatgtcatagctcagctagcccatgatgtagctgagaagcacacagcggtcgagggcgatgtgatcgtaaaaccatcagatgaacacttctggttcggcaagcctagggttatcctttacctgatccacttcatcctctttcagaatgcgtttgagattgcgtttttcttctggatactgagcacttatggattcgactcgtgcatcatgggacaagttcgttttattgtgccaaggcttgtcatcggggtggttattcagcttctctgcagctacagcaccttgcctctgtatgcaattgtaacccagatggggagctgctacaagaaggagatcttcaacgagcatgtgcagcagggcgtcctgggctgggctcagaaggtcaagatgaaaaagggactgaagggagctgcatctgctagcaaggacgaatcgattaccaatgccgattcggcaggaccttccgttaagattgaaatggcgaaggctggggaggatgttgagatcgttggaaacacaggttgattgggacaatagggtgcccgtgttgtaatgatgtaacaggttaatatgccatcatctttttttgtagatactagatagcttgctgtggcaataccgcaatagcggtgaactagagaaggtgagtttgggcccgggagcctcatctgttatcggtccagtaggaagcaaattcttatatacgggatatcgataagaaatgaactaagaacatgttcctggattcattaccactaaaaattagctagctaaaagctgttattttttt

SEQ ID NO: 63023 - DNA, 1590 bp, Zea Mays
gttttcttgaaatggggtgattggctaagttgatgcttctggggttcatctccctgctgctgacggtgttccaggggatgatccggaggacgtgcatccctgaacgctggacattccacatgctgccatgcgagaagccagatgagaaggccggtgaggccgccaccatggagcattttgtagggacgcttggcaggatcggtaggcgtctgttgcaggaaggcactgctggggctgagcaatgccagaagaagggaaaagttccacttttgtcccttgaagccatacatcagctgcacattttcatatttgttctggcaatcacacatgttattttcagcgtcacaactatgcttttaggaggtgcacagatacaccaatggaaacagtgggagaatggaattaaaaaagatgctcctggaaatgggcctaaggtaaccaatgtacatcatcatgaatttatcaagaaacgttttaagggtattggcaaagattctataatattgagttggctgcattcttttggtaagcagttttatagatcagtatctaaatcagattacaccacaatgcgtcttggttttatcatgactcactgccctggaaatccaaaatttgatttccatagatacatggtaagggttttagaggcggattttaagaaagtggtaggcataagctggtacttgtgggtcttcgtggtgatatttctgttgctgaatgttaatggctggcacacatacttttggattgctttccttccccttattcttctgttagccattggcactaagctggagcatgtcatagctcagctagcccatgatgtagctgagaagcacacagcggtcgagggcgatgtgatcgtaaaaccatcagatgaacacttctggttcggcaagcctagggttatcctttacctgatccacttcatcctctttcagaatgcgtttgagattgcgtttttcttctggatactgagcacttatggattcgactcgtgcatcatgggacaagttcgttttattgtgccaaggcttgtcatcggggtggttattcagcttctctgcagctacagcaccttgcctctgtatgcaattgtaacccagatggggagctgctacaagaaggagatcttcaacgagcatgtgcagcagggcgtcctgggctgggctcagaaggtcaagatgaaaaagggactgaagggagctgcatctgctagcaaggacgaatcgattaccaatgccgattcggcaggaccttccgttaagattgaaatggcgaaggctggggaggatgttgagatcgttggaaacacaggttgattgggacaatagggtgcccgtgttgtaatgatgtaacaggttaatatgccatcatctttttttgtagatactagatagcttgctgtggcaataccgcaatagcggtgaactagagaaggtgagtttgggcccgggagcctcatctgttatcggtccagtaggaagcaaattcttatatacgggatatcgataagaaatgaactaagaacatgttcctggattcattaccactaaaaattagctagctaaaagctgttattttttt

SEQ ID NO: 63024 - DNA, 1941 bp, Zea Mays
gcccgtccccatccaatttcttttcccggccaagttaccgccggacaaaaagacgggaaaaaaaacacggcggaccaccacgcctgttctcagtcacgctagtagtaggaaatcctagcgcgtcgctgcttccattaccgcctccgcaaccagcccgccgcgcccccgagcgtttcgttccgggagcggcaagactgggacacgccagccctttatttcgagctttctgcgtgcgggaggggggttgacaggcgatggcggccgagggcgaggcggcggcgctggagttcacaccgacgtggatcgtcgcggcggtctgctctctcatcgtgctcctctcgctcgtcgccgagcgatgcctccactacctcggcaagacgctcaagaggaagaaccagaagccgctcttcgaggcgctgctcaaggggatgatccggaggacgtgcatccctgaacgctggacattccacatgctgccatgcgagaagccagatgagaaggccggtgaggccgccaccatggagcattttgtagggacgcttggcaggatcggtaggcgtctgttgcaggaaggcactgctggggctgagcaatgccagaagaagggaaaagttccacttttgtcccttgaagccatacatcagctgcacattttcatatttgttctggcaatcacacatgttattttcagcgtcacaactatgcttttaggaggtgcacagatacaccaatggaaacagtgggagaatggaattaaaaaagatgctcctggaaatgggcctaaggtaaccaatgtacatcatcatgaatttatcaagaaacgttttaagggtattggcaaagattctataatattgagttggctgcattcttttggtaagcagttttatagatcagtatctaaatcagattacaccacaatgcgtcttggttttatcatgactcactgccctggaaatccaaaatttgatttccatagatacatggtaagggttttagaggcggattttaagaaagtggtaggcataagctggtacttgtgggtcttcgtggtgatatttctgttgctgaatgttaatggctggcacacatacttttggattgctttccttccccttattcttctgttagccattggcactaagctggagcatgtcatagctcagctagcccatgatgtagctgagaagcacacagcggtcgagggcgatgtgatcgtaaaaccatcagatgaacacttctggttcggcaagcctagggttatcctttacctgatccacttcatcctctttcagaatgcgtttgagattgcgtttttcttctggatactgagcacttatggattcgactcgtgcatcatgggacaagttcgttttattgtgccaaggcttgtcatcggggtggttattcagcttctctgcagctacagcaccttgcctctgtatgcaattgtaacccagatggggagctgctacaagaaggagatcttcaacgagcatgtgcagcagggcgtcctgggctgggctcagaaggtcaagatgaaaaagggactgaagggagctgcatctgctagcaaggacgaatcgattaccaatgccgattcggcaggaccttccgttaagattgaaatggcgaaggctggggaggatgttgagatcgttggaaacacaggttgattgggacaatagggtgcccgtgttgtaatgatgtaacaggttaatatgccatcatctttttttgtagatactagatagcttgctgtggcaataccgcaatagcggtgaactagagaaggtgagtttgggcccgggagcctcatctgttatcggtccagtaggaagcaaattcttatatacgggatatcgataagaaatgaactaagaacatgttcctggattcattaccactaaaaattagctagctaaaagctgttattttttt

SEQ ID NO: 63025 - DNA, 1914 bp, Zea Mays
gcccgtccccatccaatttcttttcccggccaagttaccgccggacaaaaagacgggaaaaaaaacacggcggaccaccacgcctgttctcagtcacgctagtagtaggaaatcctagcgcgtcgctgcttccattaccgcctccgcaaccagcccgccgcgcccccgagcgtttcgttccgggagcggcaagactgggacacgccagccctttatttcgagctttctgcgtgcgggaggggggttgacaggcgatggcggccgagggcgaggcggcggcgctggagttcacaccgacgtggatcgtcgcggcgaagccgctcttcgaggcgctgctcaaggtcaaagaagagttgatgcttctggggttcatctccctgctgctgacggtgttccaggggatgatccggaggacgtgcatccctgaacgctggacattccacatgctgccatgcgagaagccagatgagaaggccggtgaggccgccaccatggagcattttgtagggacgcttggcaggatcggtaggcgtctgttgcaggaaggcactgctggggctgagcaatgccagaagaagggaaaagttccacttttgtcccttgaagccatacatcagctgcacattttcatatttgttctggcaatcacacatgttattttcagcgtcacaactatgcttttaggaggtgcacagatacaccaatggaaacagtgggagaatggaattaaaaaagatgctcctggaaatgggcctaaggtaaccaatgtacatcatcatgaatttatcaagaaacgttttaagggtattggcaaagattctataatattgagttggctgcattcttttggtaagcagttttatagatcagtatctaaatcagattacaccacaatgcgtcttggttttatcatgactcactgccctggaaatccaaaatttgatttccatagatacatggtaagggttttagaggcggattttaagaaagtggtaggcataagctggtacttgtgggtcttcgtggtgatatttctgttgctgaatgttaatggctggcacacatacttttggattgctttccttccccttattcttctgttagccattggcactaagctggagcatgtcatagctcagctagcccatgatgtagctgagaagcacacagcggtcgagggcgatgtgatcgtaaaaccatcagatgaacacttctggttcggcaagcctagggttatcctttacctgatccacttcatcctctttcagaatgcgtttgagattgcgtttttcttctggatactgagcacttatggattcgactcgtgcatcatgggacaagttcgttttattgtgccaaggcttgtcatcggggtggttattcagcttctctgcagctacagcaccttgcctctgtatgcaattgtaacccagatggggagctgctacaagaaggagatcttcaacgagcatgtgcagcagggcgtcctgggctgggctcagaaggtcaagatgaaaaagggactgaagggagctgcatctgctagcaaggacgaatcgattaccaatgccgattcggcaggaccttccgttaagattgaaatggcgaaggctggggaggatgttgagatcgttggaaacacaggttgattgggacaatagggtgcccgtgttgtaatgatgtaacaggttaatatgccatcatctttttttgtagatactagatagcttgctgtggcaataccgcaatagcggtgaactagagaaggtgagtttgggcccgggagcctcatctgttatcggtccagtaggaagcaaattcttatatacgggatatcgataagaaatgaactaagaacatgttcctggattcattaccactaaaaattagctagctaaaagctgttattttttt

SEQ ID NO: 63026 - DNA, 590 bp, Zea Mays
gaagctcttaccttgctttggtggcatacttctctgtattcctatgtccattacaccatttgtgttgagtttgtgatccaagttttgaagaggaggctaagttggcgagcgaagcggaggtccgtcgccgggaggcttgggccggagcatgttcctgacattacaaattagcccctagtcaccagaaggcttggaccggaacatggcaaaagccatgttcatattgttaagtttgagatatgctcaagcttagttggtattacaaattagcccctagtggctgttggcgccggcaagatgatgatgcattgtttgaggtggagtttgttattatgatgctacaaagaatttgtctcaaggttgagtttgtgatcatgttccctgttagtttaggtttcacctctataaatattcttgtaagccgcaggagatagttatctcaattataaatctcctgtgatctgtaaacacccgaaaaatactgagattgttgctgaccggcgcctgtggtttcccccttcgcattggaggaggttttcacgttaaatttgtatcttctctgtgtttgatctactttgtatcgtattaat

SEQ ID NO: 63027 - DNA, 3297 bp, Zea Mays
tctcctccccgtattcgttcgacaccagtcccgacactgacccgcgcaatggctattccatgtccacgagggtgtttcacagcatgcacgcaccatcgttttcgccgtcgtcggacgtccattcgtcttcccggccttcgccatattcttcctccccagcctgctgcccctgcccacggtcacagccgcgagccgaccgacgctcgtcgacgcgggtacgggcgagtcggtcttgctcctggcttttcttcgtgcgtgccgccgaggaggacacgatgacgcctgccatgtttaggttatcttggcgatgacgagtccagatctgagatattggacaaccaaggcccatagtgcaacaatagtcggcatatgctacggagttggtggtggtgttgtgtcgcctcggcgggtctagggctggaaggtactcgcattctctcgcccttttcggactgacgcctggtgcctctcggtttggagctgctctgactggtcttctttctccgtttgcatgctctctccatatatgtatctagcggtatactagctatgtcgagatgtccatgtattcgtcatgttcttcttcggcaacggacatgtatgaccgcatcttcccttaccttcctgctctacgaaatttgaaagtgggggaggcgaggatggagtctttgatttgctacctatgatactcattcgatggctcgatattgcttttctacataacattttctttaccacgatgtcgattcaattagtcaaataaaaaaatattatacagagagtaaaatcaatcaataaaaatcttgagatctttttgataaataatttatatgagtattgttataagccgccgcaaggcacagccaacctaccgaagctgaactggtgacatttaacgtggttcgaattagcccttccaacttcgaactgccctccttcatatgcatgctccctcccgccgccgcagccgccattcgcgccacggcgggcttgccgcgggctgtacgccgcgtccacgctcgtctgctgaaggaggggctcgcggaccttccctccgcgccggcgctccttgtgtccgcctacgccaggtcgtgcctcctccccgacgctcgccgcgcgttcgacgatgcgccgcgccgggacctccacctctactcagcgctcctcgccgccgtctcccactcctccgatccagagctcgttctcccgctcctccgccgcatgctctcggacgacgcgcttcgcccagaccacttcgtccttgcctccctcgcgagcgccgctggcaggctgcgcagcctccgccttggcaggcagctccacgcccactttgccgcctccccgtacagtgctgacaacgtcgtcaagtcgtcgcttatcgacatgtactgtaagtgtggcgtccctcaggatgcccggaaggtgttcgacagtatcggtgtcaagaacagcgtcgtgtggactgcactgatttctgggtacgcgtccaatggctgcaccggtgaggcgcttgacctcttccagagcatgcctgcacacggcctcttcacgtggactgcgctcatctctggttttgtcaaggccgggaactatactggcgccatggggctgtttgttgagatgaggcgggatgatatcaggattcatgacgcgttcgtgctggcaactgtcatcggtggtgctgcagacctggctgcgcttgtgctgggcagacagctgcatggttttgtaatgaggcttggcttcctgtccagtatgattgttgggaatgcactggttgacatgtactctaaatgcagtgacatacactctgctagggaagtgtttgaggggattacagtccgtgatgtcatctcatggacgacaattcttgttggagaggcacagcatggtcgagctgaggaggtatttgctctttacaacaggatgcttcttgcaggaatgaagcccaatgaggtgacatttgttggattgatctatgcttgcagtcatgctggtcttgttcagaaaggacggcagctatttgattcaatgaagcgggaatatggcatgaagcctggagtgcaacattatacctgctatctggaccttcttagtcgctcgggctatttatcagaagctgaaaaactcatcactacaatgccatatgagcctgacgaagctacctggggggccctattgagtgcttgtaagaagcacaatgatactcagatgtgtctcagggttgctgataatttactagagctgagaccaaaagatccttcaacatatatcttgttatctaatgtctatgcagttaattgcaagtgggattctgtggccaaggtaagaaaaatcatggctgaaatggagataagaaaagtgccaggttatagttgggttgaagctgggagggaatctcgtatatttcatgctggggaggttccacttgatgttggagaagaaattacttgttttcttgaggaattggtctcagagatgcgcaagaggggttatgtccctgatactagctctgtgatgcatgacttggaagagcatgaaaaggagcagcatctgttcgtgcacagcgagaggctagctgtagcttttggaatactcaagtcccctccgggatcagtgatccgggttgtaaagaatcttcgtgtctgcggggactgtcacacagtaatgaagtttattagtgcgattgcacagaggaagatcatcgtgagagatgctagtcgtttccaccattttgaggatgtattcctatgtccattacaccatttgtgttgagtttgtgatccaagttttgaagaggaggctaagttggcgagcgaagcggaggtccgtcgccgggaggcttgggccggagcatgttcctgacattacaaattagcccctagtcaccagaaggcttggaccggaacatggcaaaagccatgttcatattgttaagtttgagatatgctcaagcttagttggtattacaaattagcccctagtggctgttggcgccggcaagatgatgatgcattgtttgaggtggagtttgttattatgatgctacaaagaatttgtctcaaggttgagtttgtgatcatgttccctgttagtttaggtttcacctctataaatattcttgtaagccgcaggagatagttatctcaattataaatctcctgtgatctgtaaacacccgaaaaatactgagattgttgctgaccggcgcctgtggtttcccccttcgcattggaggaggttttcacgttaaatttgtatcttctctgtgtttgatctactttgtatcgtattaat

SEQ ID NO: 63028 - DNA, 937 bp, Zea Mays
ctggattcttcgagagatagctcactgcgctgcggcgataccgaacgtggaaaccctatcggccgctgctccttcaaggcgtcagcgtcatcttcgtcgaactgccagcaaccgtgcgttctacggttcttcggcgccgtccacggccccatcccccatgcaccctatcgccggctgcttcttcaacgcatcgtcatcgccgtcggctgcttcttccacgcgtcatcgtcgtctccgtcgaactacccatgatcgtgcactccttgcttcttcagtgccgtccatagtcctccgcaacctatcggtgcctgcttcttcaacacgtcgtcatccccgtccaactgtcggcagcggcgagctctacacaaagcttcggtggaatttctgtgcgacacaggtgctatcgacgccaccatggctggggtggaggatgaagacaagttcaaggacgctccagcagtcgccgatcgccatcgcaacgatgcggcggttgtgtgggcggcgccgcgccacgacacccaatcagcattcgcagcccaccacctgcggcgccggcggagggggcgccaccctcgagcgccactgcaagtggccgttgttgacctcgtcttgagagccaaagaagaggaagttgtcgatgctgacctcgtctcgagagccaaaagaagaggaagttgggggactctgggtcggcctcgggtatgtggagtgggaacaaatggttttttttgttgacgatgatgcaatcggggtttaagaatcgattaaattttgctcctgacaatattatttagtaacaatgtcaaaataattacaattaacaataaatgtgtaaccatgtatatgatacactatttgtttatgttgaattaaaagaaagagagaaagataatagttagggtagttgagataaaaatgttatgctcttgtctgatac

SEQ ID NO: 63029 - DNA, 2031 bp, Zea Mays
ctggattcttcgagagatagctcactgcgctgcggcgataccgaacgtggaaaccctatcggccgctgctccttcaaggcgtcagcgtcatcttcgtcgaactgccagcaaccgtgcgttctacggttcttcggcgccgtccacggccccatcccccatgcaccctatcgccggctgcttcttcaacgcatcgtcatcgccgtcggctgcttcttccacgcgtcatcgtcgtctccgtcgaactacccatgatcgtgcactccttgcttcttcagtgccgtccatagtcctccgcaacctatcggtgcctgcttcttcaacacgtcgtcatccccgtccaactgtcggcagcggcgagctctacacaaagcttcggtggaatttctgtgcgacacaggaatttggatggtccaatccatccgaccaaataaactggtgtgagaatcggcagcagctgctattgcagctataccatgcgcatcttcaatgtgacataggtattgaacttcatttacatttcctccgaaatgcgaacaatttgtttgaatagtctaaaatttatattcatagtacttatagtttccttttttgtccaccatacacaatctgttacctatttgcatactttaattttatgctcctagcatatcactaatgcgctgcgacatgcagttacactaccggaatcgccgtctttgccgagtgcctgaagcactcggcaaagtcttaaaaacactcgacgctataaatctgtttattgctaattagctccttttgtaatctttaagaccaatgcttctaagattaagaccaccctgctcctaacctgcttctgtggtcattaacaccactgcttttgatccacattcatatagctacgcctactgtattgtaatctctaagctcttctataatataatctctaagaacttcatgctgttacatttccagaacttgaaaacttcattactacaaaaaaaagtacaatccaagttggctattatagctaccttacgtcatatattgataccttatcaaattgaactcagcgctacaaatctgtttattgcatttggctacaatgttccatcaatgctaagcttcagcacttgcattttacgtacacttagatttgtatgccgttgtctacccatctttgtccaaaaccatgaaacgctttgatttatgttgatataatgttcacaaaaaaaatttagttactatccagtttgatacaagttaattcaactgtgctcatgtaccgtttgtaccactcgcgagtttctagtaaagattaaggcccttttcgtttgttctggaacattccagctagaatggtatgtttatttatattaacatagattagccagaatagctcctggtctcaaaccgacgaggagctagactatctacagtgcatgcttcttccattcgtcctcctgtagaggcttgtcgcttcgtgccctccatggagcacactactttgcggaggtgctatcgacgccaccatggctggggtggaggatgaagacaagttcaaggacgctccagcagtcgccgatcgccatcgcaacgatgcggcggttgtgtgggcggcgccgcgccacgacacccaatcagcattcgcagcccaccacctgcggcgccggcggagggggcgccaccctcgagcgccactgcaagtggccgttgttgacctcgtcttgagagccaaagaagaggaagttgtcgatgctgacctcgtctcgagagccaaaagaagaggaagttgggggactctgggtcggcctcgggtatgtggagtgggaacaaatggttttttttgttgacgatgatgcaatcggggtttaagaatcgattaaattttgctcctgacaatattatttagtaacaatgtcaaaataattacaattaacaataaatgtgtaaccatgtatatgatacactatttgtttatgttgaattaaaagaaagagagaaagataatagttagggtagttgagataaaaatgttatgctcttgtctgatac

SEQ ID NO: 63030 - DNA, 1146 bp, Zea Mays
tgtgttcatgcacatgtgttactgcatttcatcaatgcctcacatgctaacctgaatgcacggaagcgcatgaactccaaccggtcgtaccagtatgacccactgaacatggactttgtaccacacatcgaagagtcgtgcaagatcgttatgtcatcttatggagttttcaagaagaaagcaagagaacagggatggataatgtctgaatcacttcttaacccgggacgagcaagattgtgtggagcagtaccacaatgatccaagcctttttcgtttttcatgatgaagaggatgagttctttttcatacaattggtatgtgagtcagcgaaactaacttaagtcgacaatcagctcaagtacataaaatgcaccaaattgtcatgagtcctgatcctgcaggaacagtacttgaacctggagcgttagatcgcaacaaccaccatgacaggggggtgctgactcaggaagggtccgtgaaggctccaaactgcggaagatcgactaacaatcagctcttgtatattcttttggtattgtataatggaggcggctatctttcctaatgttgaccggactaagtggtcatcggctgatttgttttgactatctgacaacaatcccccctgctaaccttgcggtatcgtggtcctcatttccctaatttggggagcggtacatgccagttttcgtaaagaatatcagtgtttatatgcaaattgatttgatcatttgtctcaggcctgtttggaacaagggagatgttttctgcgtatgtttcgtgaaattaaactgattcctatgattttttgcactattcctacgaattactgcacttcaaacaccctcggatgtctcgatatatatagagatagtgctctgttttgttagtcatcgtccatgatgggctggttaccgtggctgttcttacttttctatttaggaccagtttagcggggctatgactctaaaaactctggctttagtttttgtagagaagcagcttcttcgagagaagttagtaggtttaaaatgtccattgtgaccctacgtgtctgacttgtgtatacaaaagagaaatatgatatgttgaggaattaaaatgtgacttgtgtatacaaaagagaaatatgatatgctgagg

SEQ ID NO: 63031 - DNA, 949 bp, Zea Mays
ccaaggcctaaccgccaggccgacaagcgccaccaccgcgcgctcaagcagccagacaccacccaaccaaccacgaggccaccagcccaccatcacccccacgaaaaaagcgaaccgagggagaggaaggatcggcgcgttccggccggagatgaggggcggatccagaccggccccggtcgtcctgtttctcctcgctgcgtccgggatctgcgcccagttcaccgcagtgctagctggtgatccccaaacatccaacgatgataagaaggctgaagctcagccaaagggccataccggcaaaacagttttgttcgtcctcctaggagtgggggctgtcattctgttgtcatttgttattttcaagtattggcagaagaagaaaaggcaggaacagcatgcacgtctgctaaagctatttgaagaggatgacgacattgaggttgagcttggtcttcgagattgataatcttcaattgtacagcaagagtatcttggctgacaaggttttgctggcttgccttcaaagcattttcatgttaatgatgcttgataatagctttaaggaggaagtatcaagggttcgagaggctaactggaattaatttgtcgtctttttcaagatgttctattttctggggtttcatattctaattcctaatgcaatacactgttttccttagaatgctgccgctgttgttaatatcacgctactaggttcattcctcaggataaatcatcgcaatgacgctatggatttgagtagtataggtaatggttgtcatacgtcttcgttggtgaacaaagaatgttcaggaatgagaatataaacagcacgaaattacgtacagaaggttggtagcagtgcaaattatgggtagcttggatcagtggaagttatgaagcatcttgtaacaaaagttatattaagtgcacaaataaacaaaaa

SEQ ID NO: 63032 - DNA, 916 bp, Zea Mays
caacgccaaggcctaaccgccaggccgacaagcgccaccaccgcgcgctcaagcagccagacaccacccaaccaaccacgaggccaccagcccaccatcacccccacgaaaaaagcgaaccgagggagaggaaggatcggcgcgttccggccggagatgaggggcggatccagaccggccccggtcgtcctgtttctcctcgctgcgtccgggatctgcgcccagttcaccgcagtgctagctggtgatccccaaacatccaacgatgataagaaggctgaagctcagccaaagggccataccggcaaaacagttttgttcgtcctcctaggagtgggggctgtcattctgttgtcatttgttattttcaagtattggcagaagaagaaaaggcaggaacagcatgcacgtctgctaaagctatttgaagaggatgacgacattgaggttgagcttggtcttcgagattgataatcttcaattgtacagcaagagtatcttggctgacaaggatgcttgataatagctttaaggaggaagtatcaagggttcgagaggctaactggaattaatttgtcgtctttttcaagatgttctattttctggggtttcatattctaattcctaatgcaatacactgttttccttagaatgctgccgctgttgttaatatcacgctactaggttcattcctcaggataaatcatcgcaatgacgctatggatttgagtagtataggtaatggttgtcatacgtcttcgttggtgaacaaagaatgttcaggaatgagaatataaacagcacgaaattacgtacagaaggttggtagcagtgcaaattatgggtagcttggatcagtggaagttatgaagcatcttgtaacaaaagttatattaagtgcacaaataaacaaaaa

SEQ ID NO: 63033 - DNA, 1512 bp, Zea Mays
ctcatttattgaaatgtatcgatttcaaaagacacgtaaatatcccttttgtttgtcttttgccattcaagagttgaagacttccattgatgctcggtcaaccatctaaccattggcgtcttttttagtagctactgaattatgtgttggtggctactcatacttgcttgagccattgtggtgggcaggaatggtaacaatgattgttggcgaaatcgctaactttgcagcttatgcttttgctcctgctatcctggtcactccacttggtgcacttagcataattatcagtgctgttcttgcccatattatgttgcgggagaaacttcatatatttggtatacttggctgtattctttgtgtggtgggttcaacaacaattgtgcttcatgcccctccagagcgtcaaattgagtctgtggcagaagtgtgggatctcgctactgaaccgggtactaaggttcaaattgtatcctgcagcattcctattctatgcagctgttgtatttgcagcagcttttgtgctcatatgccattttgtccctcagtatgggcagacacatatcatggtatatattggcatatgttctcttgttggatctttatcggtcatgagtgtcaaagctcttgggatagccttgaaggtgacattttcagggatgaaccagcttgtctattcacaaacatgggtgttctcatttgttgtaatcttgtgcatcgtaacacagatgaactatctaaacaaggccctcgacacattcaatactgcagttgtttcacccatatattacacaatgtttacatccttgaccatcttggctagtgtaataatgttcaaggattgggatcgtcaaaatccaacgcaaattgttacagagatgtgtggcttcgttacaatcctttccgggacttttcttcttcacaagacaaaggatatggtggatggtctcccaccaaatttaccaattcggcttcctaaacatgcggatgaggatggctatgcagacgacataattcctctcagatctgctgctgacggtattccactcaggtcgccaagggctacagattcatttcgctcgtcgtgatgtcctgagatttgcaagtgcgctgaatcatgtagattccaggctcatacccagcagccgtcagtctatatacatgggaagcggaaaatatcccccaattcactcggttggagaccacaacgtaggttaactgtaggattcaacaggtaacaactcggctaaccccccaaccctaatttgagtcattggtacagaattttgacgattatatcagttgtatacttatccgggtaacatcatcaccaagatgaccaagaatatatgttttgggctatatgtatatcgcggtgagccatataggttattatgttatattgaattgttgtattctttcaacacaaacactctgaatacaggaagagttgaacaagcacatcatgccgttaaccatttaccacttttatctgaacacttgatatctagc

SEQ ID NO: 63034 - DNA, 1979 bp, Zea Mays
cacacacctccatacccacagggcacgagcacaggcgccggcgcggcgtgtccaagcctccaaggccaagaaacacaaacacccacgcctcgcggacccggccgccccctcgccccgcccgcatcctgtcgacgacgacgacgtcgtcgtcgtcgtcgtcgtcgccctctttcctttcccgcacagccgcggctccatacgaccatacggcagccagctagtctagcttctccgccacagctcatcagggcgcagcaaccgcaaaccccacgcaggcgacgaaaagctgccgagccaccaccaggcaccagcagaggggagcaagcgaccacgcgggggaccgcgcgaccgagccactcccctcccctccctccctctctcttcgcctccggatctcgcatgcgcggtggccgccgccgccgccgcgcccgacggaggagggcgaggagtcagtgagggcgctggccggcggcgtgatggggggagcgcagctggtggggagatgggtggagtcgtacacggggatgtcgccggacaacatcaagggcctgctgctcgcgctctcctgcagcctcttcatcggcgccagcttcatcgtcaagaagaaggggctcaagaaggctggcgcgtccggcgtccgagcaggtgttggtggctactcatacttgcttgagccattgtggtgggcaggaatgtgattgttggcgaaatcgctaactttgcagcttatgcttttgctcctgctatcctggtcactccacttggtgcacttagcataattatcagtgctgttcttgcccatattatgttgcgggagaaacttcatatatttggtatacttggctgtattctttgtgtggtgggttcaacaacaattgtgcttcatgcccctccagagcgtcaaattgagtctgtggcagaagtgtgggatctcgctactgaaccggcattcctattctatgcagctgttgtatttgcagcagcttttgtgctcatatgccattttgtccctcagtatgggcagacacatatcatggtatatattggcatatgttctcttgttggatctttatcggtcatgagtgtcaaagctcttgggatagccttgaaggtgacattttcagggatgaaccagcttgtctattcacaaacatgggtgttctcatttgttgtaatcttgtgcatcgtaacacagatgaactatctaaacaaggccctcgacacattcaatactgcagttgtttcacccatatattacacaatgtttacatccttgaccatcttggctagtgtaataatgttcaaggattgggatcgtcaaaatccaacgcaaattgttacagagatgtgtggcttcgttacaatcctttccgggacttttcttcttcacaagacaaaggatatggtggatggtctcccaccaaatttaccaattcggcttcctaaacatgcggatgaggatggctatgcagacgacataattcctctcagatctgctgctgacggtattccactcaggtcgccaagggctacagattcatttcgctcgtcgtgatgtcctgagatttgcaagtgcgctgaatcatgtagattccaggctcatacccagcagccgtcagtctatatacatgggaagcggaaaatatcccccaattcactcggttggagaccacaacgtaggttaactgtaggattcaacaggtaacaactcggctaaccccccaaccctaatttgagtcattggtacagaattttgacgattatatcagttgtatacttatccgggtaacatcatcaccaagatgaccaagaatatatgttttgggctatatgtatatcgcggtgagccatataggttattatgttatattgaattgttgtattctttcaacacaaacactctgaatacaggaagagttgaacaagcacatcatgccgttaaccatttaccacttttatctgaacacttgatatctagc

SEQ ID NO: 63035 - DNA, 2017 bp, Zea Mays
cacacacctccatacccacagggcacgagcacaggcgccggcgcggcgtgtccaagcctccaaggccaagaaacacaaacacccacgcctcgcggacccggccgccccctcgccccgcccgcatcctgtcgacgacgacgacgtcgtcgtcgtcgtcgtcgtcgccctctttcctttcccgcacagccgcggctccatacgaccatacggcagccagctagtctagcttctccgccacagctcatcagggcgcagcaaccgcaaaccccacgcaggcgacgaaaagctgccgagccaccaccaggcaccagcagaggggagcaagcgaccacgcgggggaccgcgcgaccgagccactcccctcccctccctccctctctcttcgcctccggatctcgcatgcgcggtggccgccgccgccgccgcgcccgacggaggagggcgaggagtcagtgagggcgctggccggcggcgtgatggggggagcgcagctggtggggagatgggtggagtcgtacacggggatgtcgccggacaacatcaagggcctgctgctcgcgctctcctgcagcctcttcatcggcgccagcttcatcgtcaagaagaaggggctcaagaaggctggcgcgtccggcgtccgagcaggtgttggtggctactcatacttgcttgagccattgtggtgggcaggaatggtaacaatgattgttggcgaaatcgctaactttgcagcttatgcttttgctcctgctatcctggtcactccacttggtgcacttagcataattatcagtgctgttcttgcccatattatgttgcgggagaaacttcatatatttggtatacttggctgtattctttgtgtggtgggttcaacaacaattgtgcttcatgcccctccagagcgtcaaattgagtctgtggcagaagtgtgggatctcgctactgaaccgggtactgtgcattcttcttaatttgctacccccattcctattctatgcagctgttgtatttgcagcagcttttgtgctcatatgccattttgtccctcagtatgggcagacacatatcatggtatatattggcatatgttctcttgttggatctttatcggtcatgagtgtcaaagctcttgggatagccttgaaggtgacattttcagggatgaaccagcttgtctattcacaaacatgggtgttctcatttgttgtaatcttgtgcatcgtaacacagatgaactatctaaacaaggccctcgacacattcaatactgcagttgtttcacccatatattacacaatgtttacatccttgaccatcttggctagtgtaataatgttcaaggattgggatcgtcaaaatccaacgcaaattgttacagagatgtgtggcttcgttacaatcctttccgggacttttcttcttcacaagacaaaggatatggtggatggtctcccaccaaatttaccaattcggcttcctaaacatgcggatgaggatggctatgcagacgacataattcctctcagatctgctgctgacggtattccactcaggtcgccaagggctacagattcatttcgctcgtcgtgatgtcctgagatttgcaagtgcgctgaatcatgtagattccaggctcatacccagcagccgtcagtctatatacatgggaagcggaaaatatcccccaattcactcggttggagaccacaacgtaggttaactgtaggattcaacaggtaacaactcggctaaccccccaaccctaatttgagtcattggtacagaattttgacgattatatcagttgtatacttatccgggtaacatcatcaccaagatgaccaagaatatatgttttgggctatatgtatatcgcggtgagccatataggttattatgttatattgaattgttgtattctttcaacacaaacactctgaatacaggaagagttgaacaagcacatcatgccgttaaccatttaccacttttatctgaacacttgatatctagc

SEQ ID NO: 63036 - DNA, 1880 bp, Zea Mays
tgcccacacacctccatacccacagggcacgagcacaggcgccggcgcggcgtgtccaagcctccaaggccaagaaacacaaacacccacgcctcgcggacccggccgccccctcgccccgcccgcatcctgtcgacgacgacgacgtcgtcgtcgtcgtcgtcgtcgccctctttcctttcccgcacagccgcggctccatacgaccatacggcagccagctagtctagcttctccgccacagctcatcagggcgcagcaaccgcaaaccccacgcaggcgacgaaaagctgccgagccaccaccaggcaccagcagaggggagcaagcgaccacgcgggggaccgcgcgaccgagccactcccctcccctccctccctctctcttcgcctccggatctcgcatgcgcggtggccgccgccgccgccgcgcccgacggaggagggcgaggagtcagtgagggcgctggccggcggcgtgatggggggagcgcagctggtggggagatgggtggagtcgtacacggggatgtcgccggacaacatcaagggcctgctgctcgcgctctcctgcagcctcttcatcggcgccagcttcatcgtcaagaagaaggggctcaagaaggctggcgcgtccggcgtccgagcaggtgttggtggctactcatacttgcttgagccattgtggtgggcaggaatggtaacaatgattgttggcgaaatcgctaactttgcagcttatgcttttgctcctgctatcctggtcactccacttggtgcacttagcataattatcagagcgtcaaattgagtctgtggcagaagtgtgggatctcgctactgaaccggcattcctattctatgcagctgttgtatttgcagcagcttttgtgctcatatgccattttgtccctcagtatgggcagacacatatcatggtatatattggcatatgttctcttgttggatctttatcggtcatgagtgtcaaagctcttgggatagccttgaaggtgacattttcagggatgaaccagcttgtctattcacaaacatgggtgttctcatttgttgtaatcttgtgcatcgtaacacagatgaactatctaaacaaggccctcgacacattcaatactgcagttgtttcacccatatattacacaatgtttacatccttgaccatcttggctagtgtaataatgttcaaggattgggatcgtcaaaatccaacgcaaattgttacagagatgtgtggcttcgttacaatcctttccgggacttttcttcttcacaagacaaaggatatggtggatggtctcccaccaaatttaccaattcggcttcctaaacatgcggatgaggatggctatgcagacgacataattcctctcagatctgctgctgacggtattccactcaggtcgccaagggctacagattcatttcgctcgtcgtgatgtcctgagatttgcaagtgcgctgaatcatgtagattccaggctcatacccagcagccgtcagtctatatacatgggaagcggaaaatatcccccaattcactcggttggagaccacaacgtaggttaactgtaggattcaacaggtaacaactcggctaaccccccaaccctaatttgagtcattggtacagaattttgacgattatatcagttgtatacttatccgggtaacatcatcaccaagatgaccaagaatatatgttttgggctatatgtatatcgcggtgagccatataggttattatgttatattgaattgttgtattctttcaacacaaacactctgaatacaggaagagttgaacaagcacatcatgccgttaaccatttaccacttttatctgaacacttgatatctagc

SEQ ID NO: 63037 - DNA, 1917 bp, Zea Mays
caaccatgcccacacacctccatacccacagggcacgagcacaggcgccggcgcggcgtgtccaagcctccaaggccaagaaacacaaacacccacgcctcgcggacccggccgccccctcgccccgcccgcatcctgtcgacgacgacgacgtcgtcgtcgtcgtcgtcgtcgccctctttcctttcccgcacagccgcggctccatacgaccatacggcagccagctagtctagcttctccgccacagctcatcagggcgcagcaaccgcaaaccccacgcaggcgacgaaaagctgccgagccaccaccaggcaccagcagaggggagcaagcgaccacgcgggggaccgcgcgaccgagccactcccctcccctccctccctctctcttcgcctccggatctcgcatgcgcggtggccgccgccgccgccgcgcccgacggaggagggcgaggagtcagtgagggcgctggccggcggcgtgatggggggagcgcagctggtggggagatgggtggagtcgtacacggggatgtcgccggacaacatcaagggcctgctgctcgcgctctcctgcagcctcttcatcggcgccagcttcatcgtcaagaagaaggggctcaagaaggctggcgcgtccggcgtccgagcaggtgttggtggctactcatacttgcttgagccattgtggtgggcaggaatggtaacaatgattgttggcgaaatcgctaactttgcagcttatgcttttgctcctgctatcctggtcactccacttggtgcacttagcataattatcagagcgtcaaattgagtctgtggcagaagtgtgggatctcgctactgaaccgggtactgtgcattcttcttaatttgctacccccattcctattctatgcagctgttgtatttgcagcagcttttgtgctcatatgccattttgtccctcagtatgggcagacacatatcatggtatatattggcatatgttctcttgttggatctttatcggtcatgagtgtcaaagctcttgggatagccttgaaggtgacattttcagggatgaaccagcttgtctattcacaaacatgggtgttctcatttgttgtaatcttgtgcatcgtaacacagatgaactatctaaacaaggccctcgacacattcaatactgcagttgtttcacccatatattacacaatgtttacatccttgaccatcttggctagtgtaataatgttcaaggattgggatcgtcaaaatccaacgcaaattgttacagagatgtgtggcttcgttacaatcctttccgggacttttcttcttcacaagacaaaggatatggtggatggtctcccaccaaatttaccaattcggcttcctaaacatgcggatgaggatggctatgcagacgacataattcctctcagatctgctgctgacggtattccactcaggtcgccaagggctacagattcatttcgctcgtcgtgatgtcctgagatttgcaagtgcgctgaatcatgtagattccaggctcatacccagcagccgtcagtctatatacatgggaagcggaaaatatcccccaattcactcggttggagaccacaacgtaggttaactgtaggattcaacaggtaacaactcggctaaccccccaaccctaatttgagtcattggtacagaattttgacgattatatcagttgtatacttatccgggtaacatcatcaccaagatgaccaagaatatatgttttgggctatatgtatatcgcggtgagccatataggttattatgttatattgaattgttgtattctttcaacacaaacactctgaatacaggaagagttgaacaagcacatcatgccgttaaccatttaccacttttatctgaacacttgatatctagc

SEQ ID NO: 63038 - DNA, 1971 bp, Zea Mays
caaccatgcccacacacctccatacccacagggcacgagcacaggcgccggcgcggcgtgtccaagcctccaaggccaagaaacacaaacacccacgcctcgcggacccggccgccccctcgccccgcccgcatcctgtcgacgacgacgacgtcgtcgtcgtcgtcgtcgtcgccctctttcctttcccgcacagccgcggctccatacgaccatacggcagccagctagtctagcttctccgccacagctcatcagggcgcagcaaccgcaaaccccacgcaggcgacgaaaagctgccgagccaccaccaggcaccagcagaggggagcaagcgaccacgcgggggaccgcgcgaccgagccactcccctcccctccctccctctctcttcgcctccggatctcgcatgcgcggtggccgccgccgccgccgcgcccgacggaggagggcgaggagtcagtgagggcgctggccggcggcgtgatggggggagcgcagctggtggggagatgggtggagtcgtacacggggatgtcgccggacaacatcaagggcctgctgctcgcgctctcctgcagcctcttcatcggcgccagcttcatcgtcaagaagaaggggctcaagaaggctggcgcgtccggcgtccgagcaggtgttggtggctactcatacttgcttgagccattgtggtgggcaggaatggtaacaatgattgttggcgaaatcgctaactttgcagcttatgcttttgctcctgctatcctggtcactccacttggtgcacttagcataattatcagtgctgttcttgcccatattatgttgcgggagaaacttcatatatttggtatacttggctgtattctttgtgtggtgggttcaacaacaattgtgcttcatgcccctccagagcgtcaaattgagtctgtggcagaagtgtgggatctcgctactgaaccggcattcctattctatgcagctgttgtatttgcagcagcttttgtgctcatatgccattttgtccctcagtatgggcagacacatatcatggtatatattggcatatgttctcttgttggatctttatcggtcatgagtgtcaaagctcttgggatagccttgaaggtgacattttcagggatgaaccagcttgtctattcacaaacatgggtgttctcatttgttgtaatcttgtgcatcgtaacacagatgaactatctaaacaagttgtttcacccatatattacacaatgtttacatccttgaccatcttggctagtgtaataatgttcaaggattgggatcgtcaaaatccaacgcaaattgttacagagatgtgtggcttcgttacaatcctttccgggacttttcttcttcacaagacaaaggatatggtggatggtctcccaccaaatttaccaattcggcttcctaaacatgcggatgaggatggctatgcagacgacataattcctctcagatctgctgctgacggtattccactcaggtcgccaagggctacagattcatttcgctcgtcgtgatgtcctgagatttgcaagtgcgctgaatcatgtagattccaggctcatacccagcagccgtcagtctatatacatgggaagcggaaaatatcccccaattcactcggttggagaccacaacgtaggttaactgtaggattcaacaggtaacaactcggctaaccccccaaccctaatttgagtcattggtacagaattttgacgattatatcagttgtatacttatccgggtaacatcatcaccaagatgaccaagaatatatgttttgggctatatgtatatcgcggtgagccatataggttattatgttatattgaattgttgtattctttcaacacaaacactctgaatacaggaagagttgaacaagcacatcatgccgttaaccatttaccacttttatctgaacacttgatatctagc

SEQ ID NO: 63039 - DNA, 1915 bp, Zea Mays
caaaccccacggtgcggcacggcaaaaccacgcgaccaaccatgcccacacacctccatacccacagggcacgagcacaggcgccggcgcggcgtgtccaagcctccaaggccaagaaacacaaacacccacgcctcgcggacccggccgccccctcgccccgcccgcatcctgtcgacgacgacgacgtcgtcgtcgtcgtcgtcgtcgccctctttcctttcccgcacagccgcggctccatacgaccatacggcagccagctagtctagcttctccgccacagctcatcagggcgcagcaaccgcaaaccccacgcaggcgacgaaaagctgccgagccaccaccaggcaccagcagaggggagcaagcgaccacgcgggggaccgcgcgaccgagccactcccctcccctccctccctctctcttcgcctccggatctcgcatgcgcggtggccgccgccgccgccgcgcccgacggaggagggcgaggagtcagtgagggcgctggccggcggcgtgatggggggagcgcagctggtggggagatgggtggagtcgtacacggggatgtcgccggacaacatcaagggcctgctgctcgcgctctcctgcagcctcttcatcggcgccagcttcatcgtcaagaagaaggggctcaagaaggctggcgcgtccggcgtccgagcaggtgttggtggctactcatacttgcttgagccattgtggtgggcaggaatgtgattgttggcgaaatcgctaactttgcagcttatgcttttgctcctgctatcctggtcactccacttggtgcacttagcataattatcagagcgtcaaattgagtctgtggcagaagtgtgggatctcgctactgaaccggcattcctattctatgcagctgttgtatttgcagcagcttttgtgctcatatgccattttgtccctcagtatgggcagacacatatcatggtatatattggcatatgttctcttgttggatctttatcggtcatgagtgtcaaagctcttgggatagccttgaaggtgacattttcagggatgaaccagcttgtctattcacaaacatgggtgttctcatttgttgtaatcttgtgcatcgtaacacagatgaactatctaaacaaggccctcgacacattcaatactgcagttgtttcacccatatattacacaatgtttacatccttgaccatcttggctagtgtaataatgttcaaggattgggatcgtcaaaatccaacgcaaattgttacagagatgtgtggcttcgttacaatcctttccgggacttttcttcttcacaagacaaaggatatggtggatggtctcccaccaaatttaccaattcggcttcctaaacatgcggatgaggatggctatgcagacgacataattcctctcagatctgctgctgacggtattccactcaggtcgccaagggctacagattcatttcgctcgtcgtgatgtcctgagatttgcaagtgcgctgaatcatgtagattccaggctcatacccagcagccgtcagtctatatacatgggaagcggaaaatatcccccaattcactcggttggagaccacaacgtaggttaactgtaggattcaacaggtaacaactcggctaaccccccaaccctaatttgagtcattggtacagaattttgacgattatatcagttgtatacttatccgggtaacatcatcaccaagatgaccaagaatatatgttttgggctatatgtatatcgcggtgagccatataggttattatgttatattgaattgttgtattctttcaacacaaacactctgaatacaggaagagttgaacaagcacatcatgccgttaaccatttaccacttttatctgaacacttgatatctagc

SEQ ID NO: 63040 - DNA, 2006 bp, Zea Mays
cttgagatgtaagtatgctttgttttttcatttcaccattgcaaatcctggttccagcaaaccaattactatattgaaatttgaccaattgagaggtagaacacctgatttcttattgtcatactgatctgatctctgggcttggagttcttctcgggccttctgttatccacagataattgtaacttagttaaataatttgatccttactacccatgcagtgatattctcacggatgatggggaccttcgccttgttgttttcttccatatctgagccaacagtgaagagcatggaacaaacagctataaattcatccaaaataaaacagaattccagtaaaagatttgattttcccagtgatgttgaacttaatactctttccgcaacaatggacaggctgtatgtgtgggagaaaagacttcataaggaaattatggaggaagaaaaattgaggattacatatgacaaagaatggaagcgcttgaaagagctggatgctagtggtgcagagccatataagatcgattcaacccgggcctcaattagggcactgctcaccagaatcaacatttccatcagatcagctaaagttatttctaggaggatccacatactacgagacgatgagttacacccacaccttgttgcgcttatccaagggtttgttagaatgtggaagttcattcttgagtgccaccggaagcaattccataccatacttgaaactaaatctcacattctgatccctaagaatggaccggaaagaagctcgtccaaggttacactggaactagaaatggagctcctgaactggtgttcctgtttcaggaactggatcctgtcccaaaaggcttatatcgaagctctcaacggctggctagtgaaatggcttccccaggaaaaggaggagactccggacggcattgcgcccttctctcctggcaggcttggagctcctgccgcgttcgtgacagccaacgactggtgccaggccatgagaaggatgccggaaccggaaggcggcgtagtagacacgatggaggctttcgctgtcaacgtgcatacgttgtgggagcggcaggacgaagagcagcggcagcagaggctgagagctgactacctctccagctccagggattttgaaaagcggatcagatctcttcagaaggagcatggctcgcaggggcagtttgacgctggcagggcagcggtgcttcccgccgttgccgacaatggcagggcagttgataaccgcatggttgcactggactcgttgcacaagggattggacgaacagagggcccggcacgagcacgaggaaaccgtgaggcagatccgcgaggccagcgcggctgatctgaaggcaggtctggctccgatattcgaagcgctggaatcttttaccgcggagacgctgagagggtacgaaaatgtcaggatccctgccaaaagcattggcgggtgataccttttaagccccccacggttttttttttctgttggcagcagttcttggtacatccaaggaactattgtcaatcttttagactgtcttcagtttgccagccatgcgcaagcacaaacaaggccccattgtggttggggtaatgtagagttcatccagtgtacaagaaagggcggcccagaagttcctgcatgattgcgcacgaagcagtgttgccatggatgctttttgagataatcctgatttctgtggtagcaaattcatgtggatctttgagactagtcggtagctagagctacttatccacagagagctgctaggagcctgaactcctagttgcagccccgcaaaggagtggggggagccggggaggggatggcagttttgtactagtcattttcagctcctgtacatattgattatattagctaagttggtgaattatctatctatctatctatctatctatctatcaggctagctcgccatccgtgtacaattttatctgtgcatcgtacaagttgtatttaatgccgta

SEQ ID NO: 63041 - DNA, 3530 bp, Zea Mays
ccagaccatgaacgcattcggctacgttgtgctcgcaatcggaatgcgctgaagccaagcagcgaacgagagaatgctacagtacttccagtgcctgctcagtcagagctcactgctcagagctcaataataaacgcgcctccacgtgcccgggtcaccctgccgcgcgcgcgcacacgccgctcgctccgtcctcggcttcctctttgcgaccaccaccaccctcgccggtcgccgcgctcgcccaccatttttttttacgttgccacgctactttgctcccggcccctgctcactctgctgcctgccctacctcgactcccgcccgttacttccacccctcggtttgctgcgggagcgagccagcactcgcgggctcgcggcgtcgcgggcaatgccggcgacggcgagcgagtagggggctcctccagggacggaggagagggatgggctgccggagctcgcggctggacgcggcggacgtgtccccggcggccgcgctgtgccgggagcgccgggacctgctccgcgcggccgcggaccaccgcgcgcgcctcgcggccgcgcacgccgcctacttccgagcgctcccgcgcgtggccgacgcgctcgcgcggttcgcgagccaccaccacgccgccacgccgccgggctcgccggtgctcacgctgccgccgccctccgaccacgcggacgccgacgccgacgccgagcccaagaagcagcggagcggctccgcgtccggctccgcgacaccgcacaccggctccggccactcccacatccacttccactccgacgattcctcggaatccgatccagactcctcgaccgacccctgcgccggccccggaggctgtggcgctggccacgtcgacggcgacggcgacggcgacggcgaggtcccgcggccggcgcctgcccttcggcctggcgttcccttgcccggccgcggcggccacggcgagccccaggaacgccaaatccaagacccagcttttgccaggccggagatgccgtgggagtacgcttcgtacgacccctatccttcgttcccaaacaccgagttccaaaatgccacatttcctaggtactactacatgaaggccagctcgacgccggcgaacacggtgtatcaagaaccgtacggctacggcaacttcgccaccagttcgtcctacatggggtacaacaacccgatgtacggcgtcccgttgcaacctgatggggatcgcccggtggaggatcgtggccgggaatcggtggctccgccgccggcggcgccgccgccaatgccaatgcctgagacgtcaccgtgggacttctttaaccccttcgattcatatgagcaggagctcccgcagtatagaggcaaagggtacgattccaatgggtcgttcaccagcagtcccaactcgagtgaggtgagggcaagggaggggatcccggagctcgaggaggagacggaactggagtctatgagggagtctgtgaaggcaaggaaggctgtagagagcacggcgtctaaccggattgacaatgcggatgtcagtgccaaggtgaaagtgtccatggagcacaaggaagttgagattgagagtgtgtacagtgtttcggtacttgagtcaggggacgagagtgtgtgcagttgcgattgtgaccatgccaacactagaacagaggggccaatgcaggtgcctgcaggagatgatcaaggggggaaggtgagctcagaggatcactcatccatagttgtcggagaggatgtatggccgccagagatcactgggacaagagatgtcgccgtggttgtagaggaaataaaggagcagttcaaatcagtggctgcttgtggagatgacgtcgcaaggatccttgaggtggggaggatgcagtatcgatcacggaatagagtcttgagatgctgtatgtgtgggagaaaagacttcataaggaaattatggaggaagaaaaattgaggattacatatgacaaagaatggaagcgcttgaaagagctggatgctagtggtgcagagccatataagatcgattcaacccgggcctcaattagggcactgctcaccagaatcaacatttccatcagatcagctaaagttatttctaggaggatccacatactacgagacgatgagttacacccacaccttgttgcgcttatccaagggtttgttagaatgtggaagttcattcttgagtgccaccggaagcaattccataccatacttgaaactaaatctcacattctgatccctaagaatggaccggaaagaagctcgtccaaggttacactggaactagaaatggagctcctgaactggtgttcctgtttcaggaactggatcctgtcccaaaaggcttatatcgaagctctcaacggctggctagtgaaatggcttccccaggaaaaggaggagactccggacggcattgcgcccttctctcctggcaggcttggagctcctgccgcgttcgtgacagccaacgactggtgccaggccatgagaaggatgccggaaccggaaggcggcgtagtagacacgatggaggctttcgctgtcaacgtgcatacgttgtgggagcggcaggacgaagagcagcggcagcagaggctgagagctgactacctctccagctccagggattttgaaaagcggatcagatctcttcagaaggagcatggctcgcaggggcagtttgacgctggcagggcagcggtgcttcccgccgttgccgacaatggcagggcagttgataaccgcatggttgcactggactcgttgcacaagggattggacgaacagagggcccggcacgagcacgaggaaaccgtgaggcagatccgcgaggccagcgcggctgatctgaaggcaggtctggctccgatattcgaagcgctggaatcttttaccgcggagacgctgagagggtacgaaaatgtcaggatccctgccaaaagcattggcgggtgataccttttaagccccccacggttttttttttctgttggcagcagttcttggtacatccaaggaactattgtcaatcttttagactgtcttcagtttgccagccatgcgcaagcacaaacaaggccccattgtggttggggtaatgtagagttcatccagtgtacaagaaagggcggcccagaagttcctgcatgattgcgcacgaagcagtgttgccatggatgctttttgagataatcctgatttctgtggtagcaaattcatgtggatctttgagactagtcggtagctagagctacttatccacagagagctgctaggagcctgaactcctagttgcagccccgcaaaggagtggggggagccggggaggggatggcagttttgtactagtcattttcagctcctgtacatattgattatattagctaagttggtgaattatctatctatctatctatctatctatctatcaggctagctcgccatccgtgtacaattttatctgtgcatcgtacaagttgtatttaatgccgta

SEQ ID NO: 63042 - DNA, 3705 bp, Zea Mays
ccagaccatgaacgcattcggctacgttgtgctcgcaatcggaatgcgctgaagccaagcagcgaacgagagaatgctacagtacttccagtgcctgctcagtcagagctcactgctcagagctcaataataaacgcgcctccacgtgcccgggtcaccctgccgcgcgcgcgcacacgccgctcgctccgtcctcggcttcctctttgcgaccaccaccaccctcgccggtcgccgcgctcgcccaccatttttttttacgttgccacgctactttgctcccggcccctgctcactctgctgcctgccctacctcgactcccgcccgttacttccacccctcggtttgctgcgggagcgagccagcactcgcgggctcgcggcgtcgcgggcaatgccggcgacggcgagcgagtagggggctcctccagggacggaggagagggatgggctgccggagctcgcggctggacgcggcggacgtgtccccggcggccgcgctgtgccgggagcgccgggacctgctccgcgcggccgcggaccaccgcgcgcgcctcgcggccgcgcacgccgcctacttccgagcgctcccgcgcgtggccgacgcgctcgcgcggttcgcgagccaccaccacgccgccacgccgccgggctcgccggtgctcacgctgccgccgccctccgaccacgcggacgccgacgccgacgccgagcccaagaagcagcggagcggctccgcgtccggctccgcgacaccgcacaccggctccggccactcccacatccacttccactccgacgattcctcggaatccgatccagactcctcgaccgacccctgcgccggccccggaggctgtggcgctggccacgtcgacggcgacggcgacggcgacggcgaggtcccgcggccggcgcctgcccttcggcctggcgttcccttgcccggccgcggcggccacggcgagccccaggaacgccaaatccaagacccagcttttgccaggccggagatgccgtgggagtacgcttcgtacgacccctatccttcgttcccaaacaccgagttccaaaatgccacatttcctaggtactactacatgaaggccagctcgacgccggcgaacacggtgtatcaagaaccgtacggctacggcaacttcgccaccagttcgtcctacatggggtacaacaacccgatgtacggcgtcccgttgcaacctgatggggatcgcccggtggaggatcgtggccgggaatcggtggctccgccgccggcggcgccgccgccaatgccaatgcctgagacgtcaccgtgggacttctttaaccccttcgattcatatgagcaggagctcccgcagtatagaggcaaagggtacgattccaatgggtcgttcaccagcagtcccaactcgagtgaggtgagggcaagggaggggatcccggagctcgaggaggagacggaactggagtctatgagggagtctgtgaaggcaaggaaggctgtagagagcacggcgtctaaccggattgacaatgcggatgtcagtgccaaggtgaaagtgtccatggagcacaaggaagttgagattgagagtgtgtacagtgtttcggtacttgagtcaggggacgagagtgtgtgcagttgcgattgtgaccatgccaacactagaacagaggggccaatgcaggtgcctgcaggagatgatcaaggggggaaggtgagctcagaggatcactcatccatagttgtcggagaggatgtatggccgccagagatcactgggacaagagatgtcgccgtggttgtagaggaaataaaggagcagttcaaatcagtggctgcttgtggagatgacgtcgcaaggatccttgaggtggggaggatgcagtatcgatcacggaatagagtcttgagattgatattctcacggatgatggggaccttcgccttgttgttttcttccatatctgagccaacagtgaagagcatggaacaaacagctataaattcatccaaaataaaacagaattccagtaaaagatttgattttcccagtgatgttgaacttaatactctttccgcaacaatggacaggctgtatgtgtgggagaaaagacttcataaggaaattatggaagaaaaattgaggattacatatgacaaagaatggaagcgcttgaaagagctggatgctagtggtgcagagccatataagatcgattcaacccgggcctcaattagggcactgctcaccagaatcaacatttccatcagatcagctaaagttatttctaggaggatccacatactacgagacgatgagttacacccacaccttgttgcgcttatccaagggtttgttagaatgtggaagttcattcttgagtgccaccggaagcaattccataccatacttgaaactaaatctcacattctgatccctaagaatggaccggaaagaagctcgtccaaggttacactggaactagaaatggagctcctgaactggtgttcctgtttcaggaactggatcctgtcccaaaaggcttatatcgaagctctcaacggctggctagtgaaatggcttccccaggaaaaggaggagactccggacggcattgcgcccttctctcctggcaggcttggagctcctgccgcgttcgtgacagccaacgactggtgccaggccatgagaaggatgccggaaccggaaggcggcgtagtagacacgatggaggctttcgctgtcaacgtgcatacgttgtgggagcggcaggacgaagagcagcggcagcagaggctgagagctgactacctctccagctccagggattttgaaaagcggatcagatctcttcagaaggagcatggctcgcaggggcagtttgacgctggcagggcagcggtgcttcccgccgttgccgacaatggcagggcagttgataaccgcatggttgcactggactcgttgcacaagggattggacgaacagagggcccggcacgagcacgaggaaaccgtgaggcagatccgcgaggccagcgcggctgatctgaaggcaggtctggctccgatattcgaagcgctggaatcttttaccgcggagacgctgagagggtacgaaaatgtcaggatccctgccaaaagcattggcgggtgataccttttaagccccccacggttttttttttctgttggcagcagttcttggtacatccaaggaactattgtcaatcttttagactgtcttcagtttgccagccatgcgcaagcacaaacaaggccccattgtggttggggtaatgtagagttcatccagtgtacaagaaagggcggcccagaagttcctgcatgattgcgcacgaagcagtgttgccatggatgctttttgagataatcctgatttctgtggtagcaaattcatgtggatctttgagactagtcggtagctagagctacttatccacagagagctgctaggagcctgaactcctagttgcagccccgcaaaggagtggggggagccggggaggggatggcagttttgtactagtcattttcagctcctgtacatattgattatattagctaagttggtgaattatctatctatctatctatctatctatctatcaggctagctcgccatccgtgtacaattttatctgtgcatcgtacaagttgtatttaatgccgta

SEQ ID NO: 63043 - DNA, 1371 bp, Zea Mays
catccatgtatccatccatccacacacacaaacagacaagcatacaacaccgttgccatttagctgttcttgctaggcagttgcgcgcttacattgagccgcagctagctgtctactacggcacaactatctcctgcgcgcgtgctcgatcgatctgaaggccagacctgtgcctgtccaattttgccttgttctacccaccacaccagtagtcgagaaggttccatataagcgcaagcagacagcagcaaaagagctaaggagagtctgagacaaggttcgaacagatggaggatgtggtgaagttcgtctttggagtttccggaaatgtcatcgctctcttcctcttcctttccccagtgcctacgttctggaggatcatcaggaggaagtcgacggaggatttctcgggggtgccgtacagcatgacactcctcaactgcctcttgtcagcttggtacgggctgccgttcgtgtccccgaacaacatgctggtgtcgacgatcaacggcgcgggcgcggcgatcgaggccgtgtacgtggtgatcttcctggcgttcgcgtccagccagcggacgcggctgcggatgctgggcctggcgtcggcggtctcggcggcgttcgccgccgtggcgctggcgtcgatgctggcgctgcacggacagggccggaagctcatgtgcggcctcgccgccaccgtctgctccatctgcataggctggtggtgaagaccaagagcgtggagtacatgccgttcctgctgtcgctggccgtgttcctgtgcggcacgtcctggttcgtctacggcctgctcggccgggaccccttcgtcgcgattcccaacgggtgcgggagctttctgggcgcagtgcagctggtcttgtacgccatctaccgcgacagcaacagcggcggcaagcagcaggccggcgacgacgtggagatggcctccgacgccaagagcagcaagaaggtcgccgacgacgtcggcggcaaggaggaccgcctggtctagcatggagctagccactttctctttcggtgcgcgagcgtatgtttcctccccccgtgattgtgtgtgtgtgcatgtatacgagagtgcgtgctgtactgtactacctctgcgtgtgtgcaataatgtaactgggtgtttcatctcgcaatggggtgtctctctccaagcgcgatttgctggccgtcggaggccaaggtggacgatagggatgccgtagttttccggcgccgctatgctagctgttcacatggtgccgatcggcgatcgtgagccacggacggagtgccttccaggccgcatggctgcttcgcgggcccagccatattgcaacccgtcaacctaacctaacaaacaat

SEQ ID NO: 63044 - DNA, 1828 bp, Zea Mays
caagatactgtagataccatggcaaattcaggactgcactttatggtcagatatggcatttttgcccattccttgctatcatattattgttgacatggactggttgcaggccttcaatctaatgcgtgtggattgggctcaaaaatggttgtctattccttataatggcactactgcaactttgtatggacagtcatctcaggtgccagtatgcaccgtggtggaacttcttctggttgctgccacagtatcagttaatgaccattcaccaatccccgatgcagtccaagagctattgaagcagtttgctaccctctttgaggatccctaggggttgcctcctagtcatgattgcgatcacaccattcctttgactgtttacaggtaccctccacaactgaaggatgagatcgaaaaacaaattggtgacatgttgatgcaaggtgtcattcagaagagtcatagccccttcgcttccccagttctattggttcggaaaaagacaatacatggcgcttttgcgtggattacagcacatgtgttggcattaccagatttcaccaagccgttcaacatccatactgatgcctcccaacatggtgtcggtgctatactaatgcagcagtcacatctgttggcctttctcagtcgggttttggggcctaaaaatcagggactatctacttatgaaaaggaatatatggctatcctattggccgtcaatcaatggcgctcataccatcagttggccgagttcaccattcacactgatcatatcagtcttactcaactgaatgagcagcgacttcatacaccatggtagcaaaagtttcttgctttgctctatttcagtgtgctcccacatggttacaggaggtgataactgggtatgacagggatcctgcaactaagcagttgttagccacactgtgtctgaaatcggatgctgaaggacctttttctttaatccagggtgtgctgcgtgctttacatgactgcaattgaatttgggtgtaccggcgacttacagtcgtgtgaagcagcttttctattggcctagtatgaaatcggatatccgatcctatgtgcagtcatgttctatatgtcagcaggccaaaccagaacgggttaactatccaggccttctccaacctctacctattcctctgcaagcatggcacaccatttcccttgattttatagaaggtcttcctcgttcagcacatttcaactgcatattggttgtcgtcgataaattctcgaagtatggccactttttgccattgtcccacccatttacagctgcaaaggttgctaaagtattcctggacaatatatatcaacttcatggcttaccaaccaacatcatatctaatcgcgaccgcattttcactagcactttttggcaagcattattccagctctcgggcaccaagttgtgcatgtcctcagcgtatcacccgcaatcggatggacagactgagcgcctcaatcagtgcctagagacttttcttcgctgttttgtgcatacatgccccaccaaatggtcacacgggatgtaatgaccggcagccactataggcaccgggcaacagcataagcatgtaaataaggattagaagataagcatgcagataaggattagaagataagatttgttagagagaagatagggattagaagataagatttgttagagagaaaagaggagatctatcttattagataaggactagaggggagtataaataattgtaagcaccactctatagatcaagcagaaacacattgttttccggcttcctgtagggagccgggagtccaaccc

SEQ ID NO: 63045 - DNA, 2442 bp, Zea Mays
attttttcgagcaccaccttaggtacattaatggtcgtaagagtgtgaacaggttgtgcagacaacacggatttgaccaaaacgagtcttcctgcaaaagtgaaattgcgaccttgccagcatgttaacttgctgctaaccttatcgagaagatactggaagtcaacttttttgagcctctcaaccgacaaaggaatcccaaggtatttaatagggaattgcgatcttgaagcagggaagccagcaagaatttcgtcgagattgaggccagcacatttaatcggaacgactgaggatttctgaatattggtacgcaaaccagtcgcttccccgaattgatgtagcaaggttgcgaaggaatccagctctctcttttcaggtttgacaaagatgatggcatcatccgcatacatagcgatccggagacgtgttctagccttgattgatagtggtaggtcacatacattcttgcatgagaaatttcgcccattgttcaagaatgtggatttggtgagtgccccactacaggttcgtgtggctaatggtgaattgttacattaccaacacaagatactgtagataccatggcaaattcaggactgcactttatggtcagatatggcatttttgcccattccttgctatcatattattgttgacatggactggttgcaggccttcaatctaatgcgtgtggattgggctcaaaaatggttgtctattccttataatggcactactgcaactttgtatggacagtcatctcaggtgccagtatgcaccgtggtggaacttcttctggttgctgccacagtatcagttaatgaccattcaccaatccccgatgcagtccaagagctattgaagcagtttgctaccctctttgaggatccctaggggttgcctcctagtcatgattgcgatcacaccattcctttgactgtttacaggtaccctccacaactgaaggatgagatcgaaaaacaaattggtgacatgttgatgcaaggtgtcattcagaagagtcatagccccttcgcttccccagttctattggttcggaaaaagacaatacatggcgcttttgcgtggattacaggagaacatcaacatgcatttgacattctcaaggctgctctcatttcagcacatgtgttggcattaccagatttcaccaagccgttcaacatccatactgatgcctcccaacatggtgtcggtgctatactaatgcagcagtcacatctgttggcctttctcagtcgggttttggggcctaaaaatcagggactatctacttatgaaaaggaatatatggctatcctattggccgtcaatcaatggcgctcataccatcagttggccgagttcaccattcacactgatcatatcagtcttactcaactgaatgagcagcgacttcatacaccatggtagcaaaagtttcttgctttgctctatttcagtgtgctcccacatggttacaggaggtgataactgggtatgacagggatcctgcaactaagcagttgttagccacactgtgtctgaaatcggatgctgaaggacctttttctttaatccagggtgtgctgcgtgctttacatgactgcaattgaatttgggtgtaccggcgacttacagtcgtgtgaagcagcttttctattggcctagtatgaaatcggatatccgatcctatgtgcagtcatgttctatatgtcagcaggccaaaccagaacgggttaactatccaggccttctccaacctctacctattcctctgcaagcatggcacaccatttcccttgattttatagaaggtcttcctcgttcagcacatttcaactgcatattggttgtcgtcgataaattctcgaagtatggccactttttgccattgtcccacccatttacagctgcaaaggttgctaaagtattcctggacaatatatatcaacttcatggcttaccaaccaacatcatatctaatcgcgaccgcattttcactagcactttttggcaagcattattccagctctcgggcaccaagttgtgcatgtcctcagcgtatcacccgcaatcggatggacagactgagcgcctcaatcagtgcctagagacttttcttcgctgttttgtgcatacatgccccaccaaatggtcacacgggatgtaatgaccggcagccactataggcaccgggcaacagcataagcatgtaaataaggattagaagataagcatgcagataaggattagaagataagatttgttagagagaagatagggattagaagataagatttgttagagagaaaagaggagatctatcttattagataaggactagaggggagtataaataattgtaagcaccactctatagatcaagcagaaacacattgttttccggcttcctgtagggagccgggagtccaaccc

SEQ ID NO: 63046 - DNA, 2592 bp, Zea Mays
attttttcgagcaccaccttaggtacattaatggtcgtaagagtgtgaacaggttgtgcagacaacacggatttgaccaaaacgagtcttcctgcaaaagtgaaattgcgaccttgccagcatgttaacttgctgctaaccttatcgagaagatactggaagtcaacttttttgagcctctcaaccgacaaaggaatcccaaggtatttaatagggaattgcgatcttgaagcagggaagccagcaagaatttcgtcgagattgaggccagcacatttaatcggaacgactgaggatttctgaatattggtttgacaaagatgatggcatcatccgcatacatagcgatccggagacgtgttctagccttgattgatagtggtaggtcacatacattcttgcatgagaaatttcgcccattgttcaagaatgtggatttggtgagtgccccactacaggttcgtgtggctaatggtgaattgttacattaccaacacaagatactgtagataccatggcaaattcaggactgcactttatggtcagatatggcatttttgcccattccttgctatcatattattgttgacatggactggttgcaggccttcaatctaatgcgtgtggattgggctcaaaaatggttgtctattccttataatggcactactgcaactttgtatggacagtcatctcaggtgccagtatgcaccgtggtggaacttcttctggttgctgccacagtatcagttaatgaccattcaccaatccccgatgcagtccaagagctattgaagcagtttgctaccctctttgaggatccctaggggttgcctcctagtcatgattgcgatcacaccattcctttgactgtttacaggtaccctccacaactgaaggatgagatcgaaaaacaaattggtgacatgttgatgcaaggtgtcattcagaagagtcatagccccttcgcttccccagttctattggttcggaaaaagacaatacatggcgcttttgcgtggattacagtcaggagaggagtataaaacaacattccaaacacatattgggcattatgaatttcgtgtcatggcttttggattaacgggagccccaaatacatttttaggagccatgaacgagacactaaagacaatactcaaaagggacaaatggaaggtgaaattgtccaagtgtgattttgccaagcagcaaatcgcttatttgggacacattatcaacgcacaaggagaacatcaacatgcatttgacattctcaaggctgctctcatttcagcacatgtgttggcattaccagatttcaccaagccgttcaacatccatactgatgcctcccaacatggtgtcggtgctatactaatgcagcagtcacatctgttggcctttctcagtcgggttttggggcctaaaaatcagggactatctacttatgaaaaggaatatatggctatcctattggccgtcaatcaatggcgctcataccatcagttggccgagttcaccattcacactgatcatatcagtcttactcaactgaatgagcagcgacttcatacaccatggtagcaaaagtttcttgctttgctctatttcagtgtgctcccacatggttacaggaggtgataactgggtatgacagggatcctgcaactaagcagttgttagccacactgtgtctgaaatcggatgctgaaggacctttttctttaatccagggtgtgctgcgtgctttacatgactgcaattgaatttgggtgtaccggcgacttacagtcgtgtgaagcagcttttctattggcctagtatgaaatcggatatccgatcctatgtgcagtcatgttctatatgtcagcaggccaaaccagaacgggttaactatccaggccttctccaacctctacctattcctctgcaagcatggcacaccatttcccttgattttatagaaggtcttcctcgttcagcacatttcaactgcatattggttgtcgtcgataaattctcgaagtatggccactttttgccattgtcccacccatttacagctgcaaaggttgctaaagtattcctggacaatatatatcaacttcatggcttaccaaccaacatcatatctaatcgcgaccgcattttcactagcactttttggcaagcattattccagctctcgggcaccaagttgtgcatgtcctcagcgtatcacccgcaatcggatggacagactgagcgcctcaatcagtgcctagagacttttcttcgctgttttgtgcatacatgccccaccaaatggtcacacgggatgtaatgaccggcagccactataggcaccgggcaacagcataagcatgtaaataaggattagaagataagcatgcagataaggattagaagataagatttgttagagagaagatagggattagaagataagatttgttagagagaaaagaggagatctatcttattagataaggactagaggggagtataaataattgtaagcaccactctatagatcaagcagaaacacattgttttccggcttcctgtagggagccgggagtccaaccc

SEQ ID NO: 63047 - DNA, 2779 bp, Zea Mays
cggctttctttctcctcttggcaggccgctcacgcttctgctcttctgatgtgagcttcgaatccaaccagcgatgggcgatggctactcttttagcccgaagctcctcgctacatggcccaggtggagctttcttcaccatgaaaattttcttcagttcgcctcggtgagaagtgtaggcacgaacccccaggaacagaaggcatccctcgcaagcttctttgtcgcgtccaagataataatgtcagaatatatcgatggatatccattgcacaaagtttagtttacgacgttcatatataacaaataaccagcacaagtatttcacatctgcaacaagttctgtcatcattgaaaggtaaaacatgctactatatttaccaaatatgcattacaaaactgctctgcagagacgacattatacaaggacgcatgtctaaggatatttgcatcctcctgtgggttcctgacgattttgttcggttatttctacgtcatatggattgaataagatcgaaaaaaaagttagtaaagatgttgacttgctatggatttaaacatatcaagactatccaaaacccaccctttaaaaggtgtattctgtcaatggtacacgagtacgatcctggagcgtcgatggcggctatggatgcggtgatgcaacgcgtcctcgaccagttgtcccaaatggagagtcgataacagacgccatgattgggcgctgcagcgagctcgagcaacgaatcaaagcgtcggagcacaaggtggagacccgattcatctccctagagatggatcaggcgcggttcgaggagtggcgcccagatgtggagaagcgcctcgacaacatgttcttgaactcgccagggcgaccaggctcctggagcgcggcaccttcactgccgaagcttccaaacccggtctgattgtgtcttcggggtcggcgttcaggcgctcacctgccggattccacaacgccgacgggccggatggccactgcgtcgaacacaatcaccgggagcgtgagtttggtcgcatcccgacccaacctcacggcccggtcaagggtaccctccacaactgaaggatgagatcgaaaaacaaattggtgacatgttgatgcaaggtgtcattcagaagagtcatagccccttcgcttccccagttctattggttcggaaaaagacaatacatggcgcttttgcgtggattacagtcaggagaggagtataaaacaacattccaaacacatattgggcattatgaatttcgtgtcatggcttttggattaacgggagccccaaatacatttttaggagccatgaacgagacactaaagacaatactcaaaagggacaaatggaaggtgaaattgtccaagtgtgattttgccaagcagcaaatcgcttatttgggacacattatcaacgcacaaggagaacatcaacatgcatttgacattctcaaggctgctctcatttcagcacatgtgttggcattaccagatttcaccaagccgttcaacatccatactgatgcctcccaacatggtgtcggtgctatactaatgcagcagtcacatctgttggcctttctcagtcgggttttggggcctaaaaatcagggactatctacttatgaaaaggaatatatggctatcctattggccgtcaatcaatggcgctcataccatcagttggccgagttcaccattcacactgatcatatcagtcttactcaactgaatgagcagcgacttcatacaccatggtagcaaaagtttcttgctttgctctatttcagtgtgctcccacatggttacaggaggtgataactgggtatgacagggatcctgcaactaagcagttgttagccacactgtgtctgaaatcggatgctgaaggacctttttctttaatccagggtgtgctgcgtgctttacatgactgcaattgaatttgggtgtaccggcgacttacagtcgtgtgaagcagcttttctattggcctagtatgaaatcggatatccgatcctatgtgcagtcatgttctatatgtcagcaggccaaaccagaacgggttaactatccaggccttctccaacctctacctattcctctgcaagcatggcacaccatttcccttgattttatagaaggtcttcctcgttcagcacatttcaactgcatattggttgtcgtcgataaattctcgaagtatggccactttttgccattgtcccacccatttacagctgcaaaggttgctaaagtattcctggacaatatatatcaacttcatggcttaccaaccaacatcatatctaatcgcgaccgcattttcactagcactttttggcaagcattattccagctctcgggcaccaagttgtgcatgtcctcagcgtatcacccgcaatcggatggacagactgagcgcctcaatcagtgcctagagacttttcttcgctgttttgtgcatacatgccccaccaaatggtcacacgggatgtaatgaccggcagccactataggcaccgggcaacagcataagcatgtaaataaggattagaagataagcatgcagataaggattagaagataagatttgttagagagaagatagggattagaagataagatttgttagagagaaaagaggagatctatcttattagataaggactagaggggagtataaataattgtaagcaccactctatagatcaagcagaaacacattgttttccggcttcctgtagggagccgggagtccaaccc

SEQ ID NO: 63048 - DNA, 2214 bp, Zea Mays
ggattataatcctctactattcaatttcaaatacgaggacacgactaagagaagggcctccaagagcaagagtttcaaagacgccgagaacttcgaagtcctcgtccttgagaagagctgcggttgcaagttcaagtctttgaggatcttgctcatagccatcatctccgcgacagtccttacccttgtaaccccgaccttatacgagcgccagttgcagtcagcctcccggtacgtggatgtcgggtggatgtgggacagagcgagttccgatccgcggtacgcatcttctgccgatgttgggtgggaggatgtgtacaaagcactgggaaacctaagaagcggtaaccgccagagtcatctcagagttgggctcttgaatttcaacagcaccgagtatggctcctggacgcagttgctcccagctgacagccacgttatctccactgtaaggctcgagcacgccaaggacagcgtcacctggcagacgctgtaccctgagtggatcgacgaggaggaagagacggagataccctcttgcccgtcgctgccggagccaaacgtgccaagaggtgcgcgctttgacgtcgtcgccgtgaagctcccatgcacccgtgtggcgggctggtcgagagacgtcgcgcggctccatctgcagctctcggcagccaaactggctgtggcgtcctcgaagcgcaaccacgacgtccatgttctcttcgtcactgactgcttcccgatcccgaacctcttcccttgcaagaaccttgtcacacgtgaaggcagcgcctggttgtacagtcctgactccaaggcgttgagggaaaagctcaggcttccagtcgggtcctgtgagcttgccgttccactcaaagccaaatcgaggcttttctcggtagatcgacgaagagaagcgtacgcgacgatactgcattcagcgagcgaatacgtctgcggcgcaatctcggcagcgcaaagcatccgccaggcaggatccaccagggacctggtcatccttgtggacgagaccataagcgaccaccaccggagaggcttggaggcggcggggtggaaggtcagagtgatccagaggatcaggaaccccaaggcggagcgcgacgcgtacaacgagtggaactacagcaagttcaggctgtggcagctcaccgactacgacaaggtcatcttcatagacgccgacctcctcatcctgaggaacgtcgacttcctgttcgccatgccggagatcgccgcgacgggcaacaacgccacgctcttcaactccggcgtcatggtcgtcgagccctccaactgcacgttccgcctgctcatggaccacatcgacgagatcacctcgtacaacggcggggaccaggggtacctcaacgagatattcacgtggtggcaccgcgtccccaggcacatgaacttcctcaagcacttctgggagggcgacagcgaggccatgaaggcgaagaagacccagctgttcggtgcggacccgccggtcctctacgtcctccactaccttggcctcaagccgtggctgtgcttcagagactacgactgcaactggaacaacgccgggatgcgcgagttcgccagcgacgtcgcgcatgcccggtggtggaaggtgcacgacaggatgccccggaagctccagtcctactgcctgctgaggtcgcggcagaaggccaggctggagtgggaccggaggcaggccgagaaggccaactctcaagatggccactggcgcctcaacgtcacggacaccaggctcaagacgtgctttgagaagttctgcttctgggagagcatgctctggcattggggcgagaacagtaacaggaccaagagcgtccccatggcagccacgacggcaaggtcgtgatctgtagatatacgaacaccccatccccatatggcaaccatacatgcatagcaatagcttgtataggtagctatgctttagttcttcgctatatatacagaatacaccactcgatccctgttgttgtcaaggctgcagctctatgtcgctgccggcctgccaccatggctaacgattcttttgggttggctgctgtaataagtttcaggtacatgtaaatttccctgctgaaattacgtgaccgcgtgtgagaaatgaatttgtacagggcgccaaataataattggttggtgcatacaacatatgaccagtcttttgcagta

SEQ ID NO: 63049 - DNA, 2233 bp, Zea Mays
aaacatcgtctggtgtgcctcactctcacgcccaactaccggatatattgcgcgaggacacgactaagagaagggcctccaagagcaagagtttcaaagacgccgagaacttcgaagtcctcgtccttgagaagagctgcggttgcaagttcaagtctttgaggatcttgctcatagccatcatctccgcgacagtccttacccttgtaaccccgaccttatacgagcgccagttgcagtcagcctcccggtacgtggatgtcgggtggatgtgggacagagcgagttccgatccgcggtacgcatcttctgccgatgttgggtgggaggatgtgtacaaagcactgggaaacctaagaagcggtaaccgccagagtcatctcagagttgggctcttgaatttcaacagcaccgagtatggctcctggacgcagttgctcccagctgacagccacgttatctccactgtaaggctcgagcacgccaaggacagcgtcacctggcagacgctgtaccctgagtggatcgacgaggaggaagagacggagataccctcttgcccgtcgctgccggagccaaacgtgccaagaggtgcgcgctttgacgtcgtcgccgtgaagctcccatgcacccgtgtggcgggctggtcgagagacgtcgcgcggctccatctgcagctctcggcagccaaactggctgtggcgtcctcgaagcgcaaccacgacgtccatgttctcttcgtcactgactgcttcccgatcccgaacctcttcccttgcaagaaccttgtcacacgtgaaggcagcgcctggttgtacagtcctgactccaaggcgttgagggaaaagctcaggcttccagtcgggtcctgtgagcttgccgttccactcaaagccaaatcgaggcttttctcggtagatcgacgaagagaagcgtacgcgacgatactgcattcagcgagcgaatacgtctgcggcgcaatctcggcagcgcaaagcatccgccaggcaggatccaccagggacctggtcatccttgtggacgagaccataagcgaccaccaccggagaggcttggaggcggcggggtggaaggtcagagtgatccagaggatcaggaaccccaaggcggagcgcgacgcgtacaacgagtggaactacagcaagttcaggctgtggcagctcaccgactacgacaaggtcatcttcatagacgccgacctcctcatcctgaggaacgtcgacttcctgttcgccatgccggagatcgccgcgacgggcaacaacgccacgctcttcaactccggcgtcatggtcgtcgagccctccaactgcacgttccgcctgctcatggaccacatcgacgagatcacctcgtacaacggcggggaccaggggtacctcaacgagatattcacgtggtggcaccgcgtccccaggcacatgaacttcctcaagcacttctgggagggcgacagcgaggccatgaaggcgaagaagacccagctgttcggtgcggacccgccggtcctctacgtcctccactaccttggcctcaagccgtggctgtgcttcagagactacgactgcaactggaacaacgccgggatgcgcgagttcgccagcgacgtcgcgcatgcccggtggtggaaggtgcacgacaggatgccccggaagctccagtcctactgcctgctgaggtcgcggcagaaggccaggctggagtgggaccggaggcaggccgagaaggccaactctcaagatggccactggcgcctcaacgtcacggacaccaggctcaagacgtgctttgagaagttctgcttctgggagagcatgctctggcattggggcgagaacagtaacaggaccaagagcgtccccatggcagccacgacggcaaggtcgtgatctgtagatatacgaacaccccatccccatatggcaaccatacatgcatagcaatagcttgtataggtagctatgctttagttcttcgctatatatacagaatacaccactcgatccctgttgttgtcaaggctgcagctctatgtcgctgccggcctgccaccatggctaacgattcttttgggttggctgctgtaataagtttcaggtacatgtaaatttccctgctgaaattacgtgaccgcgtgtgagaaatgaatttgtacagggcgccaaataataattggttggtgcatacaacatatgaccagtcttttgcagta

SEQ ID NO: 63050 - DNA, 2317 bp, Zea Mays
acccggctactatatatatctccgcactccacggcagcggtgactctgaattcttctcgccaggctaccttcccgtcgtcgcaacggtatccaacagccatgcttctctgatccggagagaaccggtccaggccagcgaggacacgactaagagaagggcctccaagagcaagagtttcaaagacgccgagaacttcgaagtcctcgtccttgagaagagctgcggttgcaagttcaagtctttgaggatcttgctcatagccatcatctccgcgacagtccttacccttgtaaccccgaccttatacgagcgccagttgcagtcagcctcccggtacgtggatgtcgggtggatgtgggacagagcgagttccgatccgcggtacgcatcttctgccgatgttgggtgggaggatgtgtacaaagcactgggaaacctaagaagcggtaaccgccagagtcatctcagagttgggctcttgaatttcaacagcaccgagtatggctcctggacgcagttgctcccagctgacagccacgttatctccactgtaaggctcgagcacgccaaggacagcgtcacctggcagacgctgtaccctgagtggatcgacgaggaggaagagacggagataccctcttgcccgtcgctgccggagccaaacgtgccaagaggtgcgcgctttgacgtcgtcgccgtgaagctcccatgcacccgtgtggcgggctggtcgagagacgtcgcgcggctccatctgcagctctcggcagccaaactggctgtggcgtcctcgaagcgcaaccacgacgtccatgttctcttcgtcactgactgcttcccgatcccgaacctcttcccttgcaagaaccttgtcacacgtgaaggcagcgcctggttgtacagtcctgactccaaggcgttgagggaaaagctcaggcttccagtcgggtcctgtgagcttgccgttccactcaaagccaaatcgaggcttttctcggtagatcgacgaagagaagcgtacgcgacgatactgcattcagcgagcgaatacgtctgcggcgcaatctcggcagcgcaaagcatccgccaggcaggatccaccagggacctggtcatccttgtggacgagaccataagcgaccaccaccggagaggcttggaggcggcggggtggaaggtcagagtgatccagaggatcaggaaccccaaggcggagcgcgacgcgtacaacgagtggaactacagcaagttcaggctgtggcagctcaccgactacgacaaggtcatcttcatagacgccgacctcctcatcctgaggaacgtcgacttcctgttcgccatgccggagatcgccgcgacgggcaacaacgccacgctcttcaactccggcgtcatggtcgtcgagccctccaactgcacgttccgcctgctcatggaccacatcgacgagatcacctcgtacaacggcggggaccaggggtacctcaacgagatattcacgtggtggcaccgcgtccccaggcacatgaacttcctcaagcacttctgggagggcgacagcgaggccatgaaggcgaagaagacccagctgttcggtgcggacccgccggtcctctacgtcctccactaccttggcctcaagccgtggctgtgcttcagagactacgactgcaactggaacaacgccgggatgcgcgagttcgccagcgacgtcgcgcatgcccggtggtggaaggtgcacgacaggatgccccggaagctccagtcctactgcctgctgaggtcgcggcagaaggccaggctggagtgggaccggaggcaggccgagaaggccaactctcaagatggccactggcgcctcaacgtcacggacaccaggctcaagacgtgctttgagaagttctgcttctgggagagcatgctctggcattggggcgagaacagtaacaggaccaagagcgtccccatggcagccacgacggcaaggtcgtgatctgtagatatacgaacaccccatccccatatggcaaccatacatgcatagcaatagcttgtataggtagctatgctttagttcttcgctatatatacagaatacaccactcgatccctgttgttgtcaaggctgcagctctatgtcgctgccggcctgccaccatggctaacgattcttttgggttggctgctgtaataagtttcaggtacatgtaaatttccctgctgaaattacgtgaccgcgtgtgagaaatgaatttgtacagggcgccaaataataattggttggtgcatacaacatatgaccagtcttttgcagta

SEQ ID NO: 63051 - DNA, 2295 bp, Zea Mays
gttttttttttcctttcctttcttctcgcacgtacagtacgccgcattagattggatcgatccttatcgggccgaccaggcggagggagacgacggcgacagcgcggcgagccgcgaggacacgactaagagaagggcctccaagagcaagagtttcaaagacgccgagaacttcgaagtcctcgtccttgagaagagctgcggttgcaagttcaagtctttgaggatcttgctcatagccatcatctccgcgacagtccttacccttgtaaccccgaccttatacgagcgccagttgcagtcagcctcccggtacgtggatgtcgggtggatgtgggacagagcgagttccgatccgcggtacgcatcttctgccgatgttgggtgggaggatgtgtacaaagcactgggaaacctaagaagcggtaaccgccagagtcatctcagagttgggctcttgaatttcaacagcaccgagtatggctcctggacgcagttgctcccagctgacagccacgttatctccactgtaaggctcgagcacgccaaggacagcgtcacctggcagacgctgtaccctgagtggatcgacgaggaggaagagacggagataccctcttgcccgtcgctgccggagccaaacgtgccaagaggtgcgcgctttgacgtcgtcgccgtgaagctcccatgcacccgtgtggcgggctggtcgagagacgtcgcgcggctccatctgcagctctcggcagccaaactggctgtggcgtcctcgaagcgcaaccacgacgtccatgttctcttcgtcactgactgcttcccgatcccgaacctcttcccttgcaagaaccttgtcacacgtgaaggcagcgcctggttgtacagtcctgactccaaggcgttgagggaaaagctcaggcttccagtcgggtcctgtgagcttgccgttccactcaaagccaaatcgaggcttttctcggtagatcgacgaagagaagcgtacgcgacgatactgcattcagcgagcgaatacgtctgcggcgcaatctcggcagcgcaaagcatccgccaggcaggatccaccagggacctggtcatccttgtggacgagaccataagcgaccaccaccggagaggcttggaggcggcggggtggaaggtcagagtgatccagaggatcaggaaccccaaggcggagcgcgacgcgtacaacgagtggaactacagcaagttcaggctgtggcagctcaccgactacgacaaggtcatcttcatagacgccgacctcctcatcctgaggaacgtcgacttcctgttcgccatgccggagatcgccgcgacgggcaacaacgccacgctcttcaactccggcgtcatggtcgtcgagccctccaactgcacgttccgcctgctcatggaccacatcgacgagatcacctcgtacaacggcggggaccaggggtacctcaacgagatattcacgtggtggcaccgcgtccccaggcacatgaacttcctcaagcacttctgggagggcgacagcgaggccatgaaggcgaagaagacccagctgttcggtgcggacccgccggtcctctacgtcctccactaccttggcctcaagccgtggctgtgcttcagagactacgactgcaactggaacaacgccgggatgcgcgagttcgccagcgacgtcgcgcatgcccggtggtggaaggtgcacgacaggatgccccggaagctccagtcctactgcctgctgaggtcgcggcagaaggccaggctggagtgggaccggaggcaggccgagaaggccaactctcaagatggccactggcgcctcaacgtcacggacaccaggctcaagacgtgctttgagaagttctgcttctgggagagcatgctctggcattggggcgagaacagtaacaggaccaagagcgtccccatggcagccacgacggcaaggtcgtgatctgtagatatacgaacaccccatccccatatggcaaccatacatgcatagcaatagcttgtataggtagctatgctttagttcttcgctatatatacagaatacaccactcgatccctgttgttgtcaaggctgcagctctatgtcgctgccggcctgccaccatggctaacgattcttttgggttggctgctgtaataagtttcaggtacatgtaaatttccctgctgaaattacgtgaccgcgtgtgagaaatgaatttgtacagggcgccaaataataattggttggtgcatacaacatatgaccagtcttttgcagta

SEQ ID NO: 63052 - DNA, 2462 bp, Zea Mays
cccctcccttgcttttcctttccctcctcttctgtcgtactactacgctggcctggctgccagtgccacgcacgcacgaacgcgcgcttctctcagccctcgccccgcgtcctgcgctcacgtgtgcgaagcggcgcaacggcggaggcggctctagcatcaccggccgacggtcctcctccttctcacgaaaggcactagaggagcggcggcggcggcggcgcatcaagcaccgcaccgatgggcccactggagccgcgctaccgtccaggcggcgcccccgaggacacgactaagagaagggcctccaagagcaagagtttcaaagacgccgagaacttcgaagtcctcgtccttgagaagagctgcggttgcaagttcaagtctttgaggatcttgctcatagccatcatctccgcgacagtccttacccttgtaaccccgaccttatacgagcgccagttgcagtcagcctcccggtacgtggatgtcgggtggatgtgggacagagcgagttccgatccgcggtacgcatcttctgccgatgttgggtgggaggatgtgtacaaagcactgggaaacctaagaagcggtaaccgccagagtcatctcagagttgggctcttgaatttcaacagcaccgagtatggctcctggacgcagttgctcccagctgacagccacgttatctccactgtaaggctcgagcacgccaaggacagcgtcacctggcagacgctgtaccctgagtggatcgacgaggaggaagagacggagataccctcttgcccgtcgctgccggagccaaacgtgccaagaggtgcgcgctttgacgtcgtcgccgtgaagctcccatgcacccgtgtggcgggctggtcgagagacgtcgcgcggctccatctgcagctctcggcagccaaactggctgtggcgtcctcgaagcgcaaccacgacgtccatgttctcttcgtcactgactgcttcccgatcccgaacctcttcccttgcaagaaccttgtcacacgtgaaggcagcgcctggttgtacagtcctgactccaaggcgttgagggaaaagctcaggcttccagtcgggtcctgtgagcttgccgttccactcaaagccaaatcgaggcttttctcggtagatcgacgaagagaagcgtacgcgacgatactgcattcagcgagcgaatacgtctgcggcgcaatctcggcagcgcaaagcatccgccaggcaggatccaccagggacctggtcatccttgtggacgagaccataagcgaccaccaccggagaggcttggaggcggcggggtggaaggtcagagtgatccagaggatcaggaaccccaaggcggagcgcgacgcgtacaacgagtggaactacagcaagttcaggctgtggcagctcaccgactacgacaaggtcatcttcatagacgccgacctcctcatcctgaggaacgtcgacttcctgttcgccatgccggagatcgccgcgacgggcaacaacgccacgctcttcaactccggcgtcatggtcgtcgagccctccaactgcacgttccgcctgctcatggaccacatcgacgagatcacctcgtacaacggcggggaccaggggtacctcaacgagatattcacgtggtggcaccgcgtccccaggcacatgaacttcctcaagcacttctgggagggcgacagcgaggccatgaaggcgaagaagacccagctgttcggtgcggacccgccggtcctctacgtcctccactaccttggcctcaagccgtggctgtgcttcagagactacgactgcaactggaacaacgccgggatgcgcgagttcgccagcgacgtcgcgcatgcccggtggtggaaggtgcacgacaggatgccccggaagctccagtcctactgcctgctgaggtcgcggcagaaggccaggctggagtgggaccggaggcaggccgagaaggccaactctcaagatggccactggcgcctcaacgtcacggacaccaggctcaagacgtgctttgagaagttctgcttctgggagagcatgctctggcattggggcgagaacagtaacaggaccaagagcgtccccatggcagccacgacggcaaggtcgtgatctgtagatatacgaacaccccatccccatatggcaaccatacatgcatagcaatagcttgtataggtagctatgctttagttcttcgctatatatacagaatacaccactcgatccctgttgttgtcaaggctgcagctctatgtcgctgccggcctgccaccatggctaacgattcttttgggttggctgctgtaataagtttcaggtacatgtaaatttccctgctgaaattacgtgaccgcgtgtgagaaatgaatttgtacagggcgccaaataataattggttggtgcatacaacatatgaccagtcttttgcagta

SEQ ID NO: 63053 - DNA, 2368 bp, Zea Mays
gcttcgtcccctcccgagctcgcacaccgagttcttcttcttaatcttcctcttcgtctccttctagtagtgggcagagagagatcgagtgctaggggagaagcaagcaagccaggcagcagcaaccgcgcctggtttcctcctcctcctcctcgtgggctcacacaaggcttccttcggttcggggcgaggacacgactaagagaagggcctccaagagcaagagtttcaaagacgccgagaacttcgaagtcctcgtccttgagaagagctgcggttgcaagttcaagtctttgaggatcttgctcatagccatcatctccgcgacagtccttacccttgtaaccccgaccttatacgagcgccagttgcagtcagcctcccggtacgtggatgtcgggtggatgtgggacagagcgagttccgatccgcggtacgcatcttctgccgatgttgggtgggaggatgtgtacaaagcactgggaaacctaagaagcggtaaccgccagagtcatctcagagttgggctcttgaatttcaacagcaccgagtatggctcctggacgcagttgctcccagctgacagccacgttatctccactgtaaggctcgagcacgccaaggacagcgtcacctggcagacgctgtaccctgagtggatcgacgaggaggaagagacggagataccctcttgcccgtcgctgccggagccaaacgtgccaagaggtgcgcgctttgacgtcgtcgccgtgaagctcccatgcacccgtgtggcgggctggtcgagagacgtcgcgcggctccatctgcagctctcggcagccaaactggctgtggcgtcctcgaagcgcaaccacgacgtccatgttctcttcgtcactgactgcttcccgatcccgaacctcttcccttgcaagaaccttgtcacacgtgaaggcagcgcctggttgtacagtcctgactccaaggcgttgagggaaaagctcaggcttccagtcgggtcctgtgagcttgccgttccactcaaagccaaatcgaggcttttctcggtagatcgacgaagagaagcgtacgcgacgatactgcattcagcgagcgaatacgtctgcggcgcaatctcggcagcgcaaagcatccgccaggcaggatccaccagggacctggtcatccttgtggacgagaccataagcgaccaccaccggagaggcttggaggcggcggggtggaaggtcagagtgatccagaggatcaggaaccccaaggcggagcgcgacgcgtacaacgagtggaactacagcaagttcaggctgtggcagctcaccgactacgacaaggtcatcttcatagacgccgacctcctcatcctgaggaacgtcgacttcctgttcgccatgccggagatcgccgcgacgggcaacaacgccacgctcttcaactccggcgtcatggtcgtcgagccctccaactgcacgttccgcctgctcatggaccacatcgacgagatcacctcgtacaacggcggggaccaggggtacctcaacgagatattcacgtggtggcaccgcgtccccaggcacatgaacttcctcaagcacttctgggagggcgacagcgaggccatgaaggcgaagaagacccagctgttcggtgcggacccgccggtcctctacgtcctccactaccttggcctcaagccgtggctgtgcttcagagactacgactgcaactggaacaacgccgggatgcgcgagttcgccagcgacgtcgcgcatgcccggtggtggaaggtgcacgacaggatgccccggaagctccagtcctactgcctgctgaggtcgcggcagaaggccaggctggagtgggaccggaggcaggccgagaaggccaactctcaagatggccactggcgcctcaacgtcacggacaccaggctcaagacgtgctttgagaagttctgcttctgggagagcatgctctggcattggggcgagaacagtaacaggaccaagagcgtccccatggcagccacgacggcaaggtcgtgatctgtagatatacgaacaccccatccccatatggcaaccatacatgcatagcaatagcttgtataggtagctatgctttagttcttcgctatatatacagaatacaccactcgatccctgttgttgtcaaggctgcagctctatgtcgctgccggcctgccaccatggctaacgattcttttgggttggctgctgtaataagtttcaggtacatgtaaatttccctgctgaaattacgtgaccgcgtgtgagaaatgaatttgtacagggcgccaaataataattggttggtgcatacaacatatgaccagtcttttgcagta

SEQ ID NO: 63054 - DNA, 2503 bp, Zea Mays
cagcccccctcctcatcaccgttgccgcgcaccccccgcctccgtctcccccgcgtcggcgtactcaccagtcacatatatagagcttcgtcccctcccgagctcgcacaccgagttcttcttcttaatcttcctcttcgtctccttctagtagtgggcagagagagatcgagtgctaggggagaagcaagcaagccaggcagcagcaaccgcgcctggtttcctcctcctcctcctcgtgggctcacacaaggcttccttcggttcgggggtgtgcgaagcggcgcaacggcggaggcggctctagcatcaccggccgacggtcctcctccttctcacgaaaggcactagaggagcggcggcggcggcggcgcatcaagcaccgcaccgatgggcccactggagccgcgctaccgtccaggcggcgcccccgaggacacgactaagagaagggcctccaagagcaagagtttcaaagacgccgagaacttcgaagtcctcgtccttgagaagagctgcggttgcaagttcaagtctttgaggatcttgctcatagccatcatctccgcgacagtccttacccttgtaaccccgaccttatacgagcgccagttgcagtcagcctcccggtacgtggatgtcgggtggatgtgggacagagcgagttccgatccgcggtacgcatcttctgccgatgttgggtgggaggatgtgtacaaagcactgggaaacctaagaagcggctcgagcacgccaaggacagcgtcacctggcagacgctgtaccctgagtggatcgacgaggaggaagagacggagataccctcttgcccgtcgctgccggagccaaacgtgccaagaggtgcgcgctttgacgtcgtcgccgtgaagctcccatgcacccgtgtggcgggctggtcgagagacgtcgcgcggctccatctgcagctctcggcagccaaactggctgtggcgtcctcgaagcgcaaccacgacgtccatgttctcttcgtcactgactgcttcccgatcccgaacctcttcccttgcaagaaccttgtcacacgtgaaggcagcgcctggttgtacagtcctgactccaaggcgttgagggaaaagctcaggcttccagtcgggtcctgtgagcttgccgttccactcaaagccaaatcgaggcttttctcggtagatcgacgaagagaagcgtacgcgacgatactgcattcagcgagcgaatacgtctgcggcgcaatctcggcagcgcaaagcatccgccaggcaggatccaccagggacctggtcatccttgtggacgagaccataagcgaccaccaccggagaggcttggaggcggcggggtggaaggtcagagtgatccagaggatcaggaaccccaaggcggagcgcgacgcgtacaacgagtggaactacagcaagttcaggctgtggcagctcaccgactacgacaaggtcatcttcatagacgccgacctcctcatcctgaggaacgtcgacttcctgttcgccatgccggagatcgccgcgacgggcaacaacgccacgctcttcaactccggcgtcatggtcgtcgagccctccaactgcacgttccgcctgctcatggaccacatcgacgagatcacctcgtacaacggcggggaccaggggtacctcaacgagatattcacgtggtggcaccgcgtccccaggcacatgaacttcctcaagcacttctgggagggcgacagcgaggccatgaaggcgaagaagacccagctgttcggtgcggacccgccggtcctctacgtcctccactaccttggcctcaagccgtggctgtgcttcagagactacgactgcaactggaacaacgccgggatgcgcgagttcgccagcgacgtcgcgcatgcccggtggtggaaggtgcacgacaggatgccccggaagctccagtcctactgcctgctgaggtcgcggcagaaggccaggctggagtgggaccggaggcaggccgagaaggccaactctcaagatggccactggcgcctcaacgtcacggacaccaggctcaagacgtgctttgagaagttctgcttctgggagagcatgctctggcattggggcgagaacagtaacaggaccaagagcgtccccatggcagccacgacggcaaggtcgtgatctgtagatatacgaacaccccatccccatatggcaaccatacatgcatagcaatagcttgtataggtagctatgctttagttcttcgctatatatacagaatacaccactcgatccctgttgttgtcaaggctgcagctctatgtcgctgccggcctgccaccatggctaacgattcttttgggttggctgctgtaataagtttcaggtacatgtaaatttccctgctgaaattacgtgaccgcgtgtgagaaatgaatttgtacagggcgccaaataataattggttggtgcatacaacatatgaccagtcttttgcagta

SEQ ID NO: 63055 - DNA, 2350 bp, Zea Mays
tattattttgtgtgcgaagcggcgcaacggcggaggcggctctagcatcaccggccgacggtcctcctccttctcacgaaaggcactagaggagcggcggcggcggcggcgcatcaagcaccgcaccgatgggcccactggagccgcgctaccgtccaggcggcgcccccgaggacacgactaagagaagggcctccaagagcaagagtttcaaagacgccgagaacttcgaagtcctcgtccttgagaagagctgcggttgcaagttcaagtctttgaggatcttgctcatagccatcatctccgcgacagtccttacccttgtaaccccgaccttatacgagcgccagttgcagtcagcctcccggtacgtggatgtcgggtggatgtgggacagagcgagttccgatccgcggtacgcatcttctgccgatgttgggtgggaggatgtgtacaaagcactgggaaacctaagaagcggtaaccgccagagtcatctcagagttgggctcttgaatttcaacagcaccgagtatggctcctggacgcagttgctcccagctgacagccacgttatctccactgtaaggctcgagcacgccaaggacagcgtcacctggcagacgctgtaccctgagtggatcgacgaggaggaagagacggagataccctcttgcccgtcgctgccggagccaaacgtgccaagaggtgcgcgctttgacgtcgtcgccgtgaagctcccatgcacccgtgtggcgggctggtcgagagacgtcgcgcggctccatctgcagctctcggcagccaaactggctgtggcgtcctcgaagcgcaaccacgacgtccatgttctcttcgtcactgactgcttcccgatcccgaacctcttcccttgcaagaaccttgtcacacgtgaaggcagcgcctggttgtacagtcctgactccaaggcgttgagggaaaagctcaggcttccagtcgggtcctgtgagcttgccgttccactcaaagccaaatcgaggcttttctcggtagatcgacgaagagaagcgtacgcgacgatactgcattcagcgagcgaatacgtctgcggcgcaatctcggcagcgcaaagcatccgccaggcaggatccaccagggacctggtcatccttgtggacgagaccataagcgaccaccaccggagaggcttggaggcggcggggtggaaggtcagagtgatccagaggatcaggaaccccaaggcggagcgcgacgcgtacaacgagtggaactacagcaagttcaggctgtggcagctcaccgactacgacaaggtcatcttcatagacgccgacctcctcatcctgaggaacgtcgacttcctgttcgccatgccggagatcgccgcgacgggcaacaacgccacgctcttcaactccggcgtcatggtcgtcgagccctccaactgcacgttccgcctgctcatggaccacatcgacgagatcacctcgtacaacggcggggaccaggggtacctcaacgagatattcacgtggtggcaccgcgtccccaggcacatgaacttcctcaagcacttctgggagggcgacagcgaggccatgaaggcgaagaagacccagctgttcggtgcggacccgccggtcctctacgtcctccactaccttggcctcaagccgtggctgtgcttcagagactacgactgcaactggaacaacgccgggatgcgcgagttcgccagcgacgtcgcgcatgcccggtggtggaaggtgcacgacaggatgccccggaagctccagtcctactgcctgctgaggtcgcggcagaaggccaggctggagtgggaccggaggcaggccgagaaggccaactctcaagatggccactggcgcctcaacgtcacggacaccaggctcaagacgtgctttgagaagttctgcttctgggagagcatgctctggcattggggcgagaacagtaacaggaccaagagcgtccccatggcagccacgacggcaaggtcgtgatctgtagatatacgaacaccccatccccatatggcaaccatacatgcatagcaatagcttgtataggtagctatgctttagttcttcgctatatatacagaatacaccactcgatccctgttgttgtcaaggctgcagctctatgtcgctgccggcctgccaccatggctaacgattcttttgggttggctgctgtaataagtttcaggtacatgtaaatttccctgctgaaattacgtgaccgcgtgtgagaaatgaatttgtacagggcgccaaataataattggttggtgcatacaacatatgaccagtcttttgcagta

SEQ ID NO: 63056 - DNA, 2840 bp, Zea Mays
gggagtctggcaggccggcattgcccgcatcacgcagcatgccgggcgccggcaaggcagcaacgaatcctggcagcggcaccccgcagccttctgcttgaacagctcgctaataataatctatgatgcttattcaggagtgaatcccataatagagatatgggttctctcactgacattggagtttctgcgggactaaacatactatctgcagtgggtttccttcttgcatttgctgttctcaggatacaacctattaacgatcgggtgtactttcctaaatggtaccttaaagggacaagaagcagcccaaggcagttgggaaatgttttcttgaagtttgtgaatgcagatttctcaacatatatccggtttctaaactggatgcctgcagcactgaaaatgccagaacctgaacttattgaacatgcgggacttgactctgcggtatacgtccgcatctatcttcttggtttgaaaatatttgtgccaattgcgctactagcatttgctgttctagttcctgtcaattggactagtggaacattggaaaatgaaaagggactaagttatgaccagattgataagctttcaatatcaaatcttggaaaaggttcgaaaaggttttgggcacacatagcgatgtcctatgtgtttacattttggacgttctttgtgttgtatcatgagtataaggttgtgacaacaatgaggttgcgctttcttgctaatcaaaatcgtcgacctgatcaatacacagttcttgtgcgaaatgtacctccagacccagatgaatcagttagtgagcacgttgagcacttctttgctgtgaatcaccgtgatcattaccttagtcaccagattgtatacaatgcaaaccacctttctggcttggttgagaagaaaaaaggcctgcaaaactggttaatctactacgaaaacaaacatgctaaaaaccctgcaaaaaggccaaaaataaagacaggactgtggggtctttggggacaaagagtggatgctatagaatactaccaaaaagaaattgaggatttatgtaaacaggaggatgaggagagacaaaaggtggtcaatgatccaaattatatcatgccagcagcatttgtgtctttcaaaacacagtggggggctgctgtttgtgctcaaacacagcagacaagtaatccaaccgtgtggttaactgagtgggctccagaacctcgtgatgttttctgggctaatctcgcaatcccttttgttgagctctcagttaggaggcttattgtagctgttgccttcttctttctgacctttttcttcatgataccaattgctattgttcagtccttggcaaacctagatgatatcgtcaaggtgcttcctttcttgaaacctataatcgaaaggtgtactgattagtgattactattggtccattttcgtaaagtgttgccagatcgtatcactaaatgaatgacaattgtgttcaatgtgcaagaaatttttgcttgacgatttacaaaaatgcattactggttgcagaaattctcttaagtcagttatccaaggcttcttgccaggaatcatattgaaaatctttcttatacttctcccaacaattctaatggccatgagcaagattgaaggacacacatcgctctctggattggacaggaaaacagcaacgaagtactacattttccttttcgtaaatgtattcttggggagtgtaataactggaacagcattccaacaactagacaacttcatacatcagtccgcaaataaaggttgttggagagtccattcctatgaaggcagcatttttcatgacatacataatggttgatggctggtctggtatagctgctgaagttcttcggttgaaggcattagtcatattccatataaagaatgcgttcttggtcagaacggagcacgaccgtgagcaggccatggatcctggaagcctggatttttacaactgtgaaccacgattacagctgtattttctgcttgggcttgtatatgcagttgtcacgccaatgcttcttcccttcatcatagtgttcttcagccttgcatatcttgttttcagacatcagataattaacgtatatactcagcactacgaaagtggtgcacaattctggccagatgttcacatgcgactaattatagcgctgatagtatcacaaatcctcctactggggctgctgagtacacaggaggcagagaagtctactgttgcccttctcccgcttcctgtcctctccatttggttccactatgtttgcaagggccggtttgaaccagcgtttgtgaagttccccttgcaggatgctatggtaaaggacacattggaacgggcgcatgacccgactttaaatttgagagagtacctaaagggtgcttatgtgcatccagtcttccagaaaaatgatatctacaaggttatcgccgtcgacgaggaagagaagaaccccatggttgtgacaaagaggcaatctcgcatgaacgcaccggccggaagctaattgaattccagttctggtggtactaacgaaggggaattcagttggatgcctcctacctaaagcctgattctttcatgagcaaatagcccagtaatcttgtaaatgtttggggaaaatggaaatacaggaggcagtaggatagtgaaacaggctgtattatatatgatccacaatttattaatttcattagtgattacaattattaataaaaacaaatttacaattatttttttgtttctttgtaattccatacttctatattccttgaagaaaaagtgtaaaaggcaggaacaaaagctgacgaaa

SEQ ID NO: 63057 - DNA, 2745 bp, Zea Mays
cgtccttgtgcgggggcaggacagcagaggcggccacggtgctcgtgcttgacggggccacagaggcgggaggaggataacgggagtctggcaggccggcattgcccgcatcacgcagcatgccgggcgccggcaaggcagcaacgaatcctggcagcggcaccccgcaggagtgaatcccataatagagatatgggttctctcactgacattggagtttctgcgggactaaacatactatctgcagtgggtttccttcttgcatttgctgttctcaggatacaacctattaacgatcgggtgtactttcctaaatggtaccttaaagggacaagaagcagcccaaggcagttgggaaatgttttcttgaagtttgtgaatgcagatttctcaacatatatccggtttctaaactggatgcctgcagcactgaaaatgccagaacctgaacttattgaacatgcgggacttgactctgcggtatacgtccgcatctatcttcttggtttgaaaatatttgtgccaattgcgctactagcatttgctgttctagttcctgtcaattggactagtggaacattggaaaatgaaaagggactaagttatgaccagattgataagctttcaatatcaaatcttggaaaaggttcgaaaaggttttgggcacacatagcgatgtcctatgtgtttacattttggacgttctttgtgttgtatcatgagtataaggttgtgacaacaatgaggttgcgctttcttgctaatcaaaatcgtcgacctgatcaatacacagttcttgtgcgaaatgtacctccagacccagatgaatcagttagtgagcacgttgagcacttctttgctgtgaatcaccgtgatcattaccttagtcaccagattgtatacaatgcaaaccacctttctggcttggttgagaagaaaaaaggcctgcaaaactggttaatctactacgaaaacaaacatgctaaaaaccctgcaaaaaggccaaaaataaagacaggactgtggggtctttggggacaaagagtggatgctatagaatactaccaaaaagaaattgaggatttatgtaaacaggaggatgaggagagacaaaaggtggtcaatgatccaaattatatcatgccagcagcatttgtgtctttcaaaacacagtggggggctgctgtttgtgctcaaacacagcagacaagtaatccaaccgtgtggttaactgagtgggctccagaacctcgtgatgttttctgggctaatctcgcaatcccttttgttgagctctcagttaggaggcttattgtagctgttgccttcttctttctgacctttttcttcatgataccaattgctattgttcagtccttggcaaacctagatgatatcgtcaaggtgcttcctttcttgaaacctataatcgaaagaaattctcttaagtcagttatccaaggcttcttgccaggaatcatattgaaaatctttcttatacttctcccaacaattctaatggccatgagcaagattgaaggacacacatcgctctctggattggacaggaaaacagcaacgaagtactacattttccttttcgtaaatgtattcttggggagtgtaataactggaacagcattccaacaactagacaacttcatacatcagtccgcaaataaaattccagaggttgttggagagtccattcctatgaaggcagcatttttcatgacatacataatggttgatggctggtctggtatagctgctgaagttcttcggttgaaggcattagtcatattccatataaagaatgcgttcttggtcagaacggagcacgaccgtgagcaggccatggatcctggaagcctggatttttacaactgtgaaccacgattacagctgtattttctgcttgggcttgtatatgcagttgtcacgccaatgcttcttcccttcatcatagtgttcttcagccttgcatatcttgttttcagacatcagataattaacgtatatactcagcactacgaaagtggtgcacaattctggccagatgttcacatgcgactaattatagcgctgatagtatcacaaatcctcctactggggctgctgagtacacaggaggcagagaagtctactgttgcccttctcccgcttcctgtcctctccatttggttccactatgtttgcaagggccggtttgaaccagcgtttgtgaagttccccttgcaggatgctatggtaaaggacacattggaacgggcgcatgacccgactttaaatttgagagagtacctaaagggtgcttatgtgcatccagtcttccagaaaaatgatatctacaaggttatcgccgtcgacgaggaagagaagaaccccatggttgtgacaaagaggcaatctcgcatgaacgcaccggccggaagctaattgaattccagttctggtggtactaacgaaggggaattcagttggatgcctcctacctaaagcctgattctttcatgagcaaatagcccagtaatcttgtaaatgtttggggaaaatggaaatacaggaggcagtaggatagtgaaacaggctgtattatatatgatccacaatttattaatttcattagtgattacaattattaataaaaacaaatttacaattatttttttgtttctttgtaattccatacttctatattccttgaagaaaaagtgtaaaaggcaggaacaaaagctgacgaaa

SEQ ID NO: 63058 - DNA, 2870 bp, Zea Mays
gccaattgctaaaagtttgcggagaacgcgaggaggggagatagctggggctaccattttggtgcagctggaggcgccggccgaagaaggattcacggcccacgccttctctctcctctcgccctgaaatgcaggcgtagatacgcgcgcgatgatcgtgagcccctccgcgcccctccgtcgcacctgtctcgcgttggcctctcctctcggctctcacgtgcaaacctaggcgccggcgccggcgtgctcctagcgctagcgtgagtgcacacggccagagcgagggaccggcgggcggtggcacgcgccgtccttgtgcgggggcaggacagcagaggcggccacggtgctcgtgcttgacggggccacagaggcgggaggaggataacgggagtctggcaggccggcattgcccgcatcacgcagcatgccgggcgccggcaaggcagcaacgaatcctggcagcggcaccccgcagccttctgcttgaacagctcgctaataataatctatgatgcttattcaggagtgaatcccataatagagatatgggttctctcactgacattggagtttctgcgggactaaacatactatctgcagtgggtttccttcttgcatttgctgttctcaggatacaacctattaacgatcgggtgtactttcctaaatggtaccttaaagggacaagaagcagcccaaggcagttgggaaatgttttcttgaagtttgtgaatgcagatttctcaacatatatccggtttctaaactggatgcctgcagcactgaaaatgccagaacctgaacttattgaacatgcgggacttgactctgcggtatacgtccgcatctatcttcttggtttgaaaatatttgtgccaattgcgctactagcatttgctgttctagttcctgtcaattggactagtggaacattggaaaatgaaaagggactaagttatgaccagattgataagctttcaatatcaaatcttggaaaaggttcgaaaaggttttgggcacacatagcgatgtcctatgtgtttacattttggacgttctttgtgttgtatcatgagtataaggttgtgacaacaatgaggttgcgctttcttgctaatcaaaatcgtcgacctgatcaatacacagttcttgtgcgaaatgtacctccagacccagatgaatcagttagtgagcacgttgagcacttctttgctgtgaatcaccgtgatcattaccttagtcaccagattgtatacaatgcaaaccacctttctggcttggttgagaagaaaaaaggcctgcaaaactggttaatctactacgaaaacaaacatgctaaaaaccctgcaaaaaggccaaaaataaagacaggactgtggggtctttggggacaaagagtggatgctatagaatactaccaaaaagaaattgaggatttatgtaaacaggaggatgaggagagacaaaaggtggtcaatgatccaaattatatcatgccagcagcatttgtgtctttcaaaacacagtggggggctgctgtttgtgctcaaacacagcagacaagtaatccaaccgtgtggttaactgagtgggctccagaacctcgtgatgttttctgggctaatctcgcaatcccttttgttgagctctcagttaggaggcttattgtagctgttgccttcttctttctgacctttttcttcatgataccaattgctattgttcagtccttggcaaacctagatgatatcgtcaaggtgcttcctttcttgaaacctataatcgaaagaaattctcttaagtcagttatccaaggcttcttgccaggaatcatattgaaaatctttcttatacttctcccaacaattctaatggccatgagcaagattgaaggacacacatcgctctctggattggacaggaaaacagcaacgaagtactacattttccttttcgtaaatgtattcttggggagtgtaataactggaacagcattccaacaactagacaacttcatacatcagtccgcaaataaaattccagaggttgttggagagtccattcctatgaaggcagcatttttcatgacatacataatggttgatggctggtctggtatagctgctgaagttcttcggttgaaggcattagtcatattccatataaagaatgcgttcttggtcagaacggagcacgaccgtgagcaggccatggatcctggaagcctggatttttacaactgtgaaccacgattacagctgtattttctgcttgggcttgtatatgcagttgtcacgccaatgcttcttcccttcatcatagtgttcttcagccttgcatatcttgttttcagacatcaggatgctatggtaaaggacacattggaacgggcgcatgacccgactttaaatttgagagagtacctaaagggtgcttatgtgcatccagtcttccagaaaaatgatatctacaaggttatcgccgtcgacgaggaagagaagaaccccatggttgtgacaaagaggcaatctcgcatgaacgcaccggccggaagctaattgaattccagttctggtggtactaacgaaggggaattcagttggatgcctcctacctaaagcctgattctttcatgagcaaatagcccagtaatcttgtaaatgtttggggaaaatggaaatacaggaggcagtaggatagtgaaacaggctgtattatatatgatccacaatttattaatttcattagtgattacaattattaataaaaacaaatttacaattatttttttgtttctttgtaattccatacttctatattccttgaagaaaaagtgtaaaaggcaggaacaaaagctgacgaaa

SEQ ID NO: 63059 - DNA, 2310 bp, Zea Mays
aaaatagtaattttcccgctcgcggcttgccactctgcttccgtgcttggcttgctcgctttcctttcccgtctcgactctcgagtctcgactcctcgcattcgccgctgcgtcaacgtgtcttccttcccgcggtctctccgccgcctcccagatccggcggccatggcaaggaacccgggctgcaccgtcttcataggtaacttggatgacaaggttcctgagagggttctgtatgaaattcttattcaggtaggtcgtgttgtagacctacacatacctcgtgacaaggaaactagccgaccaaaaggctatgcttttgctgagtatgaaacagaggagattgcccaatatgctgttaagctattttctggtcttgttcgacttcataataaaacgcttagatttgcggtgcgtttctttttactccctcattttacataagttacattagtgtagctggatagttgaatgttactgtccctttttatggtatataatactccctcaatccctaaatgtttgatattaattagttcaaaattaaactaaccaacgtcaaatatttagggatggggtaggagtatctattactatgtatgtatgtatgtgccggaacttgggactcagattgagcctatccccatatatttttgtacttcactaattgaggcactttcaattactatattctttttagtataagactcaactctgaaataactgtaattttggcagatctctgggcaagacaaaccctcattaaatggcaatatccctgtaactcctaggttaaactctgtaccacagccaaagcctcatcaacctatgaggtctagtgatactcctttgccacagcatgcagcagtgaatggcaggaatgccgggtatggtatcccaccaaatcattcatacgacacgcacactcaagcactgtcgagtgggttaccgaatagaggactaagcaacggtacatatgaatatagtaggcgtgtatttggttctgttctgaatgatgttagccgtcgagctaccagggaaccaatcccgtacccgtcctactagcatgttgagccccggtgactgtgactctgtgctgacagaaaatatttctgaagatgttgtctgttgtgtcagccacctgtaatatctctgtactcaccatttcatgcctgtaaatatgggttatggtggtaggacatatgcttgtttttttggttctgcttcgcattgtagtgagacttgtccctgcttgttaggtccttctcatcccctagtgtgaaggccatgcctccactagtatggctgcactaggaaataccattcctagttacatgaatgggtggcaatatgctggcaattgtgttttaacattagtgccattagctatttcaatgttacagcagggcgtgtttgtgtttgcgatattagtatttggtggattttgtgcttctcatcatgtatctgggacatctgaaggagaaacattgttttaaaagaaaattgtgaaataagtcccacaatttatgatgtttgagtatatgaatatttggttacaagcattcgtgatccgcccaattggctctcagggtgatcaagttataccgtttctgttacctggctgctgtccggtatttgcaagttgacctgttgtcatttccaagttcattagcgtggaagctggtgctgctggattttcacttaactggtgacttatcttgcattgtgataatgccacttcatcctagtcagaaaccagctggctttctgagtggcaaaccagcaggataccacaaatccaccatattgttggtcaagatgggttagatgcacatttctcatcgggttgtatctggaagccccatgactgcgattatgatgagctcatatatctactgaccgttgtatctgtctgtgatttgagctcgtgtacctgcagtaggccgataaaagaatggtaagatatcaatacttctgaagttcgaacttggccaagtcccgttgggatccaaattacaggttgtcggagttcgtaatagacgctcagactatgaaatcaatccgggacagaaaatatgatagtgcaccatttaccattacgatccattttgtattgtgtaagtaatgaacattcatggtgatctgaaccttctgtcagtttttcttttcacagcacacagcagtgcctcaatttgtgtcactacagaattgaaccatcgtctcgagacaataagacaataagggagtgtttggtttaaggaatcactacatttaaaatgaatgagatggtgcatcatgattttattcatc

SEQ ID NO: 63060 - DNA, 2300 bp, Zea Mays
aaaatagtaattttcccgctcgcggcttgccactctgcttccgtgcttggcttgctcgctttcctttcccgtctcgactctcgagtctcgactcctcgcattcgccgctgcgtcaacgtgtcttccttcccgcggtctctccgccgcctcccagatccggcggccatggcaaggaacccgggctgcaccgtcttcataggtaggtcgtgttgtagacctacacatacctcgtgacaaggaaactagccgaccaaaaggctatgcttttgctgagtatgaaacagaggagattgcccaatatgctgttaagctattttctggtcttgttcgacttcataataaaacgcttagatttgcggtgcgtttctttttactccctcattttacataagttacattagtgtagctggatagttgaatgttactgtccctttttatggtatataatactccctcaatccctaaatgtttgatattaattagttcaaaattaaactaaccaacgtcaaatatttagggatggggtaggagtatctattactatgtatgtatgtatgtgccggaacttgggactcagattgagcctatccccatatatttttgtacttcactaattgaggcactttcaattactatattctttttagtataagactcaactctgaaataactgtaattttggcagatctctgggcaagacaaaccctcattaaatggcaatatccctgtaactcctaggttaaactctgtaccacagccaaagcctcatcaacctatgaggtctagtgatactcctttgccacagcatgcagcagtgaatggcaggaatgccgggtatggtatcccaccaaatcattcatacgacacgcacactcaagcactgtcgagtgggttaccgaatagaggactaagcaacggtacatatgaatatagtaggcgtgtatttggttctgttctgaatgatgttagccgtcgagctaccagggaaccaatcccgtacccgtcctactagcatgttgagccccggtgactgtgactctgtgctgacagaaaatatttctgaagatgttgtctgttgtgtcagccacctgtaatatctctgtactcaccatttcatgcctgtaaatatgggttatggtggtaggacatatgcttgtttttttggttctgcttcgcattgtagtgagacttgtccctgcttgttaggtccttctcatcccctagtgtgaaggccatgcctccactagtatggctgcactaggaaataccattcctagttacatgaatgggtggcaatatgctggcaattgtgttttaacattagtgccattagctatttcaatgttacagcagggcgtgtttgtgtttgcgatattagtatttggtggattttgtgcttctcatcatgtatctgggacatctgaaggagaaacattgttttaaaagaaaattgtgaaataagtcccacaatttatgatgtttgagtatatgaatatttggttacatatgactttttgtttgcttgtgctgtatgtctgtcgcagcacaagcattcgtgatccgcccaattggctctcagggtgatcaagttataccgtttctgttacctggctgctgtccggtatttgcaagttgacctgttgtcatttccaagttcattagcgtggaagctggtgctgctggattttcacttaactggtgacttatcttgcattgtgataatgccacttcatcctagtcagaaaccagctggctttctgagtggcaaaccagcaggataccacaaatccaccatattgttggtcaagatgggttagatgcacatttctcatcgggttgtatctggaagccccatgactgcgattatgatgagctcatatatctactgaccgttgtatctgtctgtgatttgagctcgtgtacctgcagtaggccgataaaagaatggtaagatatcaatacttctgaagttcgaacttggccaagtcccgttgggatccaaattacaggttgtcggagttcgtaatagacgctcagactatgaaatcaatccgggacagaaaatatgatagtgcaccatttaccattacgatccattttgtattgtgtaagtaatgaacattcatggtgatctgaaccttctgtcagtttttcttttcacagcacacagcagtgcctcaatttgtgtcactacagaattgaaccatcgtctcgagacaataagacaataagggagtgtttggtttaaggaatcactacatttaaaatgaatgagatggtgcatcatgattttattcatc

SEQ ID NO: 63061 - DNA, 1148 bp, Zea Mays
aaaatagtaattttcccgctcgcggcttgccactctgcttccgtgcttggcttgctcgctttcctttcccgtctcgactctcgagtctcgactcctcgcattcgccgctgcgtcaacgtgtcttccttcccgcggtctctccgccgcctcccagatccggcggccatggcaaggaacccgggctgcaccgtcttcatagatctctgggcaagacaaaccctcattaaatggcaatatccctgtaactcctaggttaaactctgtaccacagccaaagcctcatcaacctatgaggtctagtgatactcctttgccacagcatgcagcagtgaatggcaggaatgccgggtatggtatcccaccaaatcattcatacgacacgcacactcaagcacaagcattcgtgatccgcccaattggctctcagggtgatcaagttataccgtttctgttacctggctgctgtccggtatttgcaagttgacctgttgtcatttccaagttcattagcgtggaagctggtgctgctggattttcacttaactggtgacttatcttgcattgtgataatgccacttcatcctagtcagaaaccagctggctttctgagtggcaaaccagcaggataccacaaatccaccatattgttggtcaagatgggttagatgcacatttctcatcgggttgtatctggaagccccatgactgcgattatgatgagctcatatatctactgaccgttgtatctgtctgtgatttgagctcgtgtacctgcagtaggccgataaaagaatggtaagatatcaatacttctgaagttcgaacttggccaagtcccgttgggatccaaattacaggttgtcggagttcgtaatagacgctcagactatgaaatcaatccgggacagaaaatatgatagtgcaccatttaccattacgatccattttgtattgtgtaagtaatgaacattcatggtgatctgaaccttctgtcagtttttcttttcacagcacacagcagtgcctcaatttgtgtcactacagaattgaaccatcgtctcgagacaataagacaataagggagtgtttggtttaaggaatcactacatttaaaatgaatgagatggtgcatcatgattttattcatc

SEQ ID NO: 63062 - DNA, 1307 bp, Zea Mays
aaaatagtaattttcccgctcgcggcttgccactctgcttccgtgcttggcttgctcgctttcctttcccgtctcgactctcgagtctcgactcctcgcattcgccgctgcgtcaacgtgtcttccttcccgcggtctctccgccgcctcccagatccggcggccatggcaaggaacccgggctgcaccgtcttcataggtaggtcgtgttgtagacctacacatacctcgtgacaaggaaactagccgaccaaaaggctatgcttttgctgagtatgaaacagaggagattgcccaatatgctgttaagctattttctggtcttgttcgacttcataataaaacgcttagatttgcgatctctgggcaagacaaaccctcattaaatggcaatatccctgtaactcctaggttaaactctgtaccacagccaaagcctcatcaacctatgaggtctagtgatactcctttgccacagcatgcagcagtgaatggcaggaatgccgggtatggtatcccaccaaatcattcatacgacacgcacactcaagcacaagcattcgtgatccgcccaattggctctcagggtgatcaagttataccgtttctgttacctggctgctgtccggtatttgcaagttgacctgttgtcatttccaagttcattagcgtggaagctggtgctgctggattttcacttaactggtgacttatcttgcattgtgataatgccacttcatcctagtcagaaaccagctggctttctgagtggcaaaccagcaggataccacaaatccaccatattgttggtcaagatgggttagatgcacatttctcatcgggttgtatctggaagccccatgactgcgattatgatgagctcatatatctactgaccgttgtatctgtctgtgatttgagctcgtgtacctgcagtaggccgataaaagaatggtaagatatcaatacttctgaagttcgaacttggccaagtcccgttgggatccaaattacaggttgtcggagttcgtaatagacgctcagactatgaaatcaatccgggacagaaaatatgatagtgcaccatttaccattacgatccattttgtattgtgtaagtaatgaacattcatggtgatctgaaccttctgtcagtttttcttttcacagcacacagcagtgcctcaatttgtgtcactacagaattgaaccatcgtctcgagacaataagacaataagggagtgtttggtttaaggaatcactacatttaaaatgaatgagatggtgcatcatgattttattcatc

SEQ ID NO: 63063 - DNA, 1982 bp, Zea Mays
gtgagtggcaaaatagtaattttcccgctcgcggcttgccactctgcttccgtgcttggcttgctcgctttcctttcccgtctcgactctcgagtctcgactcctcgcattcgccgctgcgtcaacgtgtcttccttcccgcggtctctccgccgcctcccagatccggcggccatggcaaggaacccgggctgcaccgtcttcataggtaggtcgtgttgtagacctacacatacctcgtgacaaggaaactagccgaccaaaaggctatgcttttgctgagtatgaaacagaggagattgcccaatatgctgttaagctattttctggtcttgttcgacttcataataaaacgcttagatttgcgatctctgggcaagacaaaccctcattaaatggcaatatccctgtaactcctaggttaaactctgtaccacagccaaagcctcatcaacctatgaggtctagtgatactcctttgccacagcatgcagcagtgaatggcaggaatgccgggtatggtatcccaccaaatcattcatacgacacgcacactcaagcactgtcgagtgggttaccgaatagaggactaagcaacggtacatatgaatatagtaggcgtgtatttggttctgttctgaatgatgttagccgtcgagctaccagggaaccaatcccgtacccgtcctactagcatgttgagccccggtgactgtgactctgtgctgacagaaaatatttctgaagatgttgtctgttgtgtcagccacctgtaatatctctgtactcaccatttcatgcctgtaaatatgggttatggtggtaggacatatgcttgtttttttggttctgcttcgcattgtagtgagacttgtccctgcttgttaggtccttctcatcccctagtgtgaaggccatgcctccactagtatggctgcactaggaaataccattcctagttacatgaatgggtggcaatatgctggcaattgtgttttaacattagtgccattagctatttcaatgttacagcagggcgtgtttgtgtttgcgatattagtatttggtggattttgtgcttctcatcatgtatctgggacatctgaaggagaaacattgttttaaaagaaaattgtgaaataagtcccacaatttatgatgtttgagtatatgaatatttggttacatatgactttttgtttgcttgtgctgtatgtctgtcgcagcacaagcattcgtgatccgcccaattggctctcagggtgatcaagttataccgtttctgttacctggctgctgtccggtatttgcaagttgacctgttgtcatttccaagttcattagcgtggaagctggtgctgctggattttcacttaactggtgacttatcttgcattgtgataatgccacttcatcctagtcagaaaccagctggctttctgagtggcaaaccagcaggataccacaaatccaccatattgttggtcaagatgggttagatgcacatttctcatcgggttgtatctggaagccccatgactgcgattatgatgagctcatatatctactgaccgttgtatctgtctgtgatttgagctcgtgtacctgcagtaggccgataaaagaatggtaagatatcaatacttctgaagttcgaacttggccaagtcccgttgggatccaaattacaggttgtcggagttcgtaatagacgctcagactatgaaatcaatccgggacagaaaatatgatagtgcaccatttaccattacgatccattttgtattgtgtaagtaatgaacattcatggtgatctgaaccttctgtcagtttttcttttcacagcacacagcagtgcctcaatttgtgtcactacagaattgaaccatcgtctcgagacaataagacaataagggagtgtttggtttaaggaatcactacatttaaaatgaatgagatggtgcatcatgattttattcatc

SEQ ID NO: 63064 - DNA, 1900 bp, Zea Mays
ctgatgccctccactttaaaacaagaaagaacgttacatcacgcacacacgcgcaccaaagccaagcgcccaagcccagcactcgacaccaccacagcgcgcagccacgctcacgcacaccgagctgcgggagtggagtagtggaccgatggggagcagcgggggcagcagcgagcacttcctgcggcagctgagttcgagcgacggcggcagcgcgccgcaccatctgctgcagcgagagtgggagtgcggcggcgtcaccggcagcggcagcaggcgcgggtcgcggaagaagaccagggcgcggggacaccgccgccgcggcggcgggttctgcagggcggaggaggctgcgccggggcggaagcgggtaatggtggtggtggaccagagctccggcgccaagcacgccatgttgtgggcgctcacccacgtggccaacaagggcgacttcctcaccctgctccacgtcctgccgccggagagcggccacagcagccgcggtgctgcggaggacgcctccgcgctcgccaactccctcggcgcgctttgcaaggcctgcaagcctgaggtcgaggtggaggcgcttgtgatccaggggcccaagctgccgaccatcctcagccaggtgaagaagctggaggcgtccgtgctggtgctgagccaacgcagcccctcgcctttctgctgcttcccgcggagcagcagcgaggagcttgtggaggagtgcatcgaccgggcggagtgcctgacgctggcggtgcggcggcagagcaagggcgtcggcggctacctcgtcagcacccggtggcagaagaacttctggctcctcgcgtgatccacaaccatatatttccccccttctttggaaggcgttcggtttgagtttgaaagcatgggatggaacggaacgggctgggaaatggcgtttggttcagggatacgaggtttgggaattgggatcgcctacaggagtgagcgtgtttccatggattcgggaataacgtacctaatccctgcaggtcggagggacgggatagtcctctatatatgaacgtcgtttcttccgtcatcagtcttcttcctcgcgtccgtgtgtcctcttcttcttcctcgccagttgtctctcatcctgtttctctcaacgtcttaatatgctctccaggacgctggaagcaaacgaacttgctttgatgtcaaaactaggccctggcattttgctggtagtacaactaattagcaccaaactgctaattgtagttactacagctacaataggacggcaacctcgtttaaacccttgccctcctcgacctggcccaggttcattaacacgcaacagtgactgcttcacatcagccaggctcctaaacacgcaacgcagggtgccccgtccccaccgagacgagaccctagccgaggatccgagaacaaaccgtatcggcatcgggacgccgacggatggacgcggcgacaaatccgccagggagtcagggaaaattgcaatcttcttcactgccgcgcagggcacaattatggccgcggagatggacgggagacggctggtcgaccgcgcgcccgttccctctcggcattcgcgggcgccatgatggtgcgggtcgtaccgggcgactggtgcggcgaggcgaggcgaggatggtggcactacgtagctcctgggcacaggcttttgccaccacgggtgcaggctggttcatcatgaaacatcattcccgggacttgaaggtgccgctccgccgacccgatttcatggcggcagttacgcttcccggagtcgtgaactcgtgatggtgtacactgtaccttttgatctcctgctgtaagatgaagaagatagaagaggcgatatgaaaaaaaagaaaagaaaattccaccaaac

SEQ ID NO: 63065 - DNA, 700 bp, Zea Mays
ctttaaaacaagaaagaacgttacatcacgcacacacgcgcaccaaagccaagcgcccaagcccagcactcgacaccaccacagcgcgcagccacgctcacgcacaccgagctgcgggagtggagtagtggaccgatggggagcagcgggggcagcagcgagcacttcctgcggcagctgagttcgagcgacggcggcagcgcgccgcaccatctgctgcagcgagagtgggagtgcggcggcgtcaccggcagcggcagcaggcgcgggtcgcggaagaagaccagggcgcggggacaccgccgccgcggcggcgggttctgcagggcggaggaggctgcgccggggcggaagcgggtaatggtggtggtggaccagagctccggcgccaagcacgccatgttgtgggcgctcacccacgtggccaacaagggcgacttcctcaccctgctccacgtcctgccgccggagagcggccacagcagccgcggtgctgcggaggacgcctccgcgctcgccaactccctcggcgcgctttgcaaggcctgcaagcctgaggtcgaggtggaggcgcttgtgatccaggggcccaagctgccgaccatcctcagccaggtgaagaagctggaggcgtccgtgctggtgctgagccaacgcagcccctcgcctttctgctgttgtttctctagctacggctagt

SEQ ID NO: 63066 - DNA, 3556 bp, Zea Mays
tttcctttctcctttctctgccggcccagctatattttcttcgcgtaattcccccgtccaggcgtccagcacgctccagcgtaccacaagccgcgcatccaagctagtcctagatatagcacactagttgctgggcagcagcaggaagtcgcagcgttgcgtgatgaagaacaacccgagcttcgagaacacgtgcagcgccgccgccggcgggtccggctctggctccttcaacgtccggaacctgtccaaggtcatcctcccgccgctcggcgggccgtccggccagagccagtcccatggcgggtcggacaagtgggtcatctcgccgctcgactccagatacaggtggtgggacacgttgatggtagtcctggtggcgtactcggcgtgggtgtacccgttcgaggtggccttcatgaacgcgtccccgaagggcgggctggaggtggcggacatggtcgtggacctcttcttcgccgtcgacatcgtgctcaccttcttcgtcgcctacatcgaccccaggacccagctgctcgtccgcgacaggaagaagataaccctcaggtgtggattttaaaatcaagttccttacagttggtggaaagaaactaaagttgacaatatgggatactgtttggtatcttcatcagaacttgctggacattccaatgtttgctgctaaatgcttctgtttttactcattttagaattccacccttttctgctatcattactgttagtggtttgagaatcaaggtttgcttttcagctaatatatttggtttcttcttccacgcctgtccttacatcatggctattggggtttcttattcacagattttagctcgacattgctgctttgtgcctaaaatatttggctactttcgccatgttagccctcacatctctaaatcattgtgaccctacgttccaatattattaaaagttttcttgtttagccccaccaactcattttgcccaaaggtatctaggtgcttcaccatgttacctctgtctactactgctagaacttgaaggtttctaagttatctattaacgacataaattatgttaccttgttttctgatattttcaatattccaaaaacttggagtccatcgtgtgctttttgtttatgtttatttgtgggttggatctctcaagagctcgtggttgcactgtagcctgttgaggcgtgcctgccatcaagctggccaggagaggtttaggacaataactagttcttactacagaggtgctcagggaattattttaggtacctgtcgacgttcttcatcatggacgtggcatcgacgatcccgttccagagccttgcctacctcatcaccggcgaggtcagggagaacgccgcgtacagcatgctgggcgtcctacgcctctggcggctccgcagggtcaagcagttgttcaccaggctcgagaaagacatccgcttcagctacttctggatccgcagcgcgcgtctaatcgcggtgaccttgttcctggtccactgcgccgggtgcctgtactacctgatcgccgaccggtacccggacagggagaagacgtggatcggcgcggtgaaccccaacttccggcaggctagtctgcggatccgctacatctcctccgtctactggtccatcaccaccatgaccacagtcggctacggcgacctgcacgcccagaacaccgtcgagatgatcttcaacatattctacatgctcttcaacctcgggctcaccgcctacctcatcggcaacatgaccaacctcgtcgtcgagggcacccgccgcactatggagtttaggaacagcgtaaggacagcgtcgagtttcgtgggccggaaccacctgccgccgcggctgaagcagcagatcctggcctacatgtgcctcaagttcagggcggagagcctgaaccagcagcagctcatggaccagctgcccaagtccatctgcaagagcatctgcgagcacctcttcgtgccggtcgtcaaggatgtctacctgttcaagggtgtctcaagggaaatgctgctgtccctggccaccaagatgaagccggagtacatcccgcccaaggaagacgtgatcgtgcagaacgaggctccggacgacgtgtacgtcgtcgtctctggcgaggtggaggtcgtactgttcgacggcgtcgacgagcgggtggaggcgacgctggggacgcgcaacatcttcggcgaggtgagcgcgctgagcgaccggccgcaggcgcccttcacgttccggacgaggacgctgagccagctgctgcggctgaagcaggccacgctcaaggaggccatgcagagctggcccgacgacagcgtcatcatcatcaagaattacgtcaagcatcaggtcgagatgcatggcatgaaagccgatgactcgctgggagacaacactagcgagcacgacgacgacgcgaatgtgctcacagtcgccgcgatgggaaacagcggcttactcgaagacctcctcagggcagggaaggacgctgacgtcggtgacgccatgggcagaacagcattgcacatcgcggcgtctaaggggtacgaggactgcgtgctggtgctgctcaagcacgcgtgcaacgccaacatcagggacgcgcagggcaacacggcgatgtggaacgccatcgcggcggggcaccacaagatcttcaacatcctgtaccactccgcgcgcgcgtcgaaccctcacgccggcggagacgtcatgtgcctcgccacgcggcgcggcgacctcgacgcgctccgggagctcctcaagctcggccttgacgtggactcggaggaccacgatggcgccactgcgctgcgcgtcgcgatggccgagggccacgcggacgcggcaaggttcctgatcacgaacggggccagcgtggacaaggcgagcctcgacgacgacggctccggctccggcgccgcgcggcttacaatgtcgccgacagagctgcacgagctgctgcagaagcgggagctcgtccactcgataaccatcactgactcgccaccggtggtcccggacggcggctcgtcggggcacagccgtccgggcagattacagagcacaggctcggacaacacgcgctggcctcgggtgagcatatacaggggccacccgttcctcagaaaccgcagctctgaagctggcaagctgatcaatctgccagccaccatggaagaattcatagccgtcgtcggtgagaaattgaaggttgatacggagaaggcgctgattgtgaacgacgaaggagcggaggtcgactcgatcgacgtgatccgggacaacgacaagctgttcgtggtcaccgaagaagatctgacgcggctggcaccaatggactcggtgccttcgtcatagcatttgtagattcaggtttttccgtagcaagtcacacggtagatgtgcacccaactaacaaaatgtgtattcctcggggtctcaagatagtcaatatttcatgtttttaaatacaactttttaaattttgatcgaatatatacagaaatactaaactttatggt

SEQ ID NO: 63067 - DNA, 861 bp, Zea Mays
gtgaaactcgtggccgtagattattattgcttgctgcgttggatgtttaggtacttactaatggaatagaggtaaagctgcagcggaatgctttaagtgtgattgaacctccgacaggcaacgaggatgatgataaatttgattgtgaaaacctgcggtggaatagttcagacttggtctccgatgatgcacaatcaccaaagccacaaaggtcaaggagcaggcagcataggggtttccacagaaaatcctttagccgttcaatgtcatgtgactcccaatctaagacgtctgtttcatcttcctcgagagctcacacgaaagttgacctgagcaagttagaactgactgcactgttgagatattggcgccacttcaatctcgatgcatgccctaatccatccagggagcagttagttgatgctgttcaaaggcacttcacggcccaggtcattgtcagctttgtgcaagctgcaaagaggctgaagacaactatgaaagtggcctgacagtgaagcatgaagttcaactaacagattcaagataggatgcagcatgtttgatgaatgttgccgtgctatgtaatatatatgcatgaagttctttagattcaggtggtaatggacaactagactatgttagcctcatctgatgtagatatgcagtatcctgtctaaagatgtttcaacctctagctcagttctttcctgctgactggatgtgaatcgaaatggcaagcttaaaacaagttctttttgtcatccttttcgaagtttcattatatttagcccatgcttttcccaaattgcatgcagaactaatcaggaatgcagaatatggtgcctaaaagtgccagagaat

SEQ ID NO: 63068 - DNA, 2850 bp, Zea Mays
atcccctttcatctccaagccgaaaaaacacccacagaaccctaccctcccgagtcccgaccccgtcctgctcgctccgccgtccttcgcccgccacccgccacccgccggactgccaaagcccggaggcctgaggcccgagttacgcgaggagcagccgaaccagcggcccggcgcctcatccctcagcggccccgcccctggggccgtgtagtcagcaagcggccacgcgagtgcgcggtcggcgcggagtgagcaggagcaacccgtggctggcggtcagtcggtggctagctggagcctggagttgcgacttgcgagcggcgttagaactcgctccacctataatttttgtgtggctccgtcactgattccacccgttctgtggccggcgacagaggcacagagaagcgccaatccgccggcttgatctgaagcatggacaggccctcatcaccggtcgttgctggttctgccctctgttgctgaagatcgtgaccatggaactcgcgtcgtcgtcctagagctcctcgcgatgttgctgctccaggctgccatcctcatgtcaacggtggagggccttgtgcggatcgtgcaagaagctccacaagttcctcatcaataagatcagtttgaggcttggccatgcctttaaatatagatattgatctgttcaagctggatattgatgagctgatagctgattattccaaggagaactgtacgtcactctttgaattcaaacgagtatggatgggcaagaaattttcttatatctatgaaggcaggcctaagacaaactcgggtttattcatgcagtccctctttctgcattgtattggttatttgacttctcaaagttcactgcaccaaagattggctgggctatactgcctttactgtctgtatgagtgccagccatacaagccgcagttcaagatttacttgtctcttgaggagtgcaggcaactgaaagatatcgttgttatggcgaagcaaaatggactgcagctcgtgcctgcacttgtcaaaaggatgctggataaagacatgtttttgtttggctacatgaatttgatcgacgacaacggggacaagcaggtcgaggaattgaccgcattgcagaacaagcgagtaaaatttgcatgtgacaagttatttgcaaatacccaagcagaaagatatttgcacatggacttgggtgctgagttcgagcttgatagcatcaagaaattgtcaaaggagtatgcagaagcaaaggaactggcccttgcagaggcaagccaaactgtcgaagttgacgatgctaagcacctccttcagagtgagaggctgttgggcgacaagatagatgaagtcgtcaaagaatgggatgtccagaaggaggggttctacgagaggacaggattatcctcatcccctggcgaccagctcatggccatcgacaacgatgaatcaggagctcaatgtcacgaggatggatcccgtggcgatcagctcatggcggtcgacaatgatgaatcgggagtacaggatcacgaggacctcgacgacgacgacggctttgccgagttagaactgctgctagaatgaagaacatatacaagtctgtaaactcttactaccgccgtataaccgtgtaatcagaacaccgagagatgtaatcctcgctcgtctttactagcctctcctttttaggtgccagaccttctgttcatctacactggctgcagtaactgtacattgaaataatccagtgcgccagcctatgcaggggagaaaagaaagaggtgagcttgagtaaaaatgtacatgaacagtgacaagaaaaaaaaacgctggctgcagtaattgtgcatttaaacgatacagtgtgccagactatgcagggtgaaaattggtggacctgagtaaaaaatgtaagtgaacagtgacgaaaaaacgcaaaaaatagggaaacagaaaaaaactttccattgccgggatttgaacccgggtcgtctgggtgaaagccagatatcctaaccggactagacgacaatggaatcgttgaaggagtgcccaactaattctaatagttgattgcatctcaaccagacgtcccatctacgcagaaaatgcaatgccgtattttgtcaaaaacacagccagagtccgcagcagagctcaactttgcgagaggggtagagctcctccgaagaagatccggagtcagccagaaagaaagaaaacaaaaacagagaagcaatttgcaagtaggcaggtgcaatgggaaaaaaaggagagagagagagagagaggaaggaacaacctccctggttttttcgttcttgttattctatctaatgaaaagcacgagagagagaagatagagagaacgagaaggcaaaacagcacgtacgcatggtctgcgtctgttaagcccaagctgggcgtggccgctgtcgaagaggagaggagaggtctcctgcatcggggcgaacgactgggaaggaagccagacaggctagggcgacgcgagagctagctcgacaaggttcaagatttcctcagattcaatgatacggtcctcctccatgcacacttgcacagggccacaggcacagctaacacagcggttggtggtagctggtagtagttcatccgtgctccttgctgtctgctgtggtggcctcgctgagtcgcaggacgacctccatggctccatggccctgccccgcctgcactgcaacggccaacggcaacctcatgtgatgactgatgagtgactatactactgagtactgacagtggccccacgaatgctccctcggtccctccctccctccatccacctgctttccatgcaaa

SEQ ID NO: 63069 - DNA, 1297 bp, Zea Mays
atcccctttcatctccaagccgaaaaaacacccacagaaccctaccctcccgagtcccgaccccgtcctgctcgctccgccgtccttcgcccgccacccgccacccgccggactgccaaagcccggaggcctgaggcccgagttacgcgaggagcagccgaaccagcggcccggcgcctcatccctcagcggccccgcccctggggccgtgtagtcagcaagcggccacgcgagtgcgcggtcggcgcggagtgagcaggagcaacccgtggctggcggtcagtcggtggctagctggagcctggagttgcgacttgcgagcggcgttagaactcgctccacctataatttttgtgtggctccgtcactgattccacccgttctgtggccggcgacagaggcacagagaagcgccaatccgccggcttgatctgaagcatggacaggccctcatcaccggtcgttgctggttctgccctctgttgctgaagatcgtgaccatggaactcgcgtcgtcgtcctagagctcctcgcgatgttgctgctccaggctgccatcctcatgtcaacggtggagggccttgtgcggatcgtgcaagaagctccacaagttcctcatcaataagatcagtttgaggcttggccatgcctttaaatatagatattgatctgttcaagctggatattgatgagctgatagctgattattccaaggagaactgtacgtcactctttgaattcaaacgagtatggatgggcaagaaattttcttatatctatgaaggcaggcctaagacaaactcgggtttattcatgcagtccctctttctgcattgtattggttatttgacttctcaaagttcactgcaccaaagattggctgggctatactgcctttactgtctgtatgagtgccagccatacaagccgcagttcaagatttacttgtctcttgaggagtgcaggcaactgaaagatatcgttgttatggcgaagcaaaatggactgcagctcgtgcctgcacttgtcaaaaggatgctggataaagacatgtttttgtttggctacatgaatttgatcgacgacaacggggacaagcaggtcgaggaattgaccgcattgcagaacaagcgagtaaaatttgcatgtgacaagttatttgcaaatacccaagcagaaagatatttgcacatggacttgggtgctgagttcgagcttgatagcatcaagaaattgtcaaaggagtatgcagaagcaaaggaactggcccttgcagtgacgaaaaaacgcaaaaaat

SEQ ID NO: 63070 - DNA, 1587 bp, Zea Mays
ctttcatctccaagccgaaaaaacacccacagaaccctaccctcccgagtcccgaccccgtcctgctcgctccgccgtccttcgcccgccacccgccacccgccggactgccaaagcccggaggcctgaggcccgagttacgcgaggagcagccgaaccagcggcccggcgcctcatccctcagcggccccgcccctggggccgtgtagtcagcaagcggccacgcgagtgcgcggtcggcgcggagtgagcaggagcaacccgtggctggcggtcagtcggtggctagctggagcctggagttgcgacttgcgagcggcgttagaactcgctccacctataatttttgtgtggctccgtcactgattccacccgttctgtggccggcgacagaggcacagagaagcgccaatccgccggcttgatctgaagcatggacagggagaactgtacgtcactctttgaattcaaacgagtatggatgggcaagaaattttcttatatctatgaaggcaggcctaagacaaactcgggtttattcatgcagtccctctttctgcattgtattggttatttgacttctcaaagttcactgcaccaaagattggctgggctatactgcctttactgtctgtatgagtgccagccatacaagccgcagttcaagatttacttgtctcttgaggagtgcaggcaactgaaagatatcgttgttatggcgaagcaaaatggactgcagctcgtgcctgcacttgtcaaaaggatgctggataaagacatgtttttgtttggctacatgaatttgatcgacgacaacggggacaagcaggtcgaggaattgaccgcattgcagaacaagcgagtaaaatttgcatgtgacaagttatttgcaaatacccaagcagaaagatatttgcacatggacttgggtgctgagttcgagcttgatagcatcaagaaattgtcaaaggagtatgcagaagcaaaggaactggcccttgcaggtgcctgtccattgccattgtcggatatgtgcattttccttctcctttacagtgagaggctgttgggcgacaagatagatgaagtcgtcaaagaatgggatgtccagaaggaggggttctacgagaggacaggattatcctcatcccctggcgaccagctcatggccatcgacaacgatgaatcaggagctcaatgtcacgaggatggatcccgtggcgatcagctcatggcggtcgacaatgatgaatcgggagtacaggatcacgaggacctcgacgacgacgacggctttgccgagttagaactgctgctagaatgaagaacatatacaagtctgtaaactcttactaccgccgtataaccgtgtaatcagaacaccgagagatgtaatcctcgctcgtctttactagcctctcctttttaggtgccagaccttctgttcatctacactggctgcagtaactgtacattgaaataatccagtgcgccagcctatgcaggggagaaaagaaagaggtgagcttgagtaaaaatgtacatgaacagtgacaagaaaaaaaaacgctggctgcagtaattgtg

SEQ ID NO: 63071 - DNA, 1492 bp, Zea Mays
ctttcatctccaagccgaaaaaacacccacagaaccctaccctcccgagtcccgaccccgtcctgctcgctccgccgtccttcgcccgccacccgccacccgccggactgccaaagcccggaggcctgaggcccgagttacgcgaggagcagccgaaccagcggcccggcgcctcatccctcagcggccccgcccctggggccgtgtagtcagcaagcggccacgcgagtgcgcggtcggcgcggagtgagcaggagcaacccgtggctggcggtcagtcggtggctagctggagcctggagttgcgacttgcgagcggcgttagaactcgctccacctataatttttgtgtggctccgtcactgattccacccgttctgtggccggcgacagaggcacagagaagcgccaatccgccggcttgatctgaagcatggacagggagaactgtacgtcactctttgaattcaaacgagtatggatgggcaagaaattttcttatatctatgaaggcaggcctaagacaaactcgggtttattcatgcagtccctctttctgcattgtattggttatttgacttctcaaagttcactgcaccaaagattggctgggctatactgcctttactgtctgtatgagtgccagccatacaagccgcagttcaagatttacttgtctcttgaggagtgcaggcaactgaaagatatcgttgttatggcgaagcaaaatggactgcagctcgtgcctgcacttgtcaaaaggatgctggataaagacatgtttttgtttggctacatgaatttgatcgacgacaacggggacaagcaggtcgaggaattgaccgcattgcagaacaagcgagtaaaatttgcatgtgacaagttatttgcaaatacccaagcagaaagatatttgcacatggacttgggtgctgagttcgagcttgatagcatcaagaaattgtcaaaggagtatgcagaagcaaaggaactggcccttgcagaggcaagccaaactgtcgaagttgacgatgctaagcacctccttcagagtgagaggctgttgggcgacaagatagatgaagtcgtcaaagaatgggatgtccagaaggaggggttctacgagaggacaggattatcctcatcccctggcgaccagctcatggccatcgacaacgatgaatcaggagctcaatgtcacgaggatggatcccgtggcgatcagctcatggcggtcgacaatgatgaatcgggagtacaggatcacgaggacctcgacgacgacgacggctttgccgagttagaactgctgctagaatgaagaacatatacaagtgccagaccttctgttcatctacactggctgcagtaactgtacattgaaataatccagtgcgccagcctatgcaggggagaaaagaaagaggtgagcttgagtaaaaatgtacatgaacagtgacaagaaaaaaaaacgctggctgcagtaattgtg

SEQ ID NO: 63072 - DNA, 1773 bp, Zea Mays
atcccctttcatctccaagccgaaaaaacacccacagaaccctaccctcccgagtcccgaccccgtcctgctcgctccgccgtccttcgcccgccacccgccacccgccggactgccaaagcccggaggcctgaggcccgagttacgcgaggagcagccgaaccagcggcccggcgcctcatccctcagcggccccgcccctggggccgtgtagtcagcaagcggccacgcgagtgcgcggtcggcgcggagtgagcaggagcaacccgtggctggcggtcagtcggtggctagctggagcctggagttgcgacttgcgagcggcgttagaactcgctccacctataatttttgtgtggctccgtcactgattccacccgttctgtggccggcgacagaggcacagagaagcgccaatccgccggcttgatctgaagcatggacaggccctcatcaccggtcgttgctggttctgccctctgttgctgaagatcgtgaccatggaactcgcgtcgtcgtcctagagctcctcgcgatgttgctgctccaggctgccatcctcatgtcaacggtggagggccttgtgcggatcgtgcaagaagctccacaagttcctcatcaataagatcaggagaactgtacgtcactctttgaattcaaacgagtatggatgggcaagaaattttcttatatctatgaaggcaggcctaagacaaactcgggtttattcatgcagtccctctttctgcattgtattggttatttgacttctcaaagttcactgcaccaaagattggctgggctatactgcctttactgtctgtatgagtgccagccatacaagccgcagttcaagatttacttgtctcttgaggagtgcaggcaactgaaagatatcgttgttatggcgaagcaaaatggactgcagctcgtgcctgcacttgtcaaaaggatgctggataaagacatgtttttgtttggctacatgaatttgatcgacgacaacggggacaagcaggtcgaggaattgaccgcattgcagaacaagcgagtaaaatttgcatgtgacaagttatttgcaaatacccaagcagaaagatatttgcacatggacttgggtgctgagttcgagcttgatagcatcaagaaattgtcaaaggagtatgcagaagcaaaggaactggcccttgcagaggcaagccaaactgtcgaagttgacgatgctaagcacctccttcagagtgagaggctgttgggcgacaagatagatgaagtcgtcaaagaatgggatgtccagaaggaggggttctacgagaggacaggattatcctcatcccctggcgaccagctcatggccatcgacaacgatgaatcaggagctcaatgtcacgaggatggatcccgtggcgatcagctcatggcggtcgacaatgatgaatcgggagtacaggatcacgaggacctcgacgacgacgacggctttgccgagttagaactgctgctagaatgaagaacatatacaagtctgtaaactcttactaccgccgtataaccgtgtaatcagaacaccgagagatgtaatcctcgctcgtctttactagcctctcctttttaggtgccagaccttctgttcatctacactggctgcagtaactgtacattgaaataatccagtgcgccagcctatgcaggggagaaaagaaagaggtgagcttgagtaaaaatgtacatgaacagtgacaagaaaaaaaaacgctggctgcagtaattgtg

SEQ ID NO: 63073 - DNA, 1679 bp, Zea Mays
ctgcccaatcccctttcatctccaagccgaaaaaacacccacagaaccctaccctcccgagtcccgaccccgtcctgctcgctccgccgtccttcgcccgccacccgccacccgccggactgccaaagcccggaggcctgaggcccgagttacgcgaggagcagccgaaccagcggcccggcgcctcatccctcagcggccccgcccctggggccgtgtagtcagcaagcggccacgcgagtgcgcggtcggcgcggagtgagcaggagcaacccgtggctggcggtcagtcggtggctagctggagcctggagttgcgacttgcgagcggcgttagaactcgctccacctataatttttgtgtggctccgtcactgattccacccgttctgtggccggcgacagaggcacagagaagcgccaatccgccggcttgatctgaagcatggacaggtttgaggcttggccatgcctttaaatatagatattgatctgttcaagctggatattgatgagctgatagctgattattccaaggagaactgtacgtcactctttgaattcaaacgagtatggatgggcaagaaattttcttatatctatgaaggcaggcctaagacaaactcgggtttattcatgcagtccctctttctgcattgtattggttatttgacttctcaaagttcactgcaccaaagattggctgggctatactgcctttactgtctgtatgagtgccagccatacaagccgcagttcaagatttacttgtctcttgaggagtgcaggcaactgaaagatatcgttgttatggcgaagcaaaatggactgcagctcgtgcctgcacttgtcaaaaggatgctggataaagacatgtttttgtttggctacatgaatttgatcgacgacaacggggacaagcaggtcgaggaattgaccgcattgcagaacaagcgagtaaaatttgcatgtgacaagttatttgcaaatacccaagcagaaagatatttgcacatggacttgggtgctgagttcgagcttgatagcatcaagaaattgtcaaaggagtatgcagaagcaaaggaactggcccttgcagaggcaagccaaactgtcgaagttgacgatgctaagcacctccttcagagtgagaggctgttgggcgacaagatagatgaagtcgtcaaagaatgggatgtccagaaggaggggttctacgagaggacaggattatcctcatcccctggcgaccagctcatggccatcgacaacgatgaatcaggagctcaatgtcacgaggatggatcccgtggcgatcagctcatggcggtcgacaatgatgaatcgggagtacaggatcacgaggacctcgacgacgacgacggctttgccgagttagaactgctgctagaatgaagaacatatacaagtctgtaaactcttactaccgccgtataaccgtgtaatcagaacaccgagagatgtaatcctcgctcgtctttactagcctctcctttttaggtgccagaccttctgttcatctacactggctgcagtaactgtacattgaaataatccagtgcgccagcctatgcaggggagaaaagaaagaggtgagcttgagtaaaaatgtacatgaacagtgacaagaaaaaaaaacgctggctgcagtaattgtg

SEQ ID NO: 63074 - DNA, 2050 bp, Zea Mays
gtcaacacaagtacacaccacaaacacccatctcctccgcctctgctcccttctgctcacccgcacgatggcgccggaggcgcgaggtgaggcggcgctggtgtacagagacgcattggcgccagtggaggaaagggtgcgagacctgctgggccgcatgacgctgcgtgagaaggcagcgcagatggcccagatcgagcgcaccgtcgcgacgccgcgagccctcacggagctcggggctggcagcgttctcaacgccgggggaagcacgccctgcgagcaagcctcccccgccgactgggccgccatggtcgacggcttccagcgccttgcgatctcctcccgcctcggcgtccccatcctctacggcactgacgccatccacggacacaacaacgtctacggcgccaccgttttcccccacaacgtcggtctcggcgcctgcagggacggagagctcgcgcgtaggatcggcgaggcgacggcgctcgaggttcgcgccactggcatccactggacctttgcgccgtgcgtcgccgtctgtcgggatcctaggtggggcagatgctacgaaagctacagcgaggacccagagatcgtgcgctcgttgaccaccatcgtcagcggtttgcaggggcagccgccagcagaccatcctcatggttaccccttcctcgcttcgcctagggagaatgtacttgcttgtgctaaacatttcgtaggggatggtggcacggacaagggggtcaatgaggggaacgccatttgctcctatgaggatttggaagcaatccatatgacaccttacccggattgtatagctcaaggggtggcaacagtaatggcgtcctactctaagtggaatggggagccattgcattcaagtcgctacttgttaacagatgttctgaagggcaagttaggctttaagggttttctcatttcagattgggagggcattgacaggatctgtgagccacaaaagcctcgagggtctgattatcgctattgcattgcacaatcagtaaatgcaggaatggacatggtttgagaaatttttggatgatattgtgttcttggtggaggcgggggagataccaatgtctcggattgatgatgctgttgaacgaattctgagggttaagtttatttctggagtgtttgagcatccattttcagaccaatctctactggacatagttggttgtaaggaacatcggttactagcgcgtgaggctgttcgcaagtctttggtacttctgaaaaatggcaaggatcagaataagccattccttccattggccaaagatgcaaaaagaatactggttgcaggaacacatgctgatgatattggatatcaatgtggtggctggacgatagcatggcatggagacagtggaaaaataactcttggtacgagcatattggaggccatacaagaattagtgggagtgcaaactgaagttgtgtatgagaaatgcccaaccgaagctatgattgaaactggggggttttcctatgcggtggtggttgttggagaggttccatatgccgaatgggacaggagatagaactgaccttagtattccgtttaatggctctgaccttatcatccgtgttgcaagtaaaatccctaccctagtgattgttatatctggaaggccattaattattgagtcacaagttttggaaaagatagaagctctagtcgctgcctggctgcctggaagtgagggcatgggaattaccgattgcctctttggagatcatgattttgtgggcacattgcctgtgacatggtgtaagtctgttgatcaattgcctatagatgctggagactctaactatgacccgctattccctgttggatatgggctaaaaatgtttcgaagcgataatgattcaacataactttattatttattgggtacatttgaatctttgtgatgttaaatactctgtatttattggctattggaacttaaaatgaaataatatattgttgtagtatgcattgtactgttttgaatacattattcttcccttagat

SEQ ID NO: 63075 - DNA, 2054 bp, Zea Mays
gtccaatcccctcccaatcggtcaacacaagtacacaccacaaacacccatctcctccgcctctgctcccttctgctcacccgcacgatggcgccggaggcgcgaggtgaggcggcgctggtgtacagagacgcattggcgccagtggaggaaagggtgcgagacctgctgggccgcatgacgctgcgtgagaaggcagcgcagatggcccagatcgagcgcaccgtcgcgacgccgcgagccctcacggagctcggggctggcagcgttctcaacgccgggggaagcacgccctgcgagcaagcctcccccgccgactgggccgccatggtcgacggcttccagcgccttgcgatctcctcccgcctcggcgtccccatcctctacggcactgacgccatccacggacacaacaacgtctacggcgccaccgttttcccccacaacgtcggtctcggcgcctgcagggacggagagctcgcgcgtaggatcggcgaggcgacggcgctcgaggttcgcgccactggcatccactggacctttgcgccgtgcgtcgccgtctgtcgggatcctaggtggggcagatgctacgaaagctacagcgaggacccagagatcgtgcgctcgttgaccaccatcgtcagcggtttgcaggggcagccgccagcagaccatcctcatggttaccccttcctcgcttcgcctagggagaatgtacttgcttgtgctaaacatttcgtaggggatggtggcacggacaagggggtcaatgaggggaacgccatttgctcctatgaggatttggaagcaatccatatgacaccttacccggattgtatagctcaaggggtggcaacagtaatggcgtcctactctaagtggaatggggagccattgcattcaagtcgctacttgttaacagatgttctgaagggcaagttaggctttaagattgggagggcattgacaggatctgtgagccacaaaagcctcgagggtctgattatcgctattgcattgcacaatcagtaaatgcaggaatggacatggtttgagaaatttttggatgatattgtgttcttggtggaggcgggggagataccaatgtctcggattgatgatgctgttgaacgaattctgagggttaagtttatttctggagtgtttgagcatccattttcagaccaatctctactggacatagttggttgtaaggaacatcggttactagcgcgtgaggctgttcgcaagtctttggtacttctgaaaaatggcaaggatcagaataagccattccttccattggccaaagatgcaaaaagaatactggttgcaggaacacatgctgatgatattggatatcaatgtggtggctggacgatagcatggcatggagacagtggaaaaataactcttggtacgagcatattggaggccatacaagaattagtgggagtgcaaactgaagttgtgtatgagaaatgcccaaccgaagctatgattgaaactggggggttttcctatgcggtggtggttgttggagaggttccatatgccgaatgggacaggagatagaactgaccttagtattccgtttaatggctctgaccttatcatccgtgttgcaagtaaaatccctaccctagtgattgttatatctggaaggccattaattattgagtcacaagttttggaaaagatagaagctctagtcgctgcctggctgcctggaagtgagggcatgggaattaccgattgcctctttggagatcatgattttgtgggcacattgcctgtgacatggtgtaagtctgttgatcaattgcctatagatgctggagactctaactatgacccgctattccctgttggatatgggctaaaaatgtttcgaagcgataatgattcaacataactttattatttattgggtacatttgaatctttgtgatgttaaatactctgtatttattggctattggaacttaaaatgaaataatatattgttgtagtatgcattgtactgttttgaatacattattcttcccttagat

SEQ ID NO: 63076 - DNA, 2015 bp, Zea Mays
gtttccctcgtgtgtactagtccaatcccctcccaatcggtcaacacaagtacacaccacaaacacccatctcctccgcctctgctcccttctgctcacccgcacgatggcgccggaggcgcgaggtgaggcggcgctggtgtacagagacgcattggcgccagtggaggaaagggtgcgagacctgctgggccgcatgacgctgcgtgagaaggcagcgcagatggcccagatcgagcgcaccgtcgcgacgccgcgagccctcacggagctcggggctggcagcgttctcaacgccgggggaagcacgccctgcgagcaagcctcccccgccgactgggccgccatggtcgacggcttccagcgccttgcgatctcctcccgcctcggcgtccccatcctctacggcactgacgccatccacggacacaacaacgtctacggcgccaccgttttcccccacaacgtcggtctcggcgcctgcaggtctgtcgggatcctaggtggggcagatgctacgaaagctacagcgaggacccagagatcgtgcgctcgttgaccaccatcgtcagcggtttgcaggggcagccgccagcagaccatcctcatggttaccccttcctcgcttcgcctagggagaatgtacttgcttgtgctaaacatttcgtaggggatggtggcacggacaagggggtcaatgaggggaacgccatttgctcctatgaggatttggaagcaatccatatgacaccttacccggattgtatagctcaaggggtggcaacagtaatggcgtcctactctaagtggaatggggagccattgcattcaagtcgctacttgttaacagatgttctgaagggcaagttaggctttaagggttttctcatttcagattgggagggcattgacaggatctgtgagccacaaaagcctcgagggtctgattatcgctattgcattgcacaatcagtaaatgcaggaatggacatgattatgatacctcacaggtttgagaaatttttggatgatattgtgttcttggtggaggcgggggagataccaatgtctcggattgatgatgctgttgaacgaattctgagggttaagtttatttctggagtgtttgagcatccattttcagaccaatctctactggacatagttggttgtaaggaacatcggttactagcgcgtgaggctgttcgcaagtctttggtacttctgaaaaatggcaaggatcagaataagccattccttccattggccaaagatgcaaaaagaatactggttgcaggaacacatgctgatgatattggatatcaatgtggtggctggacgatagcatggcatggagacagtggaaaaataactcttggtacgagcatattggaggccatacaagaattagtgggagtgcaaactgaagttgtgtatgagaaatgcccaaccgaagctatgattgaaactggggggttttcctatgcggtggtggttgttggagaggttccatatgccgaatgggacaggagatagaactgaccttagtattccgtttaatggctctgaccttatcatccgtgttgcaagtaaaatccctaccctagtgattgttatatctggaaggccattaattattgagtcacaagttttggaaaagatagaagctctagtcgctgcctggctgcctggaagtgagggcatgggaattaccgattgcctctttggagatcatgattttgtgggcacattgcctgtgacatggtgtaagtctgttgatcaattgcctatagatgctggagactctaactatgacccgctattccctgttggatatgggctaaaaatgtttcgaagcgataatgattcaacataactttattatttattgggtacatttgaatctttgtgatgttaaatactctgtatttattggctattggaacttaaaatgaaataatatattgttgtagtatgcattgtactgttttgaatacattattcttcccttagat

SEQ ID NO: 63077 - DNA, 2145 bp, Zea Mays
gacaagttcaaaagccaatctctttccaggtggcgctctcgaggcgttctgccctgtttccctcgtgtgtactagtccaatcccctcccaatcggtcaacacaagtacacaccacaaacacccatctcctccgcctctgctcccttctgctcacccgcacgatggcgccggaggcgcgaggtgaggcggcgctggtgtacagagacgcattggcgccagtggaggaaagggtgcgagacctgctgggccgcatgacgctgcgtgagaaggcagcgcagatggcccagatcgagcgcaccgtcgcgacgccgcgagccctcacggagctcggggctggcagcgttctcaacgccgggggaagcacgccctgcgagcaagcctcccccgccgactgggccgccatggtcgacggcttccagcgccttgcgatctcctcccgcctcggcgtccccatcctctacggcactgacgccatccacggacacaacaacgtctacggcgccaccgttttcccccacaacgtcggtctcggcgcctgcagggacggagagctcgcgcgtaggatcggcgaggcgacggcgctcgaggttcgcgccactggcatccactggacctttgcgccgtgcgtcgccgtctgtcgggatcctaggtggggcagatgctacgaaagctacagcgaggacccagagatcgtgcgctcgttgaccaccatcgtcagcggtttgcaggggcagccgccagcagaccatcctcatggttaccccttcctcgcttcgcctagggagaatgtacttgcttgtgctaaacatttcgtaggggatggtggcacggacaagggggtcaatgaggggaacgccatttgctcctatgaggatttggaagcaatccatatgacaccttacccggattgtatagctcaaggggtggcaacagtaatggcgtcctactctaagtggaatggggagccattgcattcaagtcgctacttgttaacagatgttctgaagggcaagttaggctttaagattgggagggcattgacaggatctgtgagccacaaaagcctcgagggtctgattatcgctattgcattgcacaatcagtaaatgcaggaatggacatgattatgatacctcacaggtttgagaaatttttggatgatattgtgttcttggtggaggcgggggagataccaatgtctcggattgatgatgctgttgaacgaattctgagggttaagtttatttctggagtgtttgagcatccattttcagaccaatctctactggacatagttggttgtaaggaacatcggttactagcgcgtgaggctgttcgcaagtctttggtacttctgaaaaatggcaaggatcagaataagccattccttccattggccaaagatgcaaaaagaatactggttgcaggaacacatgctgatgatattggatatcaatgtggtggctggacgatagcatggcatggagacagtggaaaaataactcttggtacgagcatattggaggccatacaagaattagtgggagtgcaaactgaagttgtgtatgagaaatgcccaaccgaagctatgattgaaactggggggttttcctatgcggtggtggttgttggagaggttccatatgccgaatgggacaggagatagaactgaccttagtattccgtttaatggctctgaccttatcatccgtgttgcaagtaaaatccctaccctagtgattgttatatctggaaggccattaattattgagtcacaagttttggaaaagatagaagctctagtcgctgcctggctgcctggaagtgagggcatgggaattaccgattgcctctttggagatcatgattttgtgggcacattgcctgtgacatggtgtaagtctgttgatcaattgcctatagatgctggagactctaactatgacccgctattccctgttggatatgggctaaaaatgtttcgaagcgataatgattcaacataactttattatttattgggtacatttgaatctttgtgatgttaaatactctgtatttattggctattggaacttaaaatgaaataatatattgttgtagtatgcattgtactgttttgaatacattattcttcccttagat

SEQ ID NO: 63078 - DNA, 2110 bp, Zea Mays
gacaagttcaaaagccaatctctttccaggtggcgctctcgaggcgttctgccctgtttccctcgtgtgtactagtccaatcccctcccaatcggtcaacacaagtacacaccacaaacacccatctcctccgcctctgctcccttctgctcacccgcacgatggcgccggaggcgcgaggtgaggcggcgctggtgtacagagacgcattggcgccagtggaggaaagggtgcgagacctgctgggccgcatgacgctgcgtgagaaggcagcgcagatggcccagatcgagcgcaccgtcgcgacgccgcgagccctcacggagctcggggctggcagcgttctcaacgccgggggaagcacgccctgcgagcaagcctcccccgccgactgggccgccatggtcgacggcttccagcgccttgcgatctcctcccgcctcggcgtccccatcctctacggcactgacgccatccacggacacaacaacgtctacggcgccaccgttttcccccacaacgtcggtctcggcgcctgcagggacggagagctcgcgcgtaggatcggcgaggcgacggcgctcgaggttcgcgccactggcatccactggacctttgcgccgtgcgtcgccgtctgtcgggatcctaggtggggcagatgctacgaaagctacagcgaggacccagagatcgtgcgctcgttgaccaccatcgtcagcggtttgcaggggcagccgccagcagaccatcctcatggttaccccttcctcgcttcgcctaggggatggtggcacggacaagggggtcaatgaggggaacgccatttgctcctatgaggatttggaagcaatccatatgacaccttacccggattgtatagctcaaggggtggcaacagtaatggcgtcctactctaagtggaatggggagccattgcattcaagtcgctacttgttaacagatgttctgaagggcaagttaggctttaagattgggagggcattgacaggatctgtgagccacaaaagcctcgagggtctgattatcgctattgcattgcacaatcagtaaatgcaggaatggacatgattatgatacctcacaggtttgagaaatttttggatgatattgtgttcttggtggaggcgggggagataccaatgtctcggattgatgatgctgttgaacgaattctgagggttaagtttatttctggagtgtttgagcatccattttcagaccaatctctactggacatagttggttgtaaggaacatcggttactagcgcgtgaggctgttcgcaagtctttggtacttctgaaaaatggcaaggatcagaataagccattccttccattggccaaagatgcaaaaagaatactggttgcaggaacacatgctgatgatattggatatcaatgtggtggctggacgatagcatggcatggagacagtggaaaaataactcttggtacgagcatattggaggccatacaagaattagtgggagtgcaaactgaagttgtgtatgagaaatgcccaaccgaagctatgattgaaactggggggttttcctatgcggtggtggttgttggagaggttccatatgccgaatgggacaggagatagaactgaccttagtattccgtttaatggctctgaccttatcatccgtgttgcaagtaaaatccctaccctagtgattgttatatctggaaggccattaattattgagtcacaagttttggaaaagatagaagctctagtcgctgcctggctgcctggaagtgagggcatgggaattaccgattgcctctttggagatcatgattttgtgggcacattgcctgtgacatggtgtaagtctgttgatcaattgcctatagatgctggagactctaactatgacccgctattccctgttggatatgggctaaaaatgtttcgaagcgataatgattcaacataactttattatttattgggtacatttgaatctttgtgatgttaaatactctgtatttattggctattggaacttaaaatgaaataatatattgttgtagtatgcattgtactgttttgaatacattattcttcccttagat

SEQ ID NO: 63079 - DNA, 2383 bp, Zea Mays
gcatggcatccccagctggatcgcgcagaagtaaacgccgcatcccaaatccccatcccacctcgtcctcctctccactctctcttctccctccaataattttctcctctctgcttgctccagttccaagcaccaccgaatcagggcgagtgggagcagagggaatcccatgtctccgcccctcgctggagtagatcctcggggagccggcgtggagctgccgcggtagaaagccagctgagcctgcgagcgcctgatccagcccgatcgggatcgatgggtggggaggcgccggagccgcggcggctgacccgcgctctgagcatcggtggcggtggcggcggctgggttcccgatgagatgctgcaactggtgttggggtttgttgaggacccgcgcgaccgggaggccttgtcgctggtgtgtcgccggtggcaccgcatcgacgcgctctcgcggaagcacgtgacggtgcccttctgctacgccgtgtccccggcacgcctgctcgcgcggttcccgcggctcgagtcgctcgcggtgaaggggaagccccgcgcggccatgtacgggctcatacccgacgactggggcgcctacgcccgcccatgggtcaccgagctcgccgcgccattcgagtgcctcaaggcgctccacctgcgacgcatggtcgtcacagacgacgacctcgccgagctcatccgtgccagggggcacatgctgcaggagctgaagctcgacaagtgcaccggcttctccacggatggactccgcctcgtcgcccgctcatgcagtcaactgtcctgttctggcaacattgaatttccacatgactgagcttgaagtgatgccagttgacctagagcttcttgcaaagagctgcaagtcactgatttccttgaagattggcgattgtgatctttcagatttgatagggttcttccaatctgccacatcactggaagaatttgctggagggacatttaatgggcaaggggaactcaccaagtatggggatgttaaatttccatcaagaatatgctccttgggacttactttcatgggtgcaaatgaaatgcctattatatttcctttttctgcgatactaaagaagctggatttgcagtacactttcctcaccaccgaagaccattgccagctcattgcaaaatgcccgaacttactagttctcgcggtgaggaatgtgattggggatagaggattaggagttgttgcagatacgtgcaagaagctccaaaggctcagaattgagcgaggagacgatgaaggaggtgtgcaagaagagcagggaggggtctctcaagtgggcttgacagctatagcggtaggctgtcgtgaactggaatacatagctgcctatgtgtctgatataaccaatggggccttggaatctatcgggacattctgcaaaaaactctatgacttccggcttgttctgctcgatagagaagagaggataacagatttgccactggacaatggtgtccgggctttgttgaggggctgcaccatgcttcggaggtttgctctgtacttgagaccaggagggctctcagatgcaggtctcggctacattggacagtgcagtggaaacattcaatacatgcttctcggtaacgttggggaaaccgatgatggattgatcagtttcgctctgggatgtgtaaacctgcgaaagcttgagctcaggagctgttgcttcagcgagcgagctctggccctcgcaatactaagtatgccttccctgaggtacgtatgggttcagggctacaaagcgtctcaaacaggccgagacctgatgctcatggcgaggcccttctggaacatagagtttacacctcccagttcccagaatgctggtcggttgatagaagatggggaaccttgcgtagatagtcatgctcagatactggcatacggctctcttgctggtaagaggttggactgcccacaatccgtggtcactttgtatcctgcgtgagtgtaaatagactgagggcccgtttggtgcccatggaaccgttgtctggaacaatttctggtaggattgcttgctgatttgtataggctttgatcagctggaaacaaatgaacaaggcctaagctcgtgtctttctctcacgtccttgctttcttagcctcatggtcaacaagaatggtgttgataacacgatatgtgcttattgtattgatctagatggctagctgctacgtactgcaatcagctactagtagttgagatgacctggattctggaataagcccttgctatcttcgcctgtactgctatctaatcctaggaagcatgtatatgtatactggtaaaagtaacgatggaagatgtgagtctgattgcccgccc

SEQ ID NO: 63080 - DNA, 1408 bp, Zea Mays
atgattccttttcccccctgctgcacctctattcttctaatccacgggttaatgagtgcacttaaccactactctgggtgtgggggtggtggcaggggtaccggccacgcgtgcgcttatccggtgccacgccacagtccagcttctcacgcccaaaacgtgcgcgacacacacagaatggcatcgccctccactcggcccggccccgctccaaatctataaaaggcggccgtcggcctccagttctgtgccaagatccagcaaccagagttctccaaagcgcgaagctccagctccatctccaggcagccgtcaccgtcaccgtcagggaacgcgcgcagcaatggccttctactacggcgtgggcggacagtcgtcggcgtgggcggcgccgggcggcagcaggccatggaccaaggcggaggacaaggtgttcgagggcgcgctggtgatgttcccggagcacctgccgaaccggtgggcgctggtggcgtcccggctgtacgaccgcacgccgcaggaggcctgggaccactaccaggcgctggtgaccgacgtcgacctcatcgagcgcggcatggtggaggccccggactcctgggacgacgacgcggctgccgccggagggggacgctcgggccgcggccgcgggggcggcagcggcagcggagaggagcgccgccgcggggtgccgtggaccgaggacgagcacaggtacgcgccgcgcgccttcgaacactcttctgtcttgagtgacgtatagcagtacatactcctgcttttgtccttttccccaccctgtcattccacctacgtgccttctcttctctgaggtcgtcctagatccttccgagtacctttccacgccggacgcactcctctggcccaccggacctttatctctctctccctctcttcgctgctctgctggtatggtaggtaaactgattccgtgttctcctcacaacgacgcaggctgtttctggaggggcttgagaagtacgggcgcggcgactggcggaacatctcgcgctggtcggtgaagacgcggacgcccacgcaggtggccagccacgcgcagaagtacttcatccgccaggccagcgccgccagccgcggcgacagcaagcgcaagagcatccacgacatcaccaccccgtgatgcctcctgctcgtggaggacaaagctagcaccgagatccagccctgcctactgctgctacctgcattttatctttacctttgcgagacgggatcaaaaaacaaacagccgtccctgtggttgtagaaatgtaggcaaagctaagctagcctggctggtatctggggtctggtataactgtattaagcgacactacaatgaatattgaataaataagttttgcaagtttaaaaaaaaaatatcaaa

SEQ ID NO: 63081 - DNA, 893 bp, Zea Mays
cagatgtaaaaagtgtaaaaaacattccatgttgagttgctcactttgagaacaaaaaattatataatgttcctgcttgcactggagccatcttctctagctaaagctatatatccggttttaatatcgtattcctcgcctgacaagcaagcattcccacgacacactctcagccgtgctgctctaatcatgagcgagagcccaatatttcttcttgacacatttaccaaccttatcgtttactattcctcaactgctgatccttcatttccttttcctccaccccgtgactgtcttttgagaacaacaatcaataaactgaagcaggacagatgtataaccccaaagcttacattcatccatggaggggaagatgattcaacattgtttgagagctatctcattgaagagcaagatgtcgatggatcaggtcttacaactggttcaggttttgtagccttccgtgagagcgttaggaatgttgcaggagagatcatccaggaagaaattggaagctagtttcagctagaagacccttttggtcccgctgcagagcgtataaactcggatgctttttaaccctaattaatatcgtagtagttaacttagatagccaaaatggagaaacaatgtcaaaataatatgaggggccacatgatttgtagttgcttctggcaataactgctttaggcttgattaatcagagaagcctttctggtacactggtaaaagggtcgagtacaccaatacaccgtgtgatcctggctgtctgattttttttggagaactcaaattttggtgtatattaatgctgctgtttattccgattaaattgaggccgttcgaaacctagagctaatagttagctagctaatgaactgaggatctacttg

SEQ ID NO: 63082 - DNA, 2729 bp, Zea Mays
gtgtaggcccagcgtgtcagacactgaggctgttgcagccgtgattcccgagtcccgacgactcgcgcggtcgcgcccctcgccttctccgctggtcgactggtccggctggtcttccccctcggcatcgcactcgcacctcccaagcgtgcctgaatctcagacttgtccccccactgcctcggccatggctgtgcgagccacggtctcccgcttcccggccacgccggaggcgctggagtcgtgcgccgtccagtggggcgtcgccgtgacgcccttcgccgccgtcgacgagcgcggccagcccccgaccaccggcgccggcggggaccgcatcccacgctgcgagcactgctgggcgtacttgagcagccactgcgatctggagcgctggggctggacctgcgcgctctgcggcacgctcaacggattcgacgacgaggccgagcgacggttccagcgtcccgacgcctgccccgagctcaattcctctttcgttgacctcgagatcgcagtggatgaggcaggggctggaggagacggcgtgcaggcgctgcctgtttatgtggccgcagtggacctcgcatgctctgaagagttccttgaacttatcaagagtgcacttcttgcggccctagaagctcttattccgggctccttatttgggcttatgacattcagccacaagattgggttgtatgatgtccaaggtccgattccacttgtgaaaaatgtttttattcctccggacttggaagaagatggtctgcctgttgcccttgaagatgccatgcccctactttcttttttggctccagttgacacatgcaaggatcgaattgctgctgccctggagacactgcgacctacatcttcatgggagagaggggctgcttctgggcatgaagaggatgctgttttgcttggcggacgtggttttgggacagccatgtctgctttaattgagtacctaagttcaggatatggttctacttttgctttggctcgagtatttgcttttctgtctggtgctcctgattatggagctggtctgctagataccaggagatatggggagcaatatgctagtaaaggggtagacgctaaccttgcattgctccctgaacagatacctttctacagagacctagcagctgttgctgttcagtcaggagtttgcatagacatatttgctgtaactgatgaatacacggatttggcttcactgaagtttttaagtattgaaagtggtggatatctatttctttatgcaaatgcagatgattcaacacttcctcaagacatataccgcttactaagtcgaccctacgcatttggttgtgttctaaggctgagaacatcttcagattttgaaccaggcaattcttatggacatttctttcctgaccctcagtatgaaagtgtgcaacacattatctgctgtgattcatttgccacttatgcatatgactttgagttttcccataacaacggtttctccaggcatacagatcctgctgttgtgcagatcgcttttcagtacagcgtgattgaacctgccaaggagacatcaggcgatggatcacaatcatctgcaagttataagttctctctaaagaggcggctgagaataagaacattgcagtaccgtccagctaggaatatcagtgaaatttatgacagtgtagatccagaggttgtactgcatatccttgttcataagcccggtataatcaggtcctgagttctgatgtgcgaactccactatcgagcatagacattgacttctcgcagtgcccgcagcttcaaacgatacctcaacttgtttttgcattgttgagaagtcctcttcttcgcttgcatgaagaaggtgtacacccagattacaggatatatctacaatgccttttcagtgcactggagccatcttctctagctaaagctatatatccggttttaatatcgtattcctcgcctgacaagcaagcattcccacgacacactctcagccgtgctgctctaatcatgagcgagagcccaatatttcttcttgacacatttaccaaccttatcgtttactattcctcaactgctgatccttcatttccttttcctccaccccgtgactgtcttttgagaacaacaatcaataaactgaagcaggacagatgtataaccccaaagcttacattcatccatggaggggaagatgattcaacattgtttgagagctatctcattgaagagcaagatgtcgatggatcaggtcttacaactggttcaggttttgtagccttccgtgagagcgttaggaatgttgcaggagagatcatccaggaagaaattggaagctagtttcagctagaagacccttttggtcccgctgcagagcgtataaactcggatgctttttaaccctaattaatatcgtagtagttaacttagatagccaaaatggagaaacaatgtcaaaataatatgaggggccacatgatttgtagttgcttctggcaataactgctttaggcttgattaatcagagaagcctttctggtacactggtaaaagggtcgagtacaccaatacaccgtgtgatcctggctgtctgattttttttggagaactcaaattttggtgtatattaatgctgctgtttattccgattaaattgaggccgttcgaaacctagagctaatagttagctagctaatgaactgaggatctacttg

SEQ ID NO: 63083 - DNA, 2729 bp, Zea Mays
gtgtaggcccagcgtgtcagacactgaggctgttgcagccgtgattcccgagtcccgacgactcgcgcggtcgcgcccctcgccttctccgctggtcgactggtccggctggtcttccccctcggcatcgcactcgcacctcccaagcgtgcctgaatctcagacttgtccccccactgcctcggccatggctgtgcgagccacggtctcccgcttcccggccacgccggaggcgctggagtcgtgcgccgtccagtggggcgtcgccgtgacgcccttcgccgccgtcgacgagcgcggccagcccccgaccaccggcgccggcggggaccgcatcccacgctgcgagcactgctgggcgtacttgagcagccactgcgatctggagcgctggggctggacctgcgcgctctgcggcacgctcaacggattcgacgacgaggccgagcgacggttccagcgtcccgacgcctgccccgagctcaattcctctttcgttgacctcgagatcgcagtggatgaggcaggggctggaggagacggcgtgcaggcgctgcctgtttatgtggccgcagtggacctcgcatgctctgaagagttccttgaacttatcaagagtgcacttcttgcggccctagaagctcttattccgggctccttatttgggcttatgacattcagccacaagattgggttgtatgatgtccaaggtccgattccacttgtgaaaaatgtttttattcctccggacttggaagaagatggtctgcctgttgcccttgaagatgccatgcccctactttcttttttggctccagttgacacatgcaaggatcgaattgctgctgccctggagacactgcgacctacatcttcatgggagagaggggctgcttctgggcatgaagaggatgctgttttgcttggcggacgtggttttgggacagccatgtctgctttaattgagtacctaagttcaggatatggttctacttttgctttggctcgagtatttgcttttctgtctggtgctcctgattatggagctggtctgctagataccaggagatatggggagcaatatgctagtaaaggggtagacgctaaccttgcattgctccctgaacagatacctttctacagagacctagcagctgttgctgttcagtcaggagtttgcatagacatatttgctgtaactgatgaatacacggatttggcttcactgaagtttttaagtattgaaagtggtggatatctatttctttatgcaaatgcagatgattcaacacttcctcaagacatataccgcttactaagtcgaccctacgcatttggttgtgttctaaggctgagaacatcttcagattttgaaccaggcaattcttatggacatttctttcctgaccctcagtatgaaagtgtgcaacacattatctgctgtgattcatttgccacttatgcatatgactttgagttttcccataacaacggtttctccaggcatacagatcctgctgttgtgcagatcgcttttcagtacagcgtgattgaacctgccaaggagacatcaggcgatggatcacaatcatctgcaagttataagttctctctaaagaggcggctgagaataagaacattgcagtaccgtccagctaggaatatcagtgaaatttatgacagtgtagatccagaggttgtactgcatatccttgttcataaggttattttagaatgcgtggataagggggttagagaaggcaggcatcaagttcatgcttggctatccctccttgcagcccgcttcaaacgatacctcaacttgtttttgcattgttgagaagtcctcttcttcgcttgcatgaagaaggtgtacacccagattacaggatatatctacaatgccttttcagtgcactggagccatcttctctagctaaagctatatatccggttttaatatcgtattcctcgcctgacaagcaagcattcccacgacacactctcagccgtgctgctctaatcatgagcgagagcccaatatttcttcttgacacatttaccaaccttatcgtttactattcctcaactgctgatccttcatttccttttcctccaccccgtgactgtcttttgagaacaacaatcaataaactgaagcaggacagatgtataaccccaaagcttacattcatccatggaggggaagatgattcaacattgtttgagagctatctcattgaagagcaagatgtcgatggatcaggtcttacaactggttcaggttttgtagccttccgtgagagcgttaggaatgttgcaggagagatcatccaggaagaaattggaagctagtttcagctagaagacccttttggtcccgctgcagagcgtataaactcggatgctttttaaccctaattaatatcgtagtagttaacttagatagccaaaatggagaaacaatgtcaaaataatatgaggggccacatgatttgtagttgcttctggcaataactgctttaggcttgattaatcagagaagcctttctggtacactggtaaaagggtcgagtacaccaatacaccgtgtgatcctggctgtctgattttttttggagaactcaaattttggtgtatattaatgctgctgtttattccgattaaattgaggccgttcgaaacctagagctaatagttagctagctaatgaactgaggatctacttg

SEQ ID NO: 63084 - DNA, 2751 bp, Zea Mays
gtgtaggcccagcgtgtcagacactgaggctgttgcagccgtgattcccgagtcccgacgactcgcgcggtcgcgcccctcgccttctccgctggtcgactggtccggctggtcttccccctcggcatcgcactcgcacctcccaagcgtgcctgaatctcagacttgtccccccactgcctcggccatggctgtgcgagccacggtctcccgcttcccggccacgccggaggcgctggagtcgtgcgccgtccagtggggcgtcgccgtgacgcccttcgccgccgtcgacgagcgcggccagcccccgaccaccggcgccggcggggaccgcatcccacgctgcgagcactgctgggcgtacttgagcagccactgcgatctggagcgctggggctggacctgcgcgctctgcggcacgctcaacggattcgacgacgaggccgagcgacggttccagcgtcccgacgcctgccccgagctcaattcctctttcgttgacctcgagatcgcagtggatgaggcaggggctggaggagacggcgtgcaggcgctgcctgtttatgtggccgcagtggacctcgcatctcttattccgggctccttatttgggcttatgacattcagccacaagattgggttgtatgatgtccaaggtccgattccacttgtgaaaaatgtttttattcctccggacttggaagaagatggtctgcctgttgcccttgaagatgccatgcccctactttcttttttggctccagttgacacatgcaaggatcgaattgctgctgccctggagacactgcgacctacatcttcatgggagagaggggctgcttctgggcatgaagaggatgctgttttgcttggcggacgtggttttgggacagccatgtctgctttaattgagtacctaagttcaggatatggttctacttttgctttggctcgagtatttgcttttctgtctggtgctcctgattatggagctggtctgctagataccaggagatatggggagcaatatgctagtaaaggggtagacgctaaccttgcattgctccctgaacagatacctttctacagagacctagcagctgttgctgttcagtcaggagtttgcatagacatatttgctgtaactgatgaatacacggatttggcttcactgaagtttttaagtattgaaagtggtggatatctatttctttatgcaaatgcagatgattcaacacttcctcaagacatataccgcttactaagtcgaccctacgcatttggttgtgttctaaggctgagaacatcttcagattttgaaccaggcaattcttatggacatttctttcctgaccctcagtatgaaagtgtgcaacacattatctgctgtgattcatttgccacttatgcatatgactttgagttttcccataacaacggtttctccaggcatacagatcctgctgttgtgcagatcgcttttcagtacagcgtgattgaacctgccaaggagacatcaggcgatggatcacaatcatctgcaagttataagttctctctaaagaggcggctgagaataagaacattgcagtaccgtccagctaggaatatcagtgaaatttatgacagtgtagatccagaggttgtactgcatatccttgttcataaggttattttagaatgcgtggataagggggttagagaaggcaggcatcaagttcatgcttggctatccctccttgcagcccggtataatcaggtcctgagttctgatgtgcgaactccactatcgagcatagacattgacttctcgcagtgcccgcagcttcaaacgatacctcaacttgtttttgcattgttgagaagtcctcttcttcgcttgcatgaagaaggtgtacacccagattacaggatatatctacaatgccttttcagtgcactggagccatcttctctagctaaagctatatatccggttttaatatcgtattcctcgcctgacaagcaagcattcccacgacacactctcagccgtgctgctctaatcatgagcgagagcccaatatttcttcttgacacatttaccaaccttatcgtttactattcctcaactgctgatccttcatttccttttcctccaccccgtgactgtcttttgagaacaacaatcaataaactgaagcaggacagatgtataaccccaaagcttacattcatccatggaggggaagatgattcaacattgtttgagagctatctcattgaagagcaagatgtcgatggatcaggtcttacaactggttcaggttttgtagccttccgtgagagcgttaggaatgttgcaggagagatcatccaggaagaaattggaagctagtttcagctagaagacccttttggtcccgctgcagagcgtataaactcggatgctttttaaccctaattaatatcgtagtagttaacttagatagccaaaatggagaaacaatgtcaaaataatatgaggggccacatgatttgtagttgcttctggcaataactgctttaggcttgattaatcagagaagcctttctggtacactggtaaaagggtcgagtacaccaatacaccgtgtgatcctggctgtctgattttttttggagaactcaaattttggtgtatattaatgctgctgtttattccgattaaattgaggccgttcgaaacctagagctaatagttagctagctaatgaactgaggatctacttg

SEQ ID NO: 63085 - DNA, 2765 bp, Zea Mays
gtgtaggcccagcgtgtcagacactgaggctgttgcagccgtgattcccgagtcccgacgactcgcgcggtcgcgcccctcgccttctccgctggtcgactggtccggctggtcttccccctcggcatcgcactcgcacctcccaagcgtgcctgaatctcagacttgtccccccactgcctcggccatggctgtgcgagccacggtctcccgcttcccggccacgccggaggcgctggagtcgtgcgccgtccagtggggcgtcgccgtgacgcccttcgccgccgtcgacgagcgcggccagcccccgaccaccggcgccggcggggaccgcatcccacgctgcgagcactgctgggcgtacttgagcagccactgcgatctggagcgctggggctggacctgcgcgctctgcggcacgctcaacggattcgacgacgaggccgagcgacggttccagcgtcccgacgcctgccccgagctcaattcctctttcgttgacctcgagatcgcagtggatgaggcaggggctggaggagacggcgtgcaggcgctgcctgtttatgtggccgcagtggacctcgcatgctctgaagagttccttgaacttatcaagagtgcacttcttgcggccctagaagccacaagattgggttgtatgatgtccaaggtccgattccacttgtgaaaaatgtttttattcctccggacttggaagaagatggtctgcctgttgcccttgaagatgccatgcccctactttcttttttggctccagttgacacatgcaaggatcgaattgctgctgccctggagacactgcgacctacatcttcatgggagagaggggctgcttctgggcatgaagaggatgctgttttgcttggcggacgtggttttgggacagccatgtctgctttaattgagtacctaagttcaggatatggttctacttttgctttggctcgagtatttgcttttctgtctggtgctcctgattatggagctggtctgctagataccaggagatatggggagcaatatgctagtaaaggggtagacgctaaccttgcattgctccctgaacagatacctttctacagagacctagcagctgttgctgttcagtcaggagtttgcatagacatatttgctgtaactgatgaatacacggatttggcttcactgaagtttttaagtattgaaagtggtggatatctatttctttatgcaaatgcagatgattcaacacttcctcaagacatataccgcttactaagtcgaccctacgcatttggttgtgttctaaggctgagaacatcttcagattttgaaccaggcaattcttatggacatttctttcctgaccctcagtatgaaagtgtgcaacacattatctgctgtgattcatttgccacttatgcatatgactttgagttttcccataacaacggtttctccaggcatacagatcctgctgttgtgcagatcgcttttcagtacagcgtgattgaacctgccaaggagacatcaggcgatggatcacaatcatctgcaagttataagttctctctaaagaggcggctgagaataagaacattgcagtaccgtccagctaggaatatcagtgaaatttatgacagtgtagatccagaggttgtactgcatatccttgttcataaggttattttagaatgcgtggataagggggttagagaaggcaggcatcaagttcatgcttggctatccctccttgcagcccggtataatcaggtcctgagttctgatgtgcgaactccactatcgagcatagacattgacttctcgcagtgcccgcagcttcaaacgatacctcaacttgtttttgcattgttgagaagtcctcttcttcgcttgcatgaagaaggtgtacacccagattacaggatatatctacaatgccttttcagtgcactggagccatcttctctagctaaagctatatatccggttttaatatcgtattcctcgcctgacaagcaagcattcccacgacacactctcagccgtgctgctctaatcatgagcgagagcccaatatttcttcttgacacatttaccaaccttatcgtttactattcctcaactgctgatccttcatttccttttcctccaccccgtgactgtcttttgagaacaacaatcaataaactgaagcaggacagatgtataaccccaaagcttacattcatccatggaggggaagatgattcaacattgtttgagagctatctcattgaagagcaagatgtcgatggatcaggtcttacaactggttcaggttttgtagccttccgtgagagcgttaggaatgttgcaggagagatcatccaggaagaaattggaagctagtttcagctagaagacccttttggtcccgctgcagagcgtataaactcggatgctttttaaccctaattaatatcgtagtagttaacttagatagccaaaatggagaaacaatgtcaaaataatatgaggggccacatgatttgtagttgcttctggcaataactgctttaggcttgattaatcagagaagcctttctggtacactggtaaaagggtcgagtacaccaatacaccgtgtgatcctggctgtctgattttttttggagaactcaaattttggtgtatattaatgctgctgtttattccgattaaattgaggccgttcgaaacctagagctaatagttagctagctaatgaactgaggatctacttg

SEQ ID NO: 63086 - DNA, 3251 bp, Zea Mays
ctgtgtgtaggcccagcgtgtcagacactgaggctgttgcagccgtgattcccgagtcccgacgactcgcgcggtcgcgcccctcgccttctccgctggtcgactggtccggctggtcttccccctcggcatcgcactcgcacctcccaagcgtgcctgaatctcagacttgtccccccactgcctcggccatggctgtgcgagccacggtctcccgcttcccggccacgccggaggcgctggagtcgtgcgccgtccagtggggcgtcgccgtgacgcccttcgccgccgtcgacgagcgcggccagcccccgaccaccggcgccggcggggaccgcatcccacgctgcgagcactgctgggcgtacttgagcagccactgcgatctggagcgctggggctggacctgcgcgctctgcggcacgctcaacggattcgacgacgaggccgagcgacggttccagcgtcccgacgcctgccccgagctcaattcctctttcgttgacctcgagatcgcagtggatgaggcaggggctggaggagacggcgtgcaggcgctgcctgtttatgtggccgcagtggacctcgcatgctctgaagagttccttgaacttatcaagagtgcacttcttgcggccctagaagctcttattccgggctccttatttgggcttatgacattcagccacaagattgggttgtatgatgtccaaggtccgattccacttgtgaaaaatgtttttattcctccggacttggaagaagatggtctgcctgttgcccttgaagatgccatgcccctactttcttttttggctccagttgacacatgcaaggatcgaattgctgctgccctggagacactgcgacctacatcttcatgggagagaggggctgcttctgggcatgaagaggatgctgttttgcttggcggacgtggttttgggacagccatgtctgctttaattgagtacctaagttcaggatatggttctacttttgctttggctcgagtatttgcttttctgtctggtgctcctgattatggagctggtctgctagataccaggagatatggggagcaatatgctagtaaaggggtagacgctaaccttgcattgctccctgaacagatacctttctacagagacctagcagctgttgctgttcagtcaggagtttgcatagacatatttgctgtaactgatgaatacacggatttggcttcactgaagtttttaagtattgaaagtggtggatatctatttctttatgcaaatgcagatgattcaacacttcctcaagacatataccgcttactaagtcgaccctacgcatttggttgtgttctaaggctgagaacatcttcagattttgaaccaggcaattcttatggacatttctttcctgaccctcagtatgaaagtgtgcaacacattatctgctgtgattcatttgccacttatgcatatgactttgagttttcccataacaacggtttctccaggcatacagatcctgctgttgtgcagatcgcttttcagtacagcgtgattgaacctgccaaggagacatcaggcgatggatcacaatcatctgcaagttataagttctctctaaagaggcggctgagaataagaacattgcagtaccgtccagctaggaatatcagtgaaatttatgacagtgtagatccagaggttgtactgcatatccttgttcataaggttattttagaatgcgtggataagggggttagagaaggcaggcatcaagttcatgcttggctatccctccttgcagcccggtataatcaggtcctgagttctgatgtgcgaactccactatcgagcatagacattgacttctcgcagtgcccgcagcttcaaacgatacctcaacttgtttttgcattgttgagaagtcctcttcttcgcttgcatgaagaaggtgtacacccagattacaggatatatctacaatgccttttcagtgcactggagccatcttctctagctaaagctatatatccggttttaatatcgtattcctcgcctgacaagcaagcattcccacgacacactctcagccgtgctgctctaatcatgagcgagagcccaatatttcttcttgacacatttaccaaccttatcgtttactattcctcaactgctgatccttcatttccttttcctccaccccgtgactgtaagtacatagtttttcattttcctgtgcatattttgagtagtacatatattctttcacaaaaaaagaattgctcaaatctccaaacaattttttttctcgaacaacgcaggagatctgcctgtcgtttcattaagaagagtagaaacaggattgtccagcatggccggacaaagtattaaacacccacagacacccttacataccaacctgaaaactagataaaacaggcagaatagtttgaaacaagaccaccaacaagcactaaagaaaaagatttgctgcaaagctccaaagaatattgtttggtgtagtggtggctgactagatattagacccttaatattaatattcttgaaagtctactttttgttattgaggatagataggagcactcgtacttgcttgtttcagctgctgattatttctacataccatgtaggtcttttgagaacaacaatcaataaactgaagcaggacagatgtataaccccaaagcttacattcatccatggaggggaagatgattcaacattgtttgagagctatctcattgaagagcaagatgtcgatggatcaggtcttacaactggttcaggttttgtagccttccgtgagagcgttaggaatgttgcaggagagatcatccaggaagaaattggaagctagtttcagctagaagacccttttggtcccgctgcagagcgtataaactcggatgctttttaaccctaattaatatcgtagtagttaacttagatagccaaaatggagaaacaatgtcaaaataatatgaggggccacatgatttgtagttgcttctggcaataactgctttaggcttgattaatcagagaagcctttctggtacactggtaaaagggtcgagtacaccaatacaccgtgtgatcctggctgtctgattttttttggagaactcaaattttggtgtatattaatgctgctgtttattccgattaaattgaggccgttcgaaacctagagctaatagttagctagctaatgaactgaggatctacttg

SEQ ID NO: 63087 - DNA, 2587 bp, Zea Mays
ccattctctgtgtgtaggcccagcgtgtcagacactgaggctgttgcagccgtgattcccgagtcccgacgactcgcgcggtcgcgcccctcgccttctccgctggtcgactggtccggctggtcttccccctcggcatcgcactcgcacctcccaagcgtgcctgaatctcagacttgtccccccactgcctcggccatggctgtgcgagccacggtctcccgcttcccggccacgccggaggcgctggagtcgtgcgccgtccagtggggcgtcgccgtgacgcccttcgccgccgtcgacgagcgcggccagcccccgaccaccggcgccggcggggaccgcatcccacgctgcgagcactgctgggcgtacttgagcagccactgcgatctggagcgctggggctggacctgcgcgctctgcggcacgctcaacggattcgacgacgaggccgagcgacggttccagcgtcccgacgcctgccccgagctcaattcctctttcgttgacctcgagatcgcaggggctggaggagacggcgtgcaggcgctgcctgtttatgtggccgcagtggacctcgcatgctctgaagagttccttgaacttatcaagagtgcacttcttgcggccctagaagctcttattccgggctccttatttgggcttatgacattcagccacaagattgggttgtatgatgtccaaggtccgattccacttgtgaaaaatgtttttattcctccggacttggaagaagatggtctgcctgttgcccttgaagatgccatgcccctactttcttttttggctccagttgacacatgcaaggatcgaattgctgctgccctggagacactgcgacctacatcttcatgggagagaggggctgcttctgggcatgaagaggatgctgttttgcttggcggacgtggttttgggacagccatgtctgctttaattgagtacctaagttcaggatatggttctacttttgctttggctcgagtatttgcttttctgtctggtgctcctgattatggagctggtctgctagataccaggagatatggggagcaatatgctagtaaaggggtagacgctaaccttgcattgctccctgaacagatacctttctacagagacctagcagctgttgctgttcagtcaggagtttgcatagacatatttgctgtaactgatgaatacacggatttggcttcactgaagtttttaagtattgaaagtggtggatatctatttctttatgcaaatgcagatgattcaacacttcctcaagacatataccgcttactaagtcgaccctacgcatttggttgtgttctaaggctgagaacatcttcagattttgaaccaggcaattctatcgcttttcagtacagcgtgattgaacctgccaaggagacatcaggcgatggatcacaatcatctgcaagttataagttctctctaaagaggcggctgagaataagaacattgcagtaccgtccagctaggaatatcagtgaaatttatgacagtgtagatccagaggttgtactgcatatccttgttcataaggttattttagaatgcgtggataagggggttagagaaggcaggcatcaagttcatgcttggctatccctccttgcagcccgcttcaaacgatacctcaacttgtttttgcattgttgagaagtcctcttcttcgcttgcatgaagaaggtgtacacccagattacaggatatatctacaatgccttttcagtgcactggagccatcttctctagctaaagctatatatccggttttaatatcgtattcctcgcctgacaagcaagcattcccacgacacactctcagccgtgctgctctaatcatgagcgagagcccaatatttcttcttgacacatttaccaaccttatcgtttactattcctcaactgctgatccttcatttccttttcctccaccccgtgactgtcttttgagaacaacaatcaataaactgaagcaggacagatgtataaccccaaagcttacattcatccatggaggggaagatgattcaacattgtttgagagctatctcattgaagagcaagatgtcgatggatcaggtcttacaactggttcaggttttgtagccttccgtgagagcgttaggaatgttgcaggagagatcatccaggaagaaattggaagctagtttcagctagaagacccttttggtcccgctgcagagcgtataaactcggatgctttttaaccctaattaatatcgtagtagttaacttagatagccaaaatggagaaacaatgtcaaaataatatgaggggccacatgatttgtagttgcttctggcaataactgctttaggcttgattaatcagagaagcctttctggtacactggtaaaagggtcgagtacaccaatacaccgtgtgatcctggctgtctgattttttttggagaactcaaattttggtgtatattaatgctgctgtttattccgattaaattgaggccgttcgaaacctagagctaatagttagctagctaatgaactgaggatctacttg

SEQ ID NO: 63088 - DNA, 2811 bp, Zea Mays
tctccattctctgtgtgtaggcccagcgtgtcagacactgaggctgttgcagccgtgattcccgagtcccgacgactcgcgcggtcgcgcccctcgccttctccgctggtcgactggtccggctggtcttccccctcggcatcgcactcgcacctcccaagcgtgcctgaatctcagacttgtccccccactgcctcggccatggctgtgcgagccacggtctcccgcttcccggccacgccggaggcgctggagtcgtgcgccgtccagtggggcgtcgccgtgacgcccttcgccgccgtcgacgagcgcggccagcccccgaccaccggcgccggcggggaccgcatcccacgctgcgagcactgctgggcgtacttgagcagccactgcgatctggagcgctggggctggacctgcgcgctctgcggcacgctcaacggattcgacgacgaggccgagcgacggttccagcgtcccgacgcctgccccgagctcaattcctctttcgttgacctcgagatcgcagtggatgaggcaggggctggaggagacggcgtgcaggcgctgcctgtttatgtggccgcagtggacctcgcatgctctgaagagttccttgaacttatcaagagtgcacttcttgcggccctagaagctcttattccgggctccttatttgggcttatgacattcagccacaagattgggttgtatgatgtccaaggtccgattccacttgtgaaaaatgtttttattcctccggacttggaagaagatggtctgcctgttgcccttgaagatgccatgcccctactttcttttttggctccagttgacacatgcaaggatcgaattgctgctgccctggagacactgcgacctacatcttcatgggagagaggggctgcttctgggcatgaagaggatgctgttttgcttggcggacgtggttttgggacagccatgtctgctttaattgagtacctaagttcaggatatggttctacttttgctttggctcgagtatttgcttttctgtctggtgctcctgattatggagctggtctgctagataccaggagatatggggagcaatatgctagtaaaggggtagacgctaaccttgcattgctccctgaacagatacctttctacagagacctagcagctgttgctgttcagtcaggagtttgcatagacatatttgctgtaactgatgaatacacggatttggcttcactgaagtttttaagtattgaaagtggtggatatctatttctttatgcaaatgcagatgattcaacacttcctcaagacatataccgcttactaagtcgaccctacgcatttggttgtgttctaaggctgagaacatcttcagattttgaaccaggcaattcttatggacatttctttcctgaccctcagtatgaaagtgtgcaacacattatctgctgtgattcatttgccacttatgcatatgactttgagttttcccataacaacggtttctccagatcctgctgttgtgcagatcgcttttcagtacagcgtgattgaacctgccaaggagacatcaggcgatggatcacaatcatctgcaagttataagttctctctaaagaggcggctgagaataagaacattgcagtaccgtccagctaggaatatcagtgaaatttatgacagtgtagatccagaggttgtactgcatatccttgttcataaggttattttagaatgcgtggataagggggttagagaaggcaggcatcaagttcatgcttggctatccctccttgcagcccggtataatcaggtcctgagttctgatgtgcgaactccactatcgagcatagacattgacttctcgcagtgcccgcagcttcaaacgatacctcaacttgtttttgcattgttgagaagtcctcttcttcgcttgcatgaagaaggtgtacacccagattacaggatatatctacaatgccttttcagtgcactggagccatcttctctagctaaagctatatatccggttttaatatcgtattcctcgcctgacaagcaagcattcccacgacacactctcagccgtgctgctctaatcatgagcgagagcccaatatttcttcttgacacatttaccaaccttatcgtttactattcctcaactgctgatccttcatttccttttcctccaccccgtgactgtcttttgagaacaacaatcaataaactgaagcaggacagatgtataaccccaaagcttacattcatccatggaggggaagatgattcaacattgtttgagagctatctcattgaagagcaagatgtcgatggatcaggtcttacaactggttcaggttttgtagccttccgtgagagcgttaggaatgttgcaggagagatcatccaggaagaaattggaagctagtttcagctagaagacccttttggtcccgctgcagagcgtataaactcggatgctttttaaccctaattaatatcgtagtagttaacttagatagccaaaatggagaaacaatgtcaaaataatatgaggggccacatgatttgtagttgcttctggcaataactgctttaggcttgattaatcagagaagcctttctggtacactggtaaaagggtcgagtacaccaatacaccgtgtgatcctggctgtctgattttttttggagaactcaaattttggtgtatattaatgctgctgtttattccgattaaattgaggccgttcgaaacctagagctaatagttagctagctaatgaactgaggatctacttg

SEQ ID NO: 63089 - DNA, 2581 bp, Zea Mays
cgtgggatcctggtgtcagtaagggttggctgtgctgatccgccccctggacccccaccaagggtcgtcggctcatcgcgcgaatcatacgtcctcctcttgtgatcggcaatcttggcaccaccacggcctttcgctcaaggagccagccgtgtgcctgccgaccagccgtccagcccagaggcgtcgaggccgatgggcagcaagacgacgctgcccctattaataaagccgccatgcgtgtgcccggcactgcacagcatccatcgtccatcgacccacccaaccacctcctccgccccgcgcttcgcctgggtaccggcgtccgccgcgccccgtcccgtccaggaacaggaagagcaggctctgaagagttccttgaacttatcaagagtgcacttcttgcggccctagaagctcttattccgggctccttatttgggcttatgacattcagccacaagattgggttgtatgatgtccaaggtccgattccacttgtgaaaaatgtttttattcctccggacttggaagaagatggtctgcctgttgcccttgaagatgccatgcccctactttcttttttggctccagttgacacatgcaaggatcgaattgctgctgccctggagacactgcgacctacatcttcatgggagagaggggctgcttctgggcatgaagaggatgctgttttgcttggcggacgtggttttgggacagccatgtctgctttaattgagtacctaagttcaggatatggttctacttttgctttggctcgagtatttgcttttctgtctggtgctcctgattatggagctggtctgctagataccaggagatatggggagcaatatgctagtaaaggggtagacgctaaccttgcattgctccctgaacagatacctttctacagagacctagcagctgttgctgttcagtcaggagtttgcatagacatatttgctgtaactgatgaatacacggatttggcttcactgaagtttttaagtattgaaagtggtggatatctatttctttatgcaaatgcagatgattcaacacttcctcaagacatataccgcttactaagtcgaccctacgcatttggttgtgttctaaggctgagaacatcttcagattttgaaccaggcaattcttatggacatttctttcctgaccctcagtatgaaagtgtgcaacacattatctgctgtgattcatttgccacttatgcatatgactttgagttttcccataacaacggtttctccaggcatacagatcctgctgttgtgcagatcgcttttcagtacagcgtgattgaacctgccaaggagacatcaggcgatggatcacaatcatctgcaagttataagttctctctaaagaggcggctgagaataagaacattgcagtaccgtccagctaggaatatcagtgaaatttatgacagtgtagatccagaggttgtactgcatatccttgttcataaggttattttagaatgcgtggataagggggttagagaaggcaggcatcaagttcatgcttggctatccctccttgcagcccggtataatcaggtcctgagttctgatgtgcgaactccactatcgagcatagacattgacttctcgcagtgcccgcagcttcaaacgatacctcaacttgtttttgcattgttgagaagtcctcttcttcgcttgcatgaagaaggtgtacacccagattacaggatatatctacaatgccttttcagtgcactggagccatcttctctagctaaagctatatatccggttttaatatcgtattcctcgcctgacaagcaagcattcccacgacacactctcagccgtgctgctctaatcatgagcgagagcccaatatttcttcttgacacatttaccaaccttatcgtttactattcctcaactgctgatccttcatttccttttcctccaccccgtgactgtcttttgagaacaacaatcaataaactgaagcaggacagatgtataaccccaaagcttacattcatccatggaggggaagatgattcaacattgtttgagagctatctcattgaagagcaagatgtcgatggatcaggtcttacaactggttcaggttttgtagccttccgtgagagcgttaggaatgttgcaggagagatcatccaggaagaaattggaagctagtttcagctagaagacccttttggtcccgctgcagagcgtataaactcggatgctttttaaccctaattaatatcgtagtagttaacttagatagccaaaatggagaaacaatgtcaaaataatatgaggggccacatgatttgtagttgcttctggcaataactgctttaggcttgattaatcagagaagcctttctggtacactggtaaaagggtcgagtacaccaatacaccgtgtgatcctggctgtctgattttttttggagaactcaaattttggtgtatattaatgctgctgtttattccgattaaattgaggccgttcgaaacctagagctaatagttagctagctaatgaactgaggatctacttg

SEQ ID NO: 63090 - DNA, 1067 bp, Zea Mays
cgtcgcggcaggatgttgggttgcctgccggatctgtccctgatgctgggttcatttttcactcatactagcgtaatagtgttgtcacaccgtggtattttttaaacagtaacccatccacccatccatcggggatcaccaggggagcaagatgtcgactgccaccgccgcaagattgcccgctcccagatccggggcaagctatcactatcagaccgcggctccggcggccaacaccctctccttcgccggccacgcgaggcaggcggcccgcgcgtccgggccacggctgtccagcaggttcgtggcggccgcggcggccgtgctgcacaaggtgaagctggtcggcccggacgggacggagcacgagttcgaggcccccgacgacacctacatcctcgaggcggccgagaccgccggggtggagctgcccttctcctgccgcgccgggtcctgctccacctgcgccgggaggatgtcggccggcgaggtcgaccagtcggaggggtccttcctcgacgacggccagatggccgaggggtacctcctcacctgcatctcctaccccaaggcagactgcgtcatccacacccacaaggaggaggacctgtactagagattgggttgctttatgcatatgcagtggctgctccaaaggtggtggtgcgttcgttgctgttccgtgccaccagcggaaggggggtttcgttgttgagatgggctagttcttgtcatcaatttcggtcgttcgatgagatcatggcatatgagttgtggcaataatgctggcaatatggttttgcaattcaaactgcaaatgtgaccagcaatgtcaaaaactgcacactgtgtctgtgtgcgaacttgtgaaattggcattgagttcaattggctagttggctcgagatttcagttttcatctccatttagaggtcatttgggcctaagttggtgcttagtgtggccggatagaagcccactaaggccttgttcgtttgtgtcggattggtgggtcggaacgatttctagccggattgtttctctaatttatataaactttgattagg

SEQ ID NO: 63091 - DNA, 1288 bp, Zea Mays
cgtgggatcctggtgtcagtaagggttggctgtgctgatccgccccctggacccccaccaagggtcgtcggctcatcgcgcgaatcatacgtcctcctcttgtgatcggcaatcttggcaccaccacggcctttcgctcaaggagccagccgtgtgcctgccgaccagccgtccagcccagaggcgtcgaggccgatgggcagcaagacgacgctgcccctattaataaagccgccatgcgtgtgcccggcactgcacagcatccatcgtccatcgacccacccaaccacctcctccgccccgcgcttcgcctgggtaccggcgtccgccgcgccccgtcccgtccaggaacaggaagagcaggggagcaagatgtcgactgccaccgccgcaagattgcccgctcccagatccggggcaagctatcactatcagaccgcggctccggcggccaacaccctctccttcgccggccacgcgaggcaggcggcccgcgcgtccgggccacggctgtccagcaggttcgtggcggccgcggcggccgtgctgcacaaggtgaagctggtcggcccggacgggacggagcacgagttcgaggcccccgacgacacctacatcctcgaggcggccgagaccgccggggtggagctgcccttctcctgccgcgccgggtcctgctccacctgcgccgggaggatgtcggccggcgaggtcgaccagtcggaggggtccttcctcgacgacggccagatggccgaggggtacctcctcacctgcatctcctaccccaaggcagactgcgtcatccacacccacaaggaggaggacctgtactagagattgggttgctttatgcatatgcagtggctgctccaaaggtggtggtgcgttcgttgctgttccgtgccaccagcggaaggggggtttcgttgttgagatgggctagttcttgtcatcaatttcggtcgttcgatgagatcatggcatatgagttgtggcaataatgctggcaatatggttttgcaattcaaactgcaaatgtgaccagcaatgtcaaaaactgcacactgtgtctgtgtgcgaacttgtgaaattggcattgagttcaattggctagttggctcgagatttcagttttcatctccatttagaggtcatttgggcctaagttggtgcttagtgtggccggatagaagcccactaaggccttgttcgtttgtgtcggattggtgggtcggaacgatttctagccggattgtttctctaatttatataaactttgattagg

SEQ ID NO: 63092 - DNA, 1270 bp, Zea Mays
gacaacctggctgttcgtgaaacatcaacacggaagaggaaaaggagccgccaaacggagcgcaaccgagccgcaataagcggacaccaaccaaacgaatttcccctccaaaaacgagctctagagccacgcgcacgaattcgccctcgcgcgctgtctcgcagcgcgcctcgtccctccctcctggccgttcggggtccgttcggcggcgggacggaccggatcccgctccatggcggagggcttcgggcggtgggagtcggatctgctgttccccgccgccgagtgcgtgcaggactccgccgatagaatggagggtgtctaccgcttacttttgcatgaaaggaaagttatgcaggatggtacttctgatgcaaagtttcatgctccaatacaatctgagagagatgtgattactgctcttggaactaccaaatggcagctggagcaatttgagagggaagtgaatgctgctgcattctctgacaagtcaaagtcaagagaaaatgcaatcttaaaattcaggcaattcattagagcaattgcagaccagatttctcaggtggaagaaaatttggagagtcttaggctaggttctagcagaactccaaaacatttatactcaagtgaacatgatggtgatgggctggcatccttcctttctggttccagcaaggatgaccatgcatatcattccactggtacagatgaaattgtggagcttaagcttgacaatgttcctttagtaaatggttatcattccacccaagaacatacaacatatgaacacaggaattcagataaagatgtggaaggagcggggaaacgtaaatgttcatgtggagaaggtgcatgtgaaggggatcataacaatagcaatatgtttgttttggatgttgatgattctacaagtaggagatttttttgcaaaaacaaactgagcagacaataccataattttataagaaacctatggtttacaaaacgacgtcgtgatcgtgaaagctttaccaagaggaggaaggatggagaagatatggatagcttgagaaatggaaacatgctaccttctttcaatctacctcaatctggaagggttatgtatttctggcctgaagtcattaagaggagattatgtagatctggttattttacagatcataatcattctcaaatccgtttagtgacagcagtactgattgcacttgctgttctctattcattgagcaaggacgcccttccagggttcgttctcatctgcttgctgtgc

SEQ ID NO: 63093 - DNA, 1793 bp, Zea Mays
gacaacctggctgttcgtgaaacatcaacacggaagaggaaaaggagccgccaaacggagcgcaaccgagccgcaataagcggacaccaaccaaacgaatttcccctccaaaaacgagctctagagccacgcgcacgaattcgccctcgcgcgctgtctcgcagcgcgcctcgtccctccctcctggccgttcggggtccgttcggcggcgggacggaccggatcccgctccatggcggagggcttcgggcggtgggagtcggatctgctgttccccgccgccgagtgcgtgcaggactccgccgatagaatggagggtgtctaccgcttacttttgcatgaaaggaaagttatgcaggatggtacttctgatgcaaagtttcatgctccaatacaatctgagagagatgtgattactgctcttggaactaccaaatgctggagcaatttgagagggaagtgaatgctgctgcattctctgacaagtcaaagtcaagagaaaatgcaatcttaaaattcaggcaattcattagagcaattgcagaccagatttctcaggtggaagaaaatttggagagtcttaggctaggttctagcagaactccaaaacatttatactcaagtgaacatgatggtgatgggctggcatccttcctttctggttccagcaaggatgaccatgcatatcattccactggtacagatgaaattgtggagcttaagcttgacaatgttcctttagtaaatggttatcattccacccaagaacatacaacatatgaacacaggaattcagataaagatgtggaaggagcggggaaacgtaaatgttcatgtggagaaggtgcatgtgaaggggatcataacaatagcaatatgtttgttttggatgttgatgattctacaagtaggagatttttttgcaaaaacaaactgagcagacaataccataattttataagaaacctatggtttacaaaacgacgtcgtgatcgtgaaagctttaccaagaggaggaaggatggagaagatatggatagcttgagaaatggaaacatgctaccttctttcaatctacctcaatctggaagggttatgtatttctggcctgaagtcattaagaggagattatgtagatctggttattttacagatcataatcattctcaaatccgtttagtgacagcagtactgattgcacttgctgttctctgcctgctggtatcacatgtgaaatgaccgaatcccgttaatagttttggttcacgttgtgttatatattaccacagtccacgctgtactcatagtgatcacgcttgtgctgtgtcatggattctggaggaccatcattgtttcaaagcatttcaatgttgtgctccaatgtgccatgccctacagatggtagttctggttgcttgcttgtcagtggcatgatctgtcataaaaaatattattcactaatccctgtatttattcagcaccaacacatgatgtaaaagtttttgctcatgcatcatatataactcagaattggcaggtcaacgagagtggaatttctggggtgcggttacctagtgttaatatattgttatgaaagtgaaggtcgaattgaatagaaatgatccattgtattgaacctatagtttgtaactgcccttacctgggatattgtatcaaatacggtttcctgcatggacctggaactctctccaattgctgccatttcgtttgacttatcagattcattgagcaaggacgcccttccagggttcgttctcatctgcttgctgtgc

SEQ ID NO: 63094 - DNA, 1664 bp, Zea Mays
gacaacctggctgttcgtgaaacatcaacacggaagaggaaaaggagccgccaaacggagcgcaaccgagccgcaataagcggacaccaaccaaacgaatttcccctccaaaaacgagctctagagccacgcgcacgaattcgccctcgcgcgctgtctcgcagcgcgcctcgtccctccctcctggccgttcggggtccgttcggcggcgggacggaccggatcccgctccatggcggagggcttcgggcggtgggagtcggatctgctgttccccgccgccgagtgcgtgcaggactccgccgatagctggagcaatttgagagggaagtgaatgctgctgcattctctgacaagtcaaagtcaagagaaaatgcaatcttaaaattcaggcaattcattagagcaattgcagaccagatttctcaggtggaagaaaatttggagagtcttaggctaggttctagcagaactccaaaacatttatactcaagtgaacatgatggtgatgggctggcatccttcctttctggttccagcaaggatgaccatgcatatcattccactggtacagatgaaattgtggagcttaagcttgacaatgttcctttagtaaatggttatcattccacccaagaacatacaacatatgaacacaggaattcagataaagatgtggaaggagcggggaaacgtaaatgttcatgtggagaaggtgcatgtgaaggggatcataacaatagcaatatgtttgttttggatgttgatgattctacaagtaggagatttttttgcaaaaacaaactgagcagacaataccataattttataagaaacctatggtttacaaaacgacgtcgtgatcgtgaaagctttaccaagaggaggaaggatggagaagatatggatagcttgagaaatggaaacatgctaccttctttcaatctacctcaatctggaagggttatgtatttctggcctgaagtcattaagaggagattatgtagatctggttattttacagatcataatcattctcaaatccgtttagtgacagcagtactgattgcacttgctgttctctgcctgctggtatcacatgtgaaatgaccgaatcccgttaatagttttggttcacgttgtgttatatattaccacagtccacgctgtactcatagtgatcacgcttgtgctgtgtcatggattctggaggaccatcattgtttcaaagcatttcaatgttgtgctccaatgtgccatgccctacagatggtagttctggttgcttgcttgtcagtggcatgatctgtcataaaaaatattattcactaatccctgtatttattcagcaccaacacatgatgtaaaagtttttgctcatgcatcatatataactcagaattggcaggtcaacgagagtggaatttctggggtgcggttacctagtgttaatatattgttatgaaagtgaaggtcgaattgaatagaaatgatccattgtattgaacctatagtttgtaactgcccttacctgggatattgtatcaaatacggtttcctgcatggacctggaactctctccaattgctgccatttcgtttgacttatcagattcattgagcaaggacgcccttccagggttcgttctcatctgcttgctgtgc

SEQ ID NO: 63095 - DNA, 1681 bp, Zea Mays
ggaaagacaacctggctgttcgtgaaacatcaacacggaagaggaaaaggagccgccaaacggagcgcaaccgagccgcaataagcggacaccaaccaaacgaatttcccctccaaaaacgagctctagagccacgcgcacgaattcgccctcgcgcgctgtctcgcagcgcgcctcgtccctccctcctggccgttcggggtccgttcggcggcgggacggaccggatcccgctccatggcggagggcttcgggcggtgggagtcggatctgctgttccccgccgccgagtgcgtgcaggactccgccgatagaatggagggtgtctaccgcttacttttgcatgaaaggaaagttatgcaggatggtacttctgatgcaaagtttcatgctccaatacaatctgagagagatgtgattactgctcttggaactaccaaatggcagctggagcaatttgagagggaagtgaatgctgctgcattctctgacaagtcaaagtcaagagaaaatgcaatcttaaaattcaggcaattcattagagcaattgcagaccagatttctcaggtggaagaaaatttggagagtcttaggctaggttctagcagaactccaaaacatttatactcaagtgaacatgatggtgatgggctggcatccttcctttctggttccagcaaggatgaccatgcatatcattccactggtacagatgaaattgtggagcttaagcttgacaatgttcctttagtaaatggttatcattccacccaagaacatacaacatatgaacacaggaattcagataaagatgtggaaggagcggggaaacgtaaatgttcatgtggagaaggtgcatgtgaaggggatcataacaatagcaatatgtttgttttggatgttgatgattctacaagtaggagatttttttgcaaaaacaaactgagcagacaataccataattttataagaaacctatggtttacaaaacgacgtcgtgatcgtgaaagctttaccaagaggaggaaggatggagaagatatggatagcttgagaaatggaaacatgctaccttctttcaatctacctcaatctggaagggcctgctggtatcacatgtgaaatgaccgaatcccgttaatagttttggttcacgttgtgttatatattaccacagtccacgctgtactcatagtgatcacgcttgtgctgtgtcatggattctggaggaccatcattgtttcaaagcatttcaatgttgtgctccaatgtgccatgccctacagatggtagttctggttgcttgcttgtcagtggcatgatctgtcataaaaaatattattcactaatccctgtatttattcagcaccaacacatgatgtaaaagtttttgctcatgcatcatatataactcagaattggcaggtcaacgagagtggaatttctggggtgcggttacctagtgttaatatattgttatgaaagtgaaggtcgaattgaatagaaatgatccattgtattgaacctatagtttgtaactgcccttacctgggatattgtatcaaatacggtttcctgcatggacctggaactctctccaattgctgccatttcgtttgacttatcagattcattgagcaaggacgcccttccagggttcgttctcatctgcttgctgtgc

SEQ ID NO: 63096 - DNA, 6107 bp, Zea Mays
gtcccctccagccgtccagcgcccacggtggtgcgtcctctccgagacaccgctcgccggacctcttccgagtttgggaaactctggcgccatgaatccaatagtatagcacacgtcgcatgggagaaggcacattccaagagcagatgatccacacacacggtttcagcccggtggcccaacggcgcagctatcaccatccagtaacatccccggaattcacccctgccttctgttctgctgttcaccccgcgtgcgcgttcttcctctcgtgcgacaactgggcgaccgccgccgtcctacggcaggtggtcacttcttcgtcggttccttcgctggcgacgagcacccaccaagccctggaagaagcaaggattcaccctcaagctcgaaactgaacgcaactcccgaagacccggtgaagccatgtctgcggggagaggcgatccaaacacccctgccaacaggcctctgttcctgagtgctggggtgcccaacttaggctgtcacaatgttgcagctccagctgcagcaggcaacagcggctcgatcgcctcgcaagtcttattctccccatgctccacgtctgtcctgaatactattcaggaggttcctgctccacaatctgctctgttgagtccgataaaccgtgcaactgaacaaggtgatgtgccctgcatccagccatcctggaatatgcctgggggttgcacgcaggtgcctattaatatcatagtgttccatagggaactcactagaaggggttcgaggccgcagttgtcgccgtcggccactgccttacctgatgtttcagagggagcttccattcggcttgctgggagtaatttcttgtcacatggaagaacacctagcatcgttgcaggtgatatgacaacgaattcttcacagctagccactgcagataaatacaattcagagcatcggatgaattgtttacatgatgaagcatccaagactgaaaatggaaaaggaagtacccaacttccacaattagcaacagcaattttccgtgacagctacaatgatttggaatcagtggttcctgcagctacctgggaaacacgagtgcaacattctcaagaatcaaccacctgtcttgcagaaagtaccactgatgacaacattcatatgtaccaatctatgcaaaaaaggctcaagacacaaatcaacaagagtgaacacacaccattgtcagcaccaactgtacccaaggagaaaacactgactcaaattgagacgcagctagcaagtgccgagaaaaccgaaatgttcaggaatgaggaaaccccagcgctgaaaatgaaggctcggaagaaaaaacacagaccaaaggtaatcagagagaataagccagccaaagtgcagaaacctgattcaacaccagatggaaaatctccgaaccaaaaggtcaagagaagttatgtccggaagaaaagaaacctcagctctctggagaattgctctggtcctgttagcgatcaatcaatctctggagcaacaggagttgcagctagaagcagaacatcatcagttcgacgaagtctgcaatttgaatccaaagaacaaggattgcagggcggccattcgtcaatggccaacatacaccatcacaactatgagaaacctggccatgctcaaagttctttctactcagagtcagaagtgcagactgggcgtgtgatgcaagaaggtatggagaattcaccaggagaattagctttcgacatgagtcgcagactgaacaaatttttagatgagtacatacatttgccagatatgctaaaacctacacaagaagtttcggctgcaacttctgcatcatttagtacggaactggcaagggaagaagataatgtgggaagaacttgcaaacctgatggcaaaagtaagtgcagtttgtttgctgatgaaagggtggtaaaccccacaatagaagggaacaaaaaggacttggaattaaactattctgatgctgatggtcttgtttcctcagctaggtctttacctcaaatggatcccacaagaagtcagatgggtaaggtgtcggaagtggaaaaccccacacaccatagcaatggttcgctacctggcacacgggactctgttgtcttgagggctgcagctgagatgttcgcatttttccaagcgggtgcaataaaaaagaagcgatctgcccgactccgcagaaattcccccttttatactatggatcttaagaataatactctacaagcatcaacaagactgccacagccatgcatggatgcgctgcatagaagttcttgcattaagtttttgaccaaaaaacgttcagaaaaggcaagaccgcactgttccagtgtaattcaaccaaatgatgagctgaaggacaggctttcagctggaagcactttttatggcgcaactaatggatgcaaaatatcagaagagagttctccaaacttttcatctcagaccctggacaataaaagaatcaacgttgatactcattgtgaagtagcagaagggagatcaaccaacacatcaacaggaccctatatggattacgttcaaggagttgcatcaaagttgaagcatcttgatttgaatactgaacaggtgcagagaactgagatgcatttatctctgaccacaccagctgttatttcttttgagggaacaagtggtccttcaaatgctcttgtcccatatggtggtgtggtgatggttcccaatgagaggcccttgcagttagtcaaaaagcagcggcctcgtgctaaggttgacttggattttgagacgacgagggtttggaaccttttgatggggaaatcagccgagtcttatgggactgatgttgaaaaggagagatggtggcagcaagaaagagaagtgtttcaaagccgtgctaattcgtttatagcacgcatgcgacttgttcaaggggacaggcgcttttctccttggaaaggatctgtagtcgattctgtagtaggagtgttcctcactcagaatgtagctgatcatctttcaagctctgcctatatggcccttgccgcaagttttccttcacggccagtcaacaataattgtaaggatgatggtaccacagaagacaataaacaaaccaccaggatgagtgagctagtaggagagaaaagtgtgtttgaccttttctacaatggtgttagacctgatctagaagtgggatgtgaggaggtatcaatgacttgcaagaagacacacatggaaccaacagacaatactagggatagtgaatttattgaaggtgaaacctattcctttgattacaaatcaacagatgaaagcgtttgcaatcacaaagggataggtatagaacataaagaacaacaattaccagatttctcctcagcagaattaactgtgtctacagaactcgtgcagcagatacaaatccagaagatctcatcctctcaaattttaacttcagaaaccatacaatcaagattatctttgagttctgagatacctagaaattttgtttgtggtggttctgctgcagcttatcagcagctgggaagcaatttcgaccagggaagctcattaacagaaaatgatgccacagccagtgaaattgaatgtcacagactccaaatggctgcaataaatgattatggatttggtaaacctgagattccttctagttcctcaatgccatttttcttggctgttgatcctcaacaactgaaattgagaaatgagacaaatgtttcttcaacatcttccaacattccttcagattctgcatcaccaaacttgaaaaatggcacggatcctcttttgatgccatttaattcctacatggcagattggagcagcgataagataacttacaccactctgaacactccaaaaataagcacagaacttccagtcaagttacaccatgacaaaagtagtagctttgaagcaccaaacctgaaggagcatgaatcagtctttgcaacacatgaaatgacggtagaagcaacaagaaaagaagacgaacacacatcaaaatctagttttacttcctacaatggagtaccagatacagctgcacaagcatcaaagccaaagaaaacaagaaccacaactgcaaagaacacagagaattttgactgggaaaaattacgaaggcaggcttgtagtgaagggcagatgaaacaaagaagttttgaaagaagagactctatagattgggaagcagtacggtgtgcagatgtacgaagaatatctcatgccattcgggagagggggatgaataatgttttagcagagcgaatccagaattttctgaatcgtttggttagagatcatgggagcattgaccttgagtggctaagatatattcccccagactcagcgaaggattacctactaagtatacggggactggggcttaaaagtgttgaatgtgttcgtcttctcacactgcatcatcttgctttccctgttgacaccaatgttggtcgtatatgtgtaagactgggatgggtgcccattcaacctcttcctgaatctctacagctacatctcttggagctatatcctatcttggaaactatacaaaagtatctttggcctcgcctttgtaaactcgatcagcagacactgtatgagctgcattatcagatgattacatttggaaaggtcttttgtaccaaaagacagccaaattgcaatgcatgcccaatgaggagtgagtgcaagcattttgcaagtgcatttgcaagtgcaaggcttgcacttcctgctccccaggaggaaagcttagtgaagttgagcaatccatttgctttccagaatagcagcatgcatgctatgaattcgactcacctacctcgccttgaggggagtatccattcaagggagtttcttcctaagaattcagagccaataatcgaggagcctgcaagtccaagagaggaaagacctccagaaaccatggaaaatgatattgaagatttttatgaagatggtgaaatcccaacaataaagcttaacatggaagcttttgcacaaaacttggagaattgcattaaagaaagcaataacgaactccagtctgatgatattgcaaaagcattggttgctattagcactgaagcagcttcgattcctgtaccgaaactaaagaatgtgcttaggcttcgaacagaacactatgtgtatgagcttccagatgcacatccacttttacaacagctaggacttgaccaacgggaacatgatgatcctaccccatacttattggccatatggacaccagatggaataaaggaaataactaagacaccaaaaccatgctgtgaccctcaaatgggaggcgatttatgcaataatgaaatgtgccacaattgtactgcagagaaagaaaaccaatctagatatgtcagaggcacaattctggttccttgtcgaacagctatgaggggtagtttcccacttaatggcacttactttcaagtcaatgaggtatttgctgaccacagatctagccacaacccaatccatgtggaaagggagatgctatggaacttgcaaaggcgcatggtctttttcgggacttcagtacccaccatattcaaaggtctaagaacagaagaaatacaacaatgcttctggaggggatttgtctgtgtgcgaggattcgacatggagactagagcaccaaggcctctgtgcccccatttgcacattatagcaaggccgaaggcccgcaagacagcagcaactgagcaagtactctaatcagcaaagatatcagttttatgaacatcatgtttattgtgatatgacatcaatagctctcgacctatgcatggaatcatattacttcctgcctggcgatggccattgtttaggaaatttaagccatggatggggtccgagactgttagttctgagacgagaggactaatgaagcatcaggaagcaccaataattttcacttttttgtttcagatctactgtatgtaaattagcatctagctgttagtccaaactaccttatcaacatttcatttggttaacatttgttctgagtattgggaagcctgccagaattttgttttcgtacctgt

SEQ ID NO: 63097 - DNA, 6008 bp, Zea Mays
gtcccctccagccgtccagcgcccacggtggtgcgtcctctccgagacaccgctcgccggacctcttccgagtttgggaaactctggcgccatgaatccaatagtatagcacacgtcgcatgggagaaggcacattccaagagcagatgatccacacacacggtttcagcccggtggcccaacggcgcagctatcaccatccagtaacatccccggaattcacccctgccttctgttctgctgttcaccccgcgtgcgcgttcttcctctcgtgcgacaactgggcgaccgccgccgtcctacggcaggtggtcacttcttcgtcggttccttcgctggcgacgagcacccaccaagccctggaagaagcaaggattcaccctcaagctcgaaactgaacgcaactcccgaagacccggtgaagccatgtctgcggggagaggcgatccaaacacccctgccaacaggcctctgttcctgagtgctggggtgcccaacttaggctgtcacaatgttgcagctccagctgcagcaggcaacagcggctcgatcgcctcgcaagtcttattctccccatgctccacgtctgtcctgaatactattcaggaggttcctgctccacaatctgctctgttgagtccgataaaccgtgcaactgaacaaggtgatgtgccctgcatccagccatcctggaatatgcctgggggttgcacgcaggtgcctattaatatcatagtgttccatagggaactcactagaaggggttcgaggccgcagttgtcgccgtcggccactgccttacctgatgtttcagagggagcttccattcggcttgctgggagtaatttcttgtcacatggaagaacacctagcatcgttgcaggtgatatgacaacgaattcttcacagctagccactgcagataaatacaattcagagcatcggatgaattgtttacatgatgaagcatccaagactgaaaatggaaaaggaagtacccaacttccacaattagcaacagcaattttccgtgacagctacaatgatttggaatcagtggttcctgcagctacctgggaaacacgagtgcaacattctcaagaatcaaccacctgtcttgcagaaagtaccactgatgacaacattcatatgtaccaatctatgcaaaaaaggctcaagacacaaatcaacaagagtgaacacacaccattgtcagcaccaactgtacccaaggagaaaacactgactcaaattgagacgcagctagcaagtgccgagaaaaccgaaatgttcaggaatgaggaaaccccagcgctgaaaatgaaggctcggaagaaaaaacacagaccaaaggtaatcagagagaataagccagccaaagtgcagaaacctgattcaacaccagatggaaaatctccgaaccaaaaggtcaagagaagttatgtccggaagaaaagaaacctcagctctctggagaattgctctggtcctgttagcgatcaatcaatctctggagcaacaggagttgcagctagaagcagaacatcatcagttcgacgaagtctgcaatttgaatccaaagaacaaggattgcagggcggccattcgtcaatggccaacatacaccatcacaactatgagaaacctggccatgctcaaagttctttctactcagagtcagaagtgcagactgggcgtgtgatgcaagaaggtatggagaattcaccaggagaattagctttcgacatgagtcgcagactgaacaaatttttagatgagtacatacatttgccagatatgctaaaacctacacaagaagtttcggctgcaacttctgcatcatttagtacggaactggcaagggaagaagataatgtgggaagaacttgcaaacctgatggcaaaagtaagtgcagtttgtttgctgatgaaagggtggtaaaccccacaatagaagggaacaaaaaggacttggaattaaactattctgatgctgatggtcttgtttcctcagctaggtctttacctcaaatggatcccacaagaagtcagatgggtaaggtgtcggaagtggaaaaccccacacaccatagcaatggttcgctacctggcacacgggactctgttgtcttgagggctgcagctgagatgttcgcatttttccaagcgggtgcaataaaaaagaagcgatctgcccgactccgcagaaattcccccttttatactatggatcttaagaataatactctacaagcatcaacaagactgccacagccatgcatggatgcgctgcatagaagttcttgcattaagtttttgaccaaaaaacgttcagaaaaggcaagaccgcactgttccagtgtaattcaaccaaatgatgagctgaaggacaggctttcagctggaagcactttttatggcgcaactaatggatgcaaaatatcagaagagagttctccaaacttttcatctcagaccctggacaataaaagaatcaacgttgatactcattgtgaagtagcagaagggagatcaaccaacacatcaacaggaccctatatggattacgttcaaggagttgcatcaaagttgaagcatcttgatttgaatactgaacaggtgcagagaactgagatgcatttatctctgaccacaccagctgttatttcttttgagggaacaagtggtccttcaaatgctcttgtcccatatggtggtgtggtgatggttcccaatgagaggcccttgcagttagtcaaaaagcagcggcctcgtgctaaggttgacttggattttgagacgacgagggtttggaaccttttgatggggaaatcagccgagtcttatgggactgatgttgaaaaggagagatggtggcagcaagaaagagaagtgtttcaaagccgtgctaattcgtttatagcacgcatgcgacttgttcaaggggacaggcgcttttctccttggaaaggatctgtagtcgattctgtagtaggagtgttcctcactcagaatgtagctgatcatctttcaagctctgcctatatggcccttgccgcaagttttccttcacggccagtcaacaataattgtaaggatgatggtaccacagaagacaataaacaaaccaccaggatgagtgagctagtaggagagaaaagtgtgtttgaccttttctacaatggtgttagacctgatctagaagtgggatgtgaggaggtatcaatgacttgcaagaagacacacatggaaccaacagacaatactagggatagtgaatttattgaaggtgaaacctattcctttgattacaaatcaacagatgaaagcgtttgcaatcacaaagggataggtatagaacataaagaacaacaattaccagatttctcctcagcagaattaactgtgtctacagaactcgtgcagcagatacaaatccagaagatctcatcctctcaaattttaacttcagaaaccatacaatcaagattatctttgagttctgagatacctagaaattttgtttgtggtggttctgctgcagcttatcagcagctgggaagcaatttcgaccagggaagctcattaacagaaaatgatgccacagccagtgaaattgaatgtcacagactccaaatggctgcaataaatgattatggatttggtaaacctgagattccttctagttcctcaatgccatttttcttggctgttgatcctcaacaactgaaattgagaaatgagacaaatgtttcttcaacatcttccaacattccttcagattctgcatcaccaaacttgaaaaatggcacggatcctcttttgatgccatttaattcctacatggcagattggagcagcgataagataacttacaccactctgaacactccaaaaataagcacagaacttccagtcaagttacaccatgacaaaagtagtagctttgaagcaccaaacctgaaggagcatgaatcagtctttgcaacacatgaaatgacggtagaagcaacaagaaaagaagacgaacacacatcaaaatctagttttacttcctacaatggagtaccagatacagctgcacaagcatcaaagccaaagaaaacaagaaccacaactgcaaagaacacagagaattttgactgggaaaaattacgaaggcaggcttgtagtgaagggcagatgaaacaaagaagttttgaaagaagagactctatagattgggaagcagtacggtgtgcagatgtacgaagaatatctcatgccattcgggagagggggatgaataatgttttagcagagcgaatccagaattttctgaatcgtttggttagagatcatgggagcattgaccttgagtggctaagatatattcccccagactcagcgaaggattacctactaagtatacggggactggggcttaaaagtgttgaatgtgttcgtcttctcacactgcatcatcttgctttccctgttgacaccaatgttggtcgtatatgtgtaagactgggatgggtgcccattcaacctcttcctgaatctctacagctacatctcttggagctatatcctatcttggaaactatacaaaagtatctttggcctcgcctttgtaaactcgatcagcagacactgtatgagctgcattatcagatgattacatttggaaaggtcttttgtaccaaaagacagccaaattgcaatgcatgctatgaattcgactcacctacctcgccttgaggggagtatccattcaagggagtttcttcctaagaattcagagccaataatcgaggagcctgcaagtccaagagaggaaagacctccagaaaccatggaaaatgatattgaagatttttatgaagatggtgaaatcccaacaataaagcttaacatggaagcttttgcacaaaacttggagaattgcattaaagaaagcaataacgaactccagtctgatgatattgcaaaagcattggttgctattagcactgaagcagcttcgattcctgtaccgaaactaaagaatgtgcttaggcttcgaacagaacactatgtgtatgagcttccagatgcacatccacttttacaacagctaggacttgaccaacgggaacatgatgatcctaccccatacttattggccatatggacaccagatggaataaaggaaataactaagacaccaaaaccatgctgtgaccctcaaatgggaggcgatttatgcaataatgaaatgtgccacaattgtactgcagagaaagaaaaccaatctagatatgtcagaggcacaattctggttccttgtcgaacagctatgaggggtagtttcccacttaatggcacttactttcaagtcaatgaggtatttgctgaccacagatctagccacaacccaatccatgtggaaagggagatgctatggaacttgcaaaggcgcatggtctttttcgggacttcagtacccaccatattcaaaggtctaagaacagaagaaatacaacaatgcttctggaggggatttgtctgtgtgcgaggattcgacatggagactagagcaccaaggcctctgtgcccccatttgcacattatagcaaggccgaaggcccgcaagacagcagcaactgagcaagtactctaatcagcaaagatatcagttttatgaacatcatgtttattgtgatatgacatcaatagctctcgacctatgcatggaatcatattacttcctgcctggcgatggccattgtttaggaaatttaagccatggatggggtccgagactgttagttctgagacgagaggactaatgaagcatcaggaagcaccaataattttcacttttttgtttcagatctactgtatgtaaattagcatctagctgttagtccatgtaagatgccattgctatcctttctgagacaaactaccttatcaacatttcatttggttaacatttgttctgagtattgggaagcctgccagaattttgttttcgtacctgt

SEQ ID NO: 63098 - DNA, 5972 bp, Zea Mays
ccaaaaccgagtttgctcgtcccctccagccgtccagcgcccacggtggtgcgtcctctccgagacaccgctcgccggacctcttccgagtttgggaaactctggcgccatgaatccaatagtatagcacacgtcgcatgggagaaggcacattccaagagcagatgatccacacacacggtttcagcccggtggcccaacggcgcagctatcaccatccagccctggaagaagcaaggattcaccctcaagctcgaaactgaacgcaactcccgaagacccggtgaagccatgtctgcggggagaggcgatccaaacacccctgccaacaggcctctgttcctgagtgctggggtgcccaacttaggctgtcacaatgttgcagctccagctgcagcaggcaacagcggctcgatcgcctcgcaagtcttattctccccatgctccacgtctgtcctgaatactattcaggaggttcctgctccacaatctgctctgttgagtccgataaaccgtgcaactgaacaaggtgatgtgccctgcatccagccatcctggaatatgcctgggggttgcacgcaggtgcctattaatatcatagtgttccatagggaactcactagaaggggttcgaggccgcagttgtcgccgtcggccactgccttacctgatgtttcagagggagcttccattcggcttgctgggagtaatttcttgtcacatggaagaacacctagcatcgttgcaggtgatatgacaacgaattcttcacagctagccactgcagataaatacaattcagagcatcggatgaattgtttacatgatgaagcatccaagactgaaaatggaaaaggaagtacccaacttccacaattagcaacagcaattttccgtgacagctacaatgatttggaatcagtggttcctgcagctacctgggaaacacgagtgcaacattctcaagaatcaaccacctgtcttgcagaaagtaccactgatgacaacattcatatgtaccaatctatgcaaaaaaggctcaagacacaaatcaacaagagtgaacacacaccattgtcagcaccaactgtacccaaggagaaaacactgactcaaattgagacgcagctagcaagtgccgagaaaaccgaaatgttcaggaatgaggaaaccccagcgctgaaaatgaaggctcggaagaaaaaacacagaccaaaggtaatcagagagaataagccagccaaagtgcagaaacctgattcaacaccagatggaaaatctccgaaccaaaaggtcaagagaagttatgtccggaagaaaagaaacctcagctctctggagaattgctctggtcctgttagcgatcaatcaatctctggagcaacaggagttgcagctagaagcagaacatcatcagttcgacgaagtctgcaatttgaatccaaagaacaaggattgcagggcggccattcgtcaatggccaacatacaccatcacaactatgagaaacctggccatgctcaaagttctttctactcagagtcagaagtgcagactgggcgtgtgatgcaagaaggtatggagaattcaccaggagaattagctttcgacatgagtcgcagactgaacaaatttttagatgagtacatacatttgccagatatgctaaaacctacacaagaagtttcggctgcaacttctgcatcatttagtacggaactggcaagggaagaagataatgtgggaagaacttgcaaacctgatggcaaaagtaagtgcagtttgtttgctgatgaaagggtggtaaaccccacaatagaagggaacaaaaaggacttggaattaaactattctgatgctgatggtcttgtttcctcagctaggtctttacctcaaatggatcccacaagaagtcagatgggtaaggtgtcggaagtggaaaaccccacacaccatagcaatggttcgctacctggcacacgggactctgttgtcttgagggctgcagctgagatgttcgcatttttccaagcgggtgcaataaaaaagaagcgatctgcccgactccgcagaaattcccccttttatactatggatcttaagaataatactctacaagcatcaacaagactgccacagccatgcatggatgcgctgcatagaagttcttgcattaagtttttgaccaaaaaacgttcagaaaaggcaagaccgcactgttccagtgtaattcaaccaaatgatgagctgaaggacaggctttcagctggaagcactttttatggcgcaactaatggatgcaaaatatcagaagagagttctccaaacttttcatctcagaccctggacaataaaagaatcaacgttgatactcattgtgaagtagcagaagggagatcaaccaacacatcaacaggaccctatatggattacgttcaaggagttgcatcaaagttgaagcatcttgatttgaatactgaacaggtgcagagaactgagatgcatttatctctgaccacaccagctgttatttcttttgagggaacaagtggtccttcaaatgctcttgtcccatatggtggtgtggtgatggttcccaatgagaggcccttgcagttagtcaaaaagcagcggcctcgtgctaaggttgacttggattttgagacgacgagggtttggaaccttttgatggggaaatcagccgagtcttatgggactgatgttgaaaaggagagatggtggcagcaagaaagagaagtgtttcaaagccgtgctaattcgtttatagcacgcatgcgacttgttcaaggggacaggcgcttttctccttggaaaggatctgtagtcgattctgtagtaggagtgttcctcactcagaatgtagctgatcatctttcaagctctgcctatatggcccttgccgcaagttttccttcacggccagtcaacaataattgtaaggatgatggtaccacagaagacaataaacaaaccaccaggatgagtgagctagtaggagagaaaagtgtgtttgaccttttctacaatggtgttagacctgatctagaagtgggatgtgaggaggtatcaatgacttgcaagaagacacacatggaaccaacagacaatactagggatagtgaatttattgaaggtgaaacctattcctttgattacaaatcaacagatgaaagcgtttgcaatcacaaagggataggtatagaacataaagaacaacaattaccagatttctcctcagcagaattaactgtgtctacagaactcgtgcagcagatacaaatccagaagatctcatcctctcaaattttaacttcagaaaccatacaatcaagattatctttgagttctgagatacctagaaattttgtttgtggtggttctgctgcagcttatcagcagctgggaagcaatttcgaccagggaagctcattaacagaaaatgatgccacagccagtgaaattgaatgtcacagactccaaatggctgcaataaatgattatggatttggtaaacctgagattccttctagttcctcaatgccatttttcttggctgttgatcctcaacaactgaaattgagaaatgagacaaatgtttcttcaacatcttccaacattccttcagattctgcatcaccaaacttgaaaaatggcacggatcctcttttgatgccatttaattcctacatggcagattggagcagcgataagataacttacaccactctgaacactccaaaaataagcacagaacttccagtcaagttacaccatgacaaaagtagtagctttgaagcaccaaacctgaaggagcatgaatcagtctttgcaacacatgaaatgacggtagaagcaacaagaaaagaagacgaacacacatcaaaatctagttttacttcctacaatggagtaccagatacagctgcacaagcatcaaagccaaagaaaacaagaaccacaactgcaaagaacacagagaattttgactgggaaaaattacgaaggcaggcttgtagtgaagggcagatgaaacaaagaagttttgaaagaagagactctatagattgggaagcagtacggtgtgcagatgtacgaagaatatctcatgccattcgggagagggggatgaataatgttttagcagagcgaatccagaattttctgaatcgtttggttagagatcatgggagcattgaccttgagtggctaagatatattcccccagactcagcgaaggattacctactaagtatacggggactggggcttaaaagtgttgaatgtgttcgtcttctcacactgcatcatcttgctttccctgttgacaccaatgttggtcgtatatgtgtaagactgggatgggtgcccattcaacctcttcctgaatctctacagctacatctcttggagctatatcctatcttggaaactatacaaaagtatctttggcctcgcctttgtaaactcgatcagcagacactgtatgagctgcattatcagatgattacatttggaaaggtcttttgtaccaaaagacagccaaattgcaatgcatgcccaatgaggagtgagtgcaagcattttgcaagtgcatttgcaagtgcaaggcttgcacttcctgctccccaggaggaaagcttagtgaagttgagcaatccatttgctttccagaatagcagcatgcatgctatgaattcgactcacctacctcgccttgaggggagtatccattcaagggagtttcttcctaagaattcagagccaataatcgaggagcctgcaagtccaagagaggaaagacctccagaaaccatggaaaatgatattgaagatttttatgaagatggtgaaatcccaacaataaagcttaacatggaagcttttgcacaaaacttggagaattgcattaaagaaagcaataacgaactccagtctgatgatattgcaaaagcattggttgctattagcactgaagcagcttcgattcctgtaccgaaactaaagaatgtgcttaggcttcgaacagaacactatgtgtatgagcttccagatgcacatccacttttacaacagctaggacttgaccaacgggaacatgatgatcctaccccatacttattggccatatggacaccagatggaataaaggaaataactaagacaccaaaaccatgctgtgaccctcaaatgggaggcgatttatgcaataatgaaatgtgccacaattgtactgcagagaaagaaaaccaatctagatatgtcagaggcacaattctggttccttgtcgaacagctatgaggggtagtttcccacttaatggcacttactttcaagtcaatgaggtatttgctgaccacagatctagccacaacccaatccatgtggaaagggagatgctatggaacttgcaaaggcgcatggtctttttcgggacttcagtacccaccatattcaaaggtctaagaacagaagaaatacaacaatgcttctggaggggatttgtctgtgtgcgaggattcgacatggagactagagcaccaaggcctctgtgcccccatttgcacattatagcaaggccgaaggcccgcaagacagcagcaactgagcaagtactctaatcagcaaagatatcagttttatgaacatcatgtttattgtgatatgacatcaatagctctcgacctatgcatggaatcatattacttcctgcctggcgatggccattgtttaggaaatttaagccatggatggggtccgagactgttagttctgagacgagaggactaatgaagcatcaggaagcaccaataattttcacttttttgtttcagatctactgtatgtaaattagcatctagctgttagtccaaactaccttatcaacatttcatttggttaacatttgttctgagtattgggaagcctgccagaattttgttttcgtacctgt

SEQ ID NO: 63099 - DNA, 5873 bp, Zea Mays
ccaaaaccgagtttgctcgtcccctccagccgtccagcgcccacggtggtgcgtcctctccgagacaccgctcgccggacctcttccgagtttgggaaactctggcgccatgaatccaatagtatagcacacgtcgcatgggagaaggcacattccaagagcagatgatccacacacacggtttcagcccggtggcccaacggcgcagctatcaccatccagccctggaagaagcaaggattcaccctcaagctcgaaactgaacgcaactcccgaagacccggtgaagccatgtctgcggggagaggcgatccaaacacccctgccaacaggcctctgttcctgagtgctggggtgcccaacttaggctgtcacaatgttgcagctccagctgcagcaggcaacagcggctcgatcgcctcgcaagtcttattctccccatgctccacgtctgtcctgaatactattcaggaggttcctgctccacaatctgctctgttgagtccgataaaccgtgcaactgaacaaggtgatgtgccctgcatccagccatcctggaatatgcctgggggttgcacgcaggtgcctattaatatcatagtgttccatagggaactcactagaaggggttcgaggccgcagttgtcgccgtcggccactgccttacctgatgtttcagagggagcttccattcggcttgctgggagtaatttcttgtcacatggaagaacacctagcatcgttgcaggtgatatgacaacgaattcttcacagctagccactgcagataaatacaattcagagcatcggatgaattgtttacatgatgaagcatccaagactgaaaatggaaaaggaagtacccaacttccacaattagcaacagcaattttccgtgacagctacaatgatttggaatcagtggttcctgcagctacctgggaaacacgagtgcaacattctcaagaatcaaccacctgtcttgcagaaagtaccactgatgacaacattcatatgtaccaatctatgcaaaaaaggctcaagacacaaatcaacaagagtgaacacacaccattgtcagcaccaactgtacccaaggagaaaacactgactcaaattgagacgcagctagcaagtgccgagaaaaccgaaatgttcaggaatgaggaaaccccagcgctgaaaatgaaggctcggaagaaaaaacacagaccaaaggtaatcagagagaataagccagccaaagtgcagaaacctgattcaacaccagatggaaaatctccgaaccaaaaggtcaagagaagttatgtccggaagaaaagaaacctcagctctctggagaattgctctggtcctgttagcgatcaatcaatctctggagcaacaggagttgcagctagaagcagaacatcatcagttcgacgaagtctgcaatttgaatccaaagaacaaggattgcagggcggccattcgtcaatggccaacatacaccatcacaactatgagaaacctggccatgctcaaagttctttctactcagagtcagaagtgcagactgggcgtgtgatgcaagaaggtatggagaattcaccaggagaattagctttcgacatgagtcgcagactgaacaaatttttagatgagtacatacatttgccagatatgctaaaacctacacaagaagtttcggctgcaacttctgcatcatttagtacggaactggcaagggaagaagataatgtgggaagaacttgcaaacctgatggcaaaagtaagtgcagtttgtttgctgatgaaagggtggtaaaccccacaatagaagggaacaaaaaggacttggaattaaactattctgatgctgatggtcttgtttcctcagctaggtctttacctcaaatggatcccacaagaagtcagatgggtaaggtgtcggaagtggaaaaccccacacaccatagcaatggttcgctacctggcacacgggactctgttgtcttgagggctgcagctgagatgttcgcatttttccaagcgggtgcaataaaaaagaagcgatctgcccgactccgcagaaattcccccttttatactatggatcttaagaataatactctacaagcatcaacaagactgccacagccatgcatggatgcgctgcatagaagttcttgcattaagtttttgaccaaaaaacgttcagaaaaggcaagaccgcactgttccagtgtaattcaaccaaatgatgagctgaaggacaggctttcagctggaagcactttttatggcgcaactaatggatgcaaaatatcagaagagagttctccaaacttttcatctcagaccctggacaataaaagaatcaacgttgatactcattgtgaagtagcagaagggagatcaaccaacacatcaacaggaccctatatggattacgttcaaggagttgcatcaaagttgaagcatcttgatttgaatactgaacaggtgcagagaactgagatgcatttatctctgaccacaccagctgttatttcttttgagggaacaagtggtccttcaaatgctcttgtcccatatggtggtgtggtgatggttcccaatgagaggcccttgcagttagtcaaaaagcagcggcctcgtgctaaggttgacttggattttgagacgacgagggtttggaaccttttgatggggaaatcagccgagtcttatgggactgatgttgaaaaggagagatggtggcagcaagaaagagaagtgtttcaaagccgtgctaattcgtttatagcacgcatgcgacttgttcaaggggacaggcgcttttctccttggaaaggatctgtagtcgattctgtagtaggagtgttcctcactcagaatgtagctgatcatctttcaagctctgcctatatggcccttgccgcaagttttccttcacggccagtcaacaataattgtaaggatgatggtaccacagaagacaataaacaaaccaccaggatgagtgagctagtaggagagaaaagtgtgtttgaccttttctacaatggtgttagacctgatctagaagtgggatgtgaggaggtatcaatgacttgcaagaagacacacatggaaccaacagacaatactagggatagtgaatttattgaaggtgaaacctattcctttgattacaaatcaacagatgaaagcgtttgcaatcacaaagggataggtatagaacataaagaacaacaattaccagatttctcctcagcagaattaactgtgtctacagaactcgtgcagcagatacaaatccagaagatctcatcctctcaaattttaacttcagaaaccatacaatcaagattatctttgagttctgagatacctagaaattttgtttgtggtggttctgctgcagcttatcagcagctgggaagcaatttcgaccagggaagctcattaacagaaaatgatgccacagccagtgaaattgaatgtcacagactccaaatggctgcaataaatgattatggatttggtaaacctgagattccttctagttcctcaatgccatttttcttggctgttgatcctcaacaactgaaattgagaaatgagacaaatgtttcttcaacatcttccaacattccttcagattctgcatcaccaaacttgaaaaatggcacggatcctcttttgatgccatttaattcctacatggcagattggagcagcgataagataacttacaccactctgaacactccaaaaataagcacagaacttccagtcaagttacaccatgacaaaagtagtagctttgaagcaccaaacctgaaggagcatgaatcagtctttgcaacacatgaaatgacggtagaagcaacaagaaaagaagacgaacacacatcaaaatctagttttacttcctacaatggagtaccagatacagctgcacaagcatcaaagccaaagaaaacaagaaccacaactgcaaagaacacagagaattttgactgggaaaaattacgaaggcaggcttgtagtgaagggcagatgaaacaaagaagttttgaaagaagagactctatagattgggaagcagtacggtgtgcagatgtacgaagaatatctcatgccattcgggagagggggatgaataatgttttagcagagcgaatccagaattttctgaatcgtttggttagagatcatgggagcattgaccttgagtggctaagatatattcccccagactcagcgaaggattacctactaagtatacggggactggggcttaaaagtgttgaatgtgttcgtcttctcacactgcatcatcttgctttccctgttgacaccaatgttggtcgtatatgtgtaagactgggatgggtgcccattcaacctcttcctgaatctctacagctacatctcttggagctatatcctatcttggaaactatacaaaagtatctttggcctcgcctttgtaaactcgatcagcagacactgtatgagctgcattatcagatgattacatttggaaaggtcttttgtaccaaaagacagccaaattgcaatgcatgctatgaattcgactcacctacctcgccttgaggggagtatccattcaagggagtttcttcctaagaattcagagccaataatcgaggagcctgcaagtccaagagaggaaagacctccagaaaccatggaaaatgatattgaagatttttatgaagatggtgaaatcccaacaataaagcttaacatggaagcttttgcacaaaacttggagaattgcattaaagaaagcaataacgaactccagtctgatgatattgcaaaagcattggttgctattagcactgaagcagcttcgattcctgtaccgaaactaaagaatgtgcttaggcttcgaacagaacactatgtgtatgagcttccagatgcacatccacttttacaacagctaggacttgaccaacgggaacatgatgatcctaccccatacttattggccatatggacaccagatggaataaaggaaataactaagacaccaaaaccatgctgtgaccctcaaatgggaggcgatttatgcaataatgaaatgtgccacaattgtactgcagagaaagaaaaccaatctagatatgtcagaggcacaattctggttccttgtcgaacagctatgaggggtagtttcccacttaatggcacttactttcaagtcaatgaggtatttgctgaccacagatctagccacaacccaatccatgtggaaagggagatgctatggaacttgcaaaggcgcatggtctttttcgggacttcagtacccaccatattcaaaggtctaagaacagaagaaatacaacaatgcttctggaggggatttgtctgtgtgcgaggattcgacatggagactagagcaccaaggcctctgtgcccccatttgcacattatagcaaggccgaaggcccgcaagacagcagcaactgagcaagtactctaatcagcaaagatatcagttttatgaacatcatgtttattgtgatatgacatcaatagctctcgacctatgcatggaatcatattacttcctgcctggcgatggccattgtttaggaaatttaagccatggatggggtccgagactgttagttctgagacgagaggactaatgaagcatcaggaagcaccaataattttcacttttttgtttcagatctactgtatgtaaattagcatctagctgttagtccatgtaagatgccattgctatcctttctgagacaaactaccttatcaacatttcatttggttaacatttgttctgagtattgggaagcctgccagaattttgttttcgtacctgt

SEQ ID NO: 63100 - DNA, 3891 bp, Zea Mays
cccctccagccgtccagcgcccacggtggtgcgtcctctccgagacaccgctcgccggacctcttccgagtttgggaaactctggcgccatgaatccaatagtatagcacacgtcgcatgggagaaggcacattccaagagcagatgatccacacacacggtttcagcccggtggcccaacggcgcagctatcaccatccagtaacatccccggaattcacccctgccttctgttctgctgttcaccccgcgtgcgcgttcttcctctcgtgcgacaactgggcgaccgccgccgtcctacggcaggtggtcacttcttcgtcggttccttcgctggcgacgagcacccaccaagccctggaagaagcaaggattcaccctcaagctcgaaactgaacgcaactcccgaagacccggtgaagccatgtctgcggggagaggcgatccaaacacccctgccaacaggcctctgttcctgagtgctggggtgcccaacttaggctgtcacaatgttgcagctccagctgcagcaggcaacagcggctcgatcgcctcgcaagtcttattctccccatgctccacgtctgtcctgaatactattcaggaggttcctgctccacaatctgctctgttgagtccgataaaccgtgcaactgaacaaggtgatgtgccctgcatccagccatcctggaatatgcctgggggttgcacgcaggtgcctattaatatcatagtgttccatagggaactcactagaaggggttcgaggccgcagttgtcgccgtcggccactgccttacctgatgtttcagagggagcttccattcggcttgctgggagtaatttcttgtcacatggaagaacacctagcatcgttgcaggtgatatgacaacgaattcttcacagctagccactgcagataaatacaattcagagcatcggatgaattgtttacatgatgaagcatccaagactgaaaatggaaaaggaagtacccaacttccacaattagcaacagcaattttccgtgacagctacaatgatttggaatcagtggttcctgcagctacctgggaaacacgagtgcaacattctcaagaatcaaccacctgtcttgcagaaagtaccactgatgacaacattcatatgtaccaatctatgcaaaaaaggctcaagacacaaatcaacaagagtgaacacacaccattgtcagcaccaactgtacccaaggagaaaacactgactcaaattgagacgcagctagcaagtgccgagaaaaccgaaatgttcaggaatgaggaaaccccagcgctgaaaatgaaggctcggaagaaaaaacacagaccaaaggtaatcagagagaataagccagccaaagtgcagaaacctgattcaacaccagatggaaaatctccgaaccaaaaggtcaagagaagttatgtccggaagaaaagaaacctcagctctctggagaattgctctggtcctgttagcgatcaatcaatctctggagcaacaggagttgcagctagaagcagaacatcatcagttcgacgaagtctgcaatttgaatccaaagaacaaggattgcagggcggccattcgtcaatggccaacatacaccatcacaactatgagaaacctggccatgctcaaagttctttctactcagagtcagaagtgcagactgggcgtgtgatgcaagaaggtatggagaattcaccaggagaattagctttcgacatgagtcgcagactgaacaaatttttagatgagtacatacatttgccagatatgctaaaacctacacaagaagtttcggctgcaacttctgcatcatttagtacggaactggcaagggaagaagataatgtgggaagaacttgcaaacctgatggcaaaagtaagtgcagtttgtttgctgatgaaagggtggtaaaccccacaatagaagggaacaaaaaggacttggaattaaactattctgatgctgatggtcttgtttcctcagctaggtctttacctcaaatggatcccacaagaagtcagatgggtaaggtgtcggaagtggaaaaccccacacaccatagcaatggttcgctacctggcacacgggactctgttgtcttgagggctgcagctgagatgttcgcatttttccaagcgggtgcaataaaaaagaagcgatctgcccgactccgcagaaattcccccttttatactatggatcttaagaataatactctacaagcatcaacaagactgccacagccatgcatggatgcgctgcatagaagttcttgcattaagtttttgaccaaaaaacgttcagaaaaggcaagaccgcactgttccagtgtaattcaaccaaatgatgagctgaaggacaggctttcagctggaagcactttttatggcgcaactaatggatgcaaaatatcagaagagagttctccaaacttttcatctcagaccctggacaataaaagaatcaacgttgatactcattgtgaagtagcagaagggagatcaaccaacacatcaacaggaccctatatggattacgttcaaggagttgcatcaaagttgaagcatcttgatttgaatactgaacaggtgcagagaactgagatgcatttatctctgaccacaccagctgttatttcttttgagggaacaagtggtccttcaaatgctcttgtcccatatggtggtgtggtgatggttcccaatgagaggcccttgcagttagtcaaaaagcagcggcctcgtgctaaggttgacttggattttgagacgacgagggtttggaaccttttgatggggaaatcagccgagtcttatgggactgatgttgaaaaggagagatggtggcagcaagaaagagaagtgtttcaaagccgtgctaattcgtttatagcacgcatgcgacttgttcaaggggacaggcgcttttctccttggaaaggatctgtagtcgattctgtagtaggagtgttcctcactcagaatgtagctgatcatctttcaagctctgcctatatggcccttgccgcaagttttccttcacggccagtcaacaataattgtaaggatgatggtaccacagaagacaataaacaaaccaccaggatgagtgagctagtaggagagaaaagtgtgtttgaccttttctacaatggtgttagacctgatctagaagtgggatgtgaggaggtatcaatgacttgcaagaagacacacatggaaccaacagacaatactagggatagtgaatttattgaagcttatcagcagctgggaagcaatttcgaccagggaagctcattaacagaaaatgatgccacagccagtgaaattgaatgtcacagactccaaatggctgcaataaatgattatggatttggtaaacctgagattccttctagttcctcaatgccatttttcttggctgttgatcctcaacaactgaaattgagaaatgagacaaatgtttcttcaacatcttccaacattccttcagattctgcatcaccaaacttgaaaaatggcacggatcctcttttgatgccatttaattcctacatggcagattggagcagcgataagataacttacaccactctgaacactccaaaaataagcacagaacttccagtcaagttacaccatgacaaaagtagtagctttgaagcaccaaacctgaaggagcatgaatcagtctttgcaacacatgaaatgacggtagaagcaacaagaaaagaagacgaacacacatcaaaatctagttttacttcctacaatggagtaccagatacagctgcacaagcatcaaagccaaagaaaacaagaaccacaactgcaaagaacacagagaattttgactggga

SEQ ID NO: 63101 - DNA, 1402 bp, Zea Mays
cttattgctttttttactttaatttggtattttagaaacattaaatccacacaagttaaattttaggatatagagtttgaatttaattgattaaatatttgaatacaaatatggattcgaacattcgttttgtattcgtatgcgagaatatttagattcatattcaaatcggattaaaatatggtaaattataacattcgaattcgtatccttacgtattcgatccgttcccacccctactccgcacccccgtcaggccgtgtcaatgtcccacctggtaaaaaagcagccaatgccccccacgttccgtggttcaatcacagcatcggccatcattcgccgcaacgccggaggagaatccaatccttggttccgtcgcatcgcacttgccagtggcggctagtgatagtggagtgggattccaccgaccagcgaccaccgcgtcgcgccacaggcacagcaaacagcatgcacgagcatgtttccggcgggcagggaatcgtctcagctttccgatgtacgtgctgctagatctcgatatgttgtcggcgtccatcgagatgatatactgcgtgcaggttgttctgcggctccttttagctgataagaggaacttgccgttctccatgagcacagctgataagagggagagcagagtcaacaattgtaggaattcagtaaaatatctactcatacaagcaaaagaaatacacagcataccagtactcaggcacaagtagagacgatacgtggacttggatttatcgcgctttatgaaacactgaatcatcccgtctcgaggcccaggctgtgaaggcaaacaatactgtcaaatgttagtaatactacccaaaaaaaacattcaggtaattaggccaaaggactaagttttacctgcttgagagagaccgggaaggtaagcttcccgcagacctccgggctgagcacgatctcccggcacatctccctccacgcgcggcagacggcggcgcaggacacgacgtgcttgcggttcggccaggcgctctcgctggcctccagcctccggaccacgtcgcggaggagctcgggagggaggctggcccagcggctctcgtcctgctggaccacgacacgcgtgtcccggagctcgtgcaccgtgctctgagacctccccctgcgatgttgcgcggcggtgcgtccggagaggccgccggcggcggctgcagcagtcacctcgaagttgcgcctcgacaggctgccgatgctgtctcggacgtcgcggacgatgctgcggaacgacatctttcttcgccaactagctagaacaggcgcaggaaacttggggcttcagcctgccaagtagtacgtatgtaacagtggaggtcctccgacagcctccgtggttgctccactgatagag

SEQ ID NO: 63102 - DNA, 2385 bp, Zea Mays
cagaaatcttccattccaagctctcagaagtcgcagtcgcttcgcttctctctcgttcgctcggttcccctcgtctcgctctcgcccgtcgcccctcccgggacaagaaagcaacggaacatcgcggaaagcgagagccggcctgacctgtcctcactcgacctgcgctagccgactgtctgaagttttgcccccccttttctccttcccttttgggccgtgggccggccgcgcgccccggcgcatggcgtcgtcgcgggtgatggcgtcctcgtccccgccgcagcacgccggcgccggctcgtcctcggacctagcgcgattcaggagcagcggcggcatcggatccatgaacatggacaacattatgcgtgaaatctacggccccgaggccgtcaacgccaccgtcaacggccgggtggagccctccccggcggccccggaggctgctgcccggcggacgtcggaggaggtgtggaaggagatctccgccgccggggggctctccgctcccgtcctccctccccctcccgccgccagcaccggcgccggggccagaggcggcggcggcggcgcctcggagatgacgctggaggatttcctcgccagggattcctgcgccatggcggcggtgatggagggggacatggcgctagggttccctaactgtgaaggagacgcggcagggagcgtggcgggggaagcaggcggcgggaggggaagcaggaagcgggctcttctggatcccgcggaccgtgccgtcatgcagcggcagaagcgcatgatcaagaaccgagagtccgcagcgaggtctagggacaggaaacaggcctatatcgcggagctggaatcgcaggttatgcagctggaggagtatcaagcggaactgttaacggagcaggtattattcttggttctgcagtaaggaaatggtgttgtactgttgtgacgccccggtccccggcccacatcttgttcccattgctttattccagaacatttcattgtacaagcactgtgtaactgcccagctggtgattccgcgaatcgtaagagttcactgtgcagctgtgatagttggggttgggggtaaatgacaaggatgatatcaggcacatgatctaattttattacgaaataaaactcactccctctaaattttcttagttgcatccagaggctttattcagaatgaaaaaaaatttggccattttaccactgtagaaccgagtctaactggcatacatttgctctgatagtgaaatacatagtgggtccttcaattgatctaattttaccattattattccaggaggaccgacgccaaaagagacttaaggaggtaaacattgttttcaatataattgcttgaaatcatgtttagctttggtatgcttttggcagtcagattaacatgtgtttcagaacctgaacttgtattatgcttctgtatgatttcagtgagaaacaccctttctgtaatgtcaatttctttctttttggcaatataattagctcctttttggggagaaatttaattagctcatttgcttgcaatgcctggaaggaaactttttttttcatctttgattgtagtctgaattctgaagagtgcatgcctactagttatgttttcatctgttgctgtattaataaattctgccactagcttatctgttactgataattatctcgcagcattataccgcatgccaatcttaagaatcgtaataacattatttgtatcatcttatggtcttaccctctatcgatcaggaggagggtgttgttctacagtacataatgaaaaatagtttccaattattttagcatagcaattaaaggttcaacactgattagacatggtgattttctccatgtctgcactatcacgattttctcaaatctattgccatggttagttgagtactctgcaaattcaaacatgcaacagttgcttttttttgtcagtcgttaaagaagttaacctgtttgtgcagctagttgaaagggtagttccagtcatcaggaaaaaatcaccacaagatcttagaagaaacaactccatggaatggtaaaaatgacactgagccctgatgttcttctcttagaatttacagggtttctttttcttttagatttctgttctcctagttttctttggcagctatttagattagtggaaaacatttaggtgattgtgcgtgataaaaaagtcacgccattcagaattgatctgttgtcagctgattgtttccttgtcaatgtggccgagtgttgtataaacaagaacaataaggtttgcttgaagggtggaccaaagtatcctaattacaaaggcatctatttgacatatcccattatctgatcaaagttagtttacta

SEQ ID NO: 63103 - DNA, 1763 bp, Zea Mays
aaagcacagcccgcggcgcatgcgccgatccgaacccagaaatcttccattccaagctctcagaagtcgcagtcgcttcgcttctctctcgttcgctcggttcccctcgtctcgctctcgcccgtcgcccctcccgggacaagaaagcaacggaacatcgcggaaagcgagagccggcctgacctgtcctcactcgacctgcgctagccgactgtctgaagttttgcccccccttttctccttcccttttgggccgtgggccggccgcgcgccccggcgcatggcgtcgtcgcgggtgatggcgtcctcgtccccgccgcagcacgccggcgccggctcgtcctcggacctagcgcgattcaggagcagcggcggcatcggatccatgaacatggacaacattatgcgtgaaatctacggccccgaggccgtcaacgccaccgtcaacggccgggtggagccctccccggcggccccggaggctgctgcccggcggacgtcggaggaggtgtggaaggagatctccgccgccggggggctctccgctcccgtcctccctccccctcccgccgccagcaccggcgccggggccagaggcggcggcggcggcgcctcggagatgacgctggaggatttcctcgccagggattcctgcgccatggcggcggtgatggagggggacatggcgctagggttccctaactgtgaaggagacgcggcagggagcgtggcgggggaagcaggcggcgggaggggaagcaggaagcgggctcttctggatcccgcggaccgtgccgtcatgcagcggcagaagcgcatgatcaagaaccgagagtccgcagcgaggtctagggacaggaaacaggcctatatcgcggagctggaatcgcaggttatgcagctggaggagtatcaagcggaactgttaacggagcaggtattattcttggttctgcagtaaggaaatggtgttgtactgttgtgacgccccggtccccggcccacatcttgttcccattgctttattccagaacatttcattgtacaagcactgtgtaactgcccagctggtgattccgcgaatcgtaagagttcactgtgcagctgtgatagttggggttgggggtaaatgacaaggatgatatcaggcacatgatctaattttattacgaaataaaactcactccctctaaattttcttagttgcatccagaggctttattcagaatgaaaaaaaatttggccattttaccactgtagaaccgagtctaactggcatacatttgctctgatagtgaaatacatagtgggtccttcaattgatctaattttaccattattattccaggaggaccgacgccaaaagagacttaaggagctagttgaaagggtagttccagtcatcaggaaaaaatcaccacaagatcttagaagaaacaactccatggaatggtaaaaatgacactgagccctgatgttcttctcttagaatttacagggtttctttttcttttagatttctgttctcctagttttctttggcagctatttagattagtggaaaacatttaggtgattgtgcgtgataaaaaagtcacgccattcagaattgatctgttgtcagctgattgtttccttgtcaatgtggccgagtgttgtataaacaagaacaataaggtttgcttgaagggtggaccaaagtatcctaattacaaaggcatctatttgacatatcccattatctgatcaaagttagtttacta

SEQ ID NO: 63104 - DNA, 1019 bp, Zea Mays
atgcatggcgcgcgcggaagccaacgcaggggtcaaaagcgcgacgccgccgacgcgcgctatatatccgtcgcattgcaacctaacgctacgtcgtgtgcgcgagtagtagtgctgtgctgtgtgcctgtgtggctgtgtgctcatctcgatctacatatcgtgtccacgcacgcaggaggagagcgggcggtccacgacgacgtgcagcgcgcggcggccatggagggccactactcgcccacggccgcccccgagatgtttctgcagggtccgcagggagccaccagcggcagtcatggaggggggtatcctctgtactacgactatggcggccacagcggggttggcgatggttccgtgagcagttcttcgggctcctactcttttccggcctccacggttaccgtggcttctgtgccctcctctgctccgagctacgacgaggcagcgcagtggacaagctggccggagagtagtgctagtgcgtggagctatccggcgaccacgggttcttggtctgcttcaagccagtatccaccgtcaactcgtccacctcagtagtccatgctcaatgttttatttcataacacgttcgtggcctccctaagaagacatatagattgatgattttgttcaagatgcatgcttccgtgcaagatccaatagaaggttgcaatattgtgtttcttcttcgcttggtggtgttgaatcctgtatttgatcatgggataatgattttggttgcaacttcatcgaagacgcgcgtgataaataataatatttcgttaagaagtacttaatttctcttaatgaacactaccgaaaacgagcgctttgtcgagtgcccgaagcactcggcaaagccttaaaaacactcggcaaagaaggctcgataaacagtgcatcggcaaagccttctttgtcgagtactttttctcgcgcactcggcaaagaaaagcagccattacggcgacggggtgacggagacggtgtctttaccgagtgtcacggatgac

SEQ ID NO: 63105 - DNA, 1980 bp, Zea Mays
aagaagggtaactgtttacatacatgcgcatttgtttatttccctaaaagacaaggtgtcatgtgcaataacactgaaactgagtccccctcttgtccggccgccgctgccagcttgtatctcgtaatatcttactcattttttccgttaaaaaagaaaagcttttcattttacacctcacctccccgtcccaccacgtacaaaggcgacgcgagcagcgtttgcttccctttccctgctgtgctcggcctcgccgcttcctctgccctggctcaacgattcctccgcttttcctttttcaaaatcgccctttcctcgtgcgcgtgtcgactccttcctgctcgccgccgggtctgggctgggtgacgctgcctcggatgaggccgcgctgaccggagccgtagccggaccacccgcccacccatggcgcgcccgcagcgcgtgtatgaggcttggaaagggaacaataaattcttctttggtgggaggctcatattcggacctgacgccaagtcactgatcctgtctgtttcgctcattgtggccccggtattggtcttctgcggattcgttgctcggcatcttcgccaccacttcccggcttacaatgctggatatgcgattcctgcggtagctgtagtgtttatgatttatgtgctagtcctgctcttgattacatcagcgcaggatcctgggatcgttccccgcgcagcccacccgccggaggatgagttttcttatggcaacgctttgtctgggggcacgcctgggaggctacaattcccccgtgtaaaggaagtactggttaatgggatgcctgtgaaagtgaagtattgtgacacctgcatgatttatcggcctcctcgatgctcacactgttcgatatgcaacaattgtgtagagcgctttgaccatcattgcccctgggttggacaatgcattgggcagccttgtacatcaagtttctcatggatgaggattatccaacagtatggaaggctttcaaacactctcccgcttctttggggcttctgatatattgtttcattgctctctggtttgttggtggactcactggatttcatttgtacctcattagcaccaaccagaccacgtacgagaatttccgatacagatcagacagcaggcctaacatctatagccaaggatgtctgaataactttctacaagtcttctgcagcaagacaaaaccttctaaacacaagttccgggcctacgcgcaagaggaagtgcggcctccaacggttagcttcggcagggaggtcgatgaggaaccggtcggcgggcctcggccgaaagttgaggacgatcttgaaattggtaccgatcttctgaagatctctcagcggcgcaactacgaggacgtcgatgcagaaacgggaggccgtcgcagtcgcagcagcgaggtggaaggcacggccagtgccagacctgctgtggcgtgctcggagtcccagatccctgcggtcgggggtactgacgtgagggtgcggcactcgagctgggaccggcgaagcgggaactgggacatgtcggctgtgcttacgaggagcgcgtcagatgtgattggacgtagcagcgtgttcgccgcggacgctgcacgtccatctctagaagagactcgctagcgaactgtgtctgtgcatccaggaaacatgtgcgagcggttcggatagcgaggccatttgactcgtggtggtggtgacacacacccaggtgttttggctttggctgccttgattgggtttttgttaccgacccttgtcagttgtcatgtatggacagttatttttagtcagagaatctgcccccattgttgccggcatgttcgtgtgcctgtaaattgcaaatgcaggatcctcatcaacttcaattcttattgggctgtttctttgagaatgcgtaatgtgaaaaagcatctggcctagctctttataggaatggatgcaattttaaagc

SEQ ID NO: 63106 - DNA, 1109 bp, Zea Mays
aaattaatttttccgattagtccacaagtcaatggctaatttgtcttcttccattcttcttctcctttccttcactctctggcttcccgatctcttctctctctctctcgtctctcacatctccagcccttcgccctcttctcggcccgacctcgacggtgttccaccatctcctaccctcttcttttcccgcccgcgccatccctttctccgctgtagccactgcaagccccgcgcgacgcacacggcagtggtccacgtcgaccaaatcgtccacagcatcgcgttctcctcggcgagggtctgtagcctgccggcgaggagctcgcagcgaagatccgtgcaagccaccctccagatcgtcacagctatgaatgactgcgacaaccaccattttcgccacaattcagcggatgcattgggttgttgggcattgatgattctatgcaggctatgcagcatgccagacaacaaccatgagtctcgcttgtcttgtatgccatggcatgagcagcccctcgcactctcttagaagctactcggtgtcaagctcagaggaggaaagccggtgtggagctgttgttgcctgcttagctcgaagagtaacaccagctggaacctctactagcgttgggacatcgaaagtgaccccctttccacccgtggtgagtgatcaagttggtacagagggcgctcctcgacttcaacgcagccgtgctgtgtccagggaccttgttagagactggaacttcgacgaagtaatcgtcgcaaattagagtagccctcaacagtcgtcagctggactctgtgctctacttatcaggcaggagattccttcattcgatgtaaaattttcatagtagacgtctggaagtccatgccaatacttgatgaggaaatgctcgagagggatggtacctttcaggagcaatatttggactgttgcagttatatgtggtcacgtacctgtgtaggtaggataaatgttttgagtgtgttttcctaattttcagacgtgtataagttgtcatgtacctttatgtatattatgaatgaatccaacttcagatctcgatctaatattcaaacggaagtaatattttggtgta

SEQ ID NO: 63107 - DNA, 3855 bp, Zea Mays
agcgcggcagcgccccaccccttgctgactccctcagtcggtctgtccctctatttcgaaagagcacactgcacacgcctcatccttcgtccagacgcgcccacgcctccgctgagagaataggttctgtgcgagggctccctcgcactccgcaagcacgccaacctcagtcgccagccagccatggcgtctgattccggcaccgcctcctcggacccgctcctccacggccgccgcgcgccgtccacgggcggctggaaatccgccctcttcataatttgggtagaggtggcggagcggttcgcgtactacggcatctcgtcgaacctgatcagctacctgaccggcccgctcggccagaccacggcggcggcagccgcggcggtgaacgcgtggtcgggcgccgcgtccatgctgccgctcctcggcgccgccgtcgccgactcctggctcgggcgctaccgcaccatcgtcgcctcctccgtgctctacatcaggccttgggatgctgacgctgtcatcagttttctcatcgcctcagcaatgccgtgactccgccgacgacggagaaggtatatgcccgccttcctcgcttcagacggccttcttctacgcctccctctacttggtggccatcgcccagagcgggcacaagccctgcgtgcaggccttcggcgccgaccagttcgacgcgacagaccccgacgagtccgtgtcccgggcatccttcttcaactggtggtacatgggactgtgcaccagcgccaccgtgacaattgcgctcatgagctacgtgcaggacaacgtgggctgggccctcggcttcggcgtgccgtccatggccatgctactcgcgctcgccatcttcctgctcggcacgaggacctacaggttctacggctcccgcggtggtgctggtgccagtgccagcgcgtcgtcccttttccgcaacgcgttcgtggcctggaggaaaaggtcgcgtgaagtggagctgggacatggtgagctcgcccaggacgatgccgtgctcgcggaagaggtgaaggggctggcgaggctgttcccgatatgggcgacgtgcctgctctacggcgcggtgttcgcgcagccgcccacgctcttcacgaagcaggcggcgacgctggaccggaggatcgggcggtcgttccaggtacctcccgcggcgctgcagtgcttcctcggcgccagcatcgtcacctgcatcgtgctgtacgaccgcgtcctggtgcccgtgacgcgcagggtctccggcgccgcctcgggcatcaccatgctgcagcggatcggcacggggatcgcgctgtcccttgtcactctagtcgtcgccgtgctggtggagatgaagcggctgcgagcggcgagggacgccggcggcggcggcctggtggacggctctggcaccggcacggcggcggtccccatgagcctgtggtggatcgtgccgcagtacgtgctgctcggcgccgcggacgtgttcacgatggtcggcatgcaggagttcttctacgaccaggtccccggggccctcaagagcctcgggctggcgctctacctcagcgtcctcggcgtcggcagcttcatcagcagcttcctcatcacggtgattgatgccgttacgacgaggaacggaggcaccagctggttcgccgacgacctcaaccggggtcacctagactacttctacctgctccttgcagcgctcgccgcgctggagcttctcgctttcgcttacttctcaacgtcttacgtttacaagacaaaggcaggcaatctctaatctccgtggacagaggcatgcatgtcagcatatgtatgtttattatagatagaaggattgcatggcagcgttcttcagtgtccttgcaaactaaaatgggctgcgtttagcgcgcagacagcaaagtactagaggctatcgggaaattgtaaaatggaggtgtactacggtcacaagtggggcacaataataatgaaattacgtgcttcacaaagcataaaattgtgcaaaaacaagatttttttagggtgcgtttagctagcagcctgacccccgcgcgcaatgcaaaattttatgttcagaattagtccaaaacatagcaatgccgtggatgataatttgatcatcagcagtaacttgatgaagatcacaagttcacaacggcacagcaagggcggacacaattactagactttgccttttcttgtcattttcttattggtaatccttcagtaccatgataaagagcttcttcaccatattataaagctacagccttgaggttgaggcgcgcaaaattatccaacactccgaacagagctgaatcagagctgaatccaacgacctagacgtactggcagacgaagcagagcagaggtcagtaggtcacctggctggctcctggctcaatcctccagctcggcggccggatcggccagcgtgggcagcacagggtacttgcgcgagaagcacgcgtcgcagtagttccccgactcctcgccgtagatgctgtgcagcttgtccagcgagaggaaggcgagggagtcgctgccgatctcccggcgcacgccatcaaggtccatccggttggagatgagctcgccctcgctcggagtgtcgatgccgtagaggcaggagcccacaacgggcgggctcgcgatccgcatgtgcacctcccgcgcgccggcgtcgcggagcagccgcacgatcttgctcgaggtggtgccgcgcaccagggagtcgtccacgaccacgacgctcttgccggtgatgacgccgcgcacgggggcgagcttcagcttcacggcgaggtcccggatcgcctgcgtcggctggatgaagctgcggccgctgtagtgccaccggatgagaccctgctggaactcgagccccgacgcgcgtgcgaacccgagcgcggcgtagaaacccgagtcgggcaccgggatgacgacgtcggcgcccggggcaggggactcctcggccagcgcctgcccgaaggcggtacggcgctcgtggacggcgtgcgagaacaccaccgagttgggcagcgagaagtagatgtgctcgaacacgcaggcgcggcgggggcggtgcgggacgaggcaggccgaggccaccgacatgtcgcggcggtcgaccacgaccacctccccaggctccacctcgcgctcgtaggtggcgtcgatgaggtccagcgcgcacgtctccgacgcgaagacgacggcgccgttccggcggcggcccatcaccagcgggcggaacccgtgtgggtcgcgcacggcgaagagcttgtcggccgtgaggaacaggagcgagtaggcccccgcaaggcgctcgcaggcatcgcagacccgggcgaggaggggccgcgacagcgacgtcgcaatcaggtggagaatgacctccgtatccgaggacgtgttgaagatggatcccctggcctcgagtttgttccgcagagcttggtagttgacgaggtttccgttatgcgccacggcgacctgcccgaaccggtacccggccaggaacggctgcacgttgcgcagcgacgcggcggcgccgcgagagaggatacggactcgcgtagtacctgaggtggtgccggttatggcggtcgctgccagcggctgcgtagcggtagaggagacgggacgtggcagtcgtggcggcggcggcggcgacaattcccattcccgcttatttgagagatcgaggggatttggggcgggcggcggggcgagccgggcacgcggagtgatgcctctctctggctgcgcgtcaatgggccagatttgaagaagtcttggcgattggcgagtgcctgactgccgctggat

SEQ ID NO: 63108 - DNA, 3857 bp, Zea Mays
agcgcggcagcgccccaccccttgctgactccctcagtcggtctgtccctctatttcgaaagagcacactgcacacgcctcatccttcgtccagacgcgcccacgcctccgctgagagaataggttctgtgcgagggctccctcgcactccgcaagcacgccaacctcagtcgccagccagccatggcgtctgattccggcaccgcctcctcggacccgctcctccacggccgccgcgcgccgtccacgggcggctggaaatccgccctcttcataatttgggtagaggtggcggagcggttcgcgtactacggcatctcgtcgaacctgatcagctacctgaccggcccgctcggccagaccacggcggcggcagccgcggcggtgaacgcgtggtcgggcgccgcgtccatgctgccgctcctcggcgccgccgtcgccgactcctggctcgggcgctaccgcaccatcgtcgcctcctccgtgctctacatcacgggccttgggatgctgacgctgtcatcagttttctcatcgcctcagcaatgccgtgactccgccgacgacggagaaggtatatgcccgccttcctcgcttcagacggccttcttctacgcctccctctacttggtggccatcgcccagagcgggcacaagccctgcgtgcaggccttcggcgccgaccagttcgacgcgacagaccccgacgagtccgtgtcccgggcatccttcttcaactggtggtacatgggactgtgcaccagcgccaccgtgacaattgcgctcatgagctacgtgcaggacaacgtgggctgggccctcggcttcggcgtgccgtccatggccatgctactcgcgctcgccatcttcctgctcggcacgaggacctacaggttctacggctcccgcggtggtgctggtgccagtgccagcgcgtcgtcccttttccgcaacgcgttcgtggcctggaggaaaaggtcgcgtgaagtggagctgggacatggtgagctcgcccaggacgatgccgtgctcgcggaagaggtgaaggggctggcgaggctgttcccgatatgggcgacgtgcctgctctacggcgcggtgttcgcgcagccgcccacgctcttcacgaagcaggcggcgacgctggaccggaggatcgggcggtcgttccaggtacctcccgcggcgctgcagtgcttcctcggcgccagcatcgtcacctgcatcgtgctgtacgaccgcgtcctggtgcccgtgacgcgcagggtctccggcgccgcctcgggcatcaccatgctgcagcggatcggcacggggatcgcgctgtcccttgtcactctagtcgtcgccgtgctggtggagatgaagcggctgcgagcggcgagggacgccggcggcggcggcctggtggacggctctggcaccggcacggcggcggtccccatgagcctgtggtggatcgtgccgcagtacgtgctgctcggcgccgcggacgtgttcacgatggtcggcatgcaggagttcttctacgaccaggtccccggggccctcaagagcctcgggctggcgctctacctcagcgtcctcggcgtcggcagcttcatcagcagcttcctcatcacggtgattgatgccgttacgacgaggaacggaggcaccagctggttcgccgacgacctcaaccggggtcacctagactacttctacctgctccttgcagcgctcgccgcgctggagcttctcgctttcgcttacttctcaacgtcttacgtttacaagacaaaggcaggcaatctctaatctccgtggacagaggcatgcatgtcagcatatgtatgtttattatagatagaaggattgcatggcagcgttcttcagtgtccttgcaaactaaaatgggctgcgtttagcgcgcagacagcaaagtactagaggctatcgggaaattgtaaaatggaggtgtactacggtcacaagtggggcacaataataatgaaattacgtgcttcacaaagcataaaattgtgcaaaaacaagatttttttagggtgcgtttagctagcagcctgacccccgcgcgcaatgcaaaattttatgttcagaattagtccaaaacatagcaatgccgtggatgataatttgatcatcagcagtaacttgatgaagatcacaagttcacaacggcacagcaagggcggacacaattactagactttgccttttcttgtcattttcttattggtaatccttcagtaccatgataaagagcttcttcaccatattataaagctacagccttgaggttgaggcgcgcaaaattatccaacactccgaacagagctgaatcagagctgaatccaacgacctagacgtactggcagacgaagcagagcagaggtcagtaggtcacctggctggctcctggctcaatcctccagctcggcggccggatcggccagcgtgggcagcacagggtacttgcgcgagaagcacgcgtcgcagtagttccccgactcctcgccgtagatgctgtgcagcttgtccagcgagaggaaggcgagggagtcgctgccgatctcccggcgcacgccatcaaggtccatccggttggagatgagctcgccctcgctcggagtgtcgatgccgtagaggcaggagcccacaacgggcgggctcgcgatccgcatgtgcacctcccgcgcgccggcgtcgcggagcagccgcacgatcttgctcgaggtggtgccgcgcaccagggagtcgtccacgaccacgacgctcttgccggtgatgacgccgcgcacgggggcgagcttcagcttcacggcgaggtcccggatcgcctgcgtcggctggatgaagctgcggccgctgtagtgccaccggatgagaccctgctggaactcgagccccgacgcgcgtgcgaacccgagcgcggcgtagaaacccgagtcgggcaccgggatgacgacgtcggcgcccggggcaggggactcctcggccagcgcctgcccgaaggcggtacggcgctcgtggacggcgtgcgagaacaccaccgagttgggcagcgagaagtagatgtgctcgaacacgcaggcgcggcgggggcggtgcgggacgaggcaggccgaggccaccgacatgtcgcggcggtcgaccacgaccacctccccaggctccacctcgcgctcgtaggtggcgtcgatgaggtccagcgcgcacgtctccgacgcgaagacgacggcgccgttccggcggcggcccatcaccagcgggcggaacccgtgtgggtcgcgcacggcgaagagcttgtcggccgtgaggaacaggagcgagtaggcccccgcaaggcgctcgcaggcatcgcagacccgggcgaggaggggccgcgacagcgacgtcgcaatcaggtggagaatgacctccgtatccgaggacgtgttgaagatggatcccctggcctcgagtttgttccgcagagcttggtagttgacgaggtttccgttatgcgccacggcgacctgcccgaaccggtacccggccaggaacggctgcacgttgcgcagcgacgcggcggcgccgcgagagaggatacggactcgcgtagtacctgaggtggtgccggttatggcggtcgctgccagcggctgcgtagcggtagaggagacgggacgtggcagtcgtggcggcggcggcggcgacaattcccattcccgcttatttgagagatcgaggggatttggggcgggcggcggggcgagccgggcacgcggagtgatgcctctctctggctgcgcgtcaatgggccagatttgaagaagtcttggcgattggcgagtgcctgactgccgctggat

SEQ ID NO: 63109 - DNA, 2043 bp, Zea Mays
gcgaacagcagcatcctattcctcctacctcactggctcactctcgtctcggtttacaaagcctccgccgccgcaagtccactccacccgttgtccagtaccgataaagccccgactcgccatcctccggcgacgatgccttcccgatcggattccgactccctgctggtgcgcgccgagggcatgcgcgacgcggcgctggactaccacggccgccccgccgaccgcggcgccaccggcggctggaggtcggcgctcttcatcatagcggtggagatcgcggagcggttcacgttctacggcgtgtcggcgaacctgatcaactacctgactggcccgctcgggcagggcaccgcggcggcggcggcggccatcaacgcctggaacggggtggcgcagctgctgccgctgctgggcggggccctcgcggacaagtggctcggccgctaccgcaccatcgtcatcgcctcgctcctctacatcctcggtctgggtatgttggccttttctaccttcctctcctccggcagcggccaccagtgcaccgccgcagggggccagatctgtgcgccgtctggccttaaggtgaccttcttctacgtctccctctatatcgtggccgtggcgcagggcggccacaagccgtgcgtccaggcgttcggcgccgaccagttcgaccagaccgaccccaaggagactgtctccaggagctccttctttaactggtggtacttcggcatgtgcgccggcactgccgtcacgctcgtgctcctcagctacgtgcaggacaacatcggatggggcctcgggttcggcatcccgtgcgccgtcatggcagccgcgctcgccgtattccttcttggcactcggacgtaccggtactacgtcactgccgggcagggcctgttcgctcgtgccggcgaggctttcgctgagtggcggagcaggcgcaaggcgggccagcttgttcaggattcccaagaactcgatccgcccgcagcagatgcgccaaggttcagtgctggcgtcgatgtggaggagcaggctgcagtgagaaataatggaggcctcgtcaaggaggccaaggccatcatccgtttgttcccgatatgggcggcatgcctgctctacgcggtggcgtactcgcagtcgtcgacgttcttcacgaaacaggcggcgaccctggaccggcggatcgggcggcacgtccaggtgccacctgctgcgctgcagagcttcatcagcgtcacaatcgtggtcatcatccctatctacgaccgcgtcctcgtgccggtgtcgcgccggtactccggcaaaccatcagggatcaccatgctgcagcgcatcggcacggggatgttcctctcgctcttgtccatggtgatcgcggcgctcgtcgagaagcaccggctccgcgtcgcgggggacgctggactcgtggacaagccgaaggtcccagtaccgatgagcctgtggtggatggtgcctcagtacgtgctgttcggggccgccgacgtgttcaccatggtcgggctgcaggagttcttctacgaccaggtgcccgacaagctgcgcagcctcgggctggcgctctacctcagcatcttcggcgtcggcagcttcatcagcagcgcgctcgtgtcggtcatagacagggtgacgacggacagaggcgggagctggttctccaacaacctgaaccgtggccacgtggactacttctactggctgctcgcggcgctcagcgccgtcgagctcctcgcctatgtcttcttcgcggtgacatacaagtacaagaacagaggagccgtacatgcaactgttgatggttagcgggaggagtaagtacatagtataggttatggtgcatcgtacttgtaaatctctctttttttcctcaactaggatttgtgatccaaactttaccttcgataatgattcccgttttttatgaattggtgggccatgtggtcattcaatttttaggaatgtacaactctgagactgaatcgttttttcaagcctacatgatacaactccaaa

SEQ ID NO: 63110 - DNA, 1652 bp, Zea Mays
gagggatccagcgtacacgtctccggcgccgcgcgccgccgatgaggccaaccactgactgcgtgactgcgtcgtggatgcagatgcacatcgaaggtctgggtatgttggccttttctaccttcctctcctccggcagcggccaccagtgcaccgccgcagggggccagatctgtgcgccgtctggccttaaggtgaccttcttctacgtctccctctatatcgtggccgtggcgcagggcggccacaagccgtgcgtccaggcgttcggcgccgaccagttcgaccagaccgaccccaaggagactgtctccaggagctccttctttaactggtggtacttcggcatgtgcgccggcactgccgtcacgctcgtgctcctcagctacgtgcaggacaacatcggatggggcctcgggttcggcatcccgtgcgccgtcatggcagccgcgctcgccgtattccttcttggcactcggacgtaccggtactacgtcactgccgggcagggcctgttcgctcgtgccggcgaggctttcgctgagtggcggagcaggcgcaaggcgggccagcttgttcaggattcccaagaactcgatccgcccgcagcagatgcgccaaggttcagtgctggcgtcgatgtggaggagcaggctgcagtgagaaataatggaggcctcgtcaaggaggccaaggccatcatccgtttgttcccgatatgggcggcatgcctgctctacgcggtggcgtactcgcagtcgtcgacgttcttcacgaaacaggcggcgaccctggaccggcggatcgggcggcacgtccaggtgccacctgctgcgctgcagagcttcatcagcgtcacaatcgtggtcatcatccctatctacgaccgcgtcctcgtgccggtgtcgcgccggtactccggcaaaccatcagggatcaccatgctgcagcgcatcggcacggggatgttcctctcgctcttgtccatggtgatcgcggcgctcgtcgagaagcaccggctccgcgtcgcgggggacgctggactcgtggacaagccgaaggtcccagtaccgatgagcctgtggtggatggtgcctcagtacgtgctgttcggggccgccgacgtgttcaccatggtcgggctgcaggagttcttctacgaccaggtgcccgacaagctgcgcagcctcgggctggcgctctacctcagcatcttcggcgtcggcagcttcatcagcagcgcgctcgtgtcggtcatagacagggtgacgacggacagaggcgggagctggttctccaacaacctgaaccgtggccacgtggactacttctactggctgctcgcggcgctcagcgccgtcgagctcctcgcctatgtcttcttcgcggtgacatacaagtacaagaacagaggagccgtacatgcaactgttgatggttagcgggaggagtaagtacatagtataggttatggtgcatcgtacttgtaaatctctctttttttcctcaactaggatttgtgatccaaactttaccttcgataatgattcccgttttttatgaattggtgggccatgtggtcattcaatttttaggaatgtacaactctgagactgaatcgttttttcaagcctacatgatacaactccaaa

SEQ ID NO: 63111 - DNA, 1799 bp, Zea Mays
accttagtagtagtaggacgtatctagagccatttctacaagagatagagattaataaaaataaaataggagcggagagagaggggcaggaaataaacgaggatctcaaccacacgcaacacaagaagctgacgaagggctaatcccccggaacccgttaacgctgtgggagtgtgagcccacccggccacccgtttcggctaatcccccgctcgccttctcccatcgccatggctgccgcttcctggtccgcgcccaccacctccttcgcgccggcgccggcgccgccatgggggcggtggaggaccaaggcggcgcctttacccatcaggacgcttccccgccgagtgcttctcaacgcagttggcgaatccgccatggttgctgctggtgacacattgcttggtttgtatgagaaagagcggttaggcctgttgcagtatgccgacgacgagtctaaagaagagaggtactgggaaaccttggatgctgatttgcgttactggaccagatccctgcgcccagtgcagtggtatcctggtcatattgcaaaaacagagaaagaattgaaggaacaattgaggctcatggatgtcgtcatagagatccgtgatgctaggattcccttgtccaccagccatcctaagatggactcatggctaggcaaccggaaaaggatcatagtcttgaatcgcaaggacatgatctcaactgaggatatgaatgcatgggctacttactttggtaatcagggcatcaaagttgttttctccaatggccagctgggtatgggtacaatgaaattaggtaggatggcgaaatcagtagcatctgttgcgaacacaaagagaaaggagaagggattgcttcctcgtccggttcgagctggaatagttggatatccaaatgttggcaaatcttccttgattaatcgcttgctaaaacgaagaatgtgcccagcagcacctaggccaggtgtcacaagagagctgaagtgggttcgttttggaacagacctagagttgttagattcacctggaattttacctatgcgaattagtgaccagacatctgcaatcaagctcgctatatgtgatgatattggagaaaggtcatacgattttgctgatgtggcggcgattcttgtgcagatgttgataagacatcctgcagtaggttctgaagcatttcgaagacgatataagattgatgtagatagtgagtgcggtttgtcacaaagctctctgttcacttgttcaatggagacacaagccaggcagctttccgcatattgtctgactacaggaaaggcaaatttggatgggtagcgctggagagacctccaacatgaacaagcgggatatcatagatccttagataaaagacatgtgcttgttcatgtagtatcacacaatttagtgtcgttcattggaccactctcgacagttttcactggacctgcacatatacgaggaattaattcagaatagctgtccatctgatgatctaaagacaaaacttaagaaatgctcctgctgttatcagacagtccagagcaaacgagctgatttgtatgatctattgaatgagctcaactatgtttctatgtaacggaattaggtttgagaaatgaaagattgtatgtctcctaatttagttgctcatgtactttgttcttttaggaaaagttgctcctgtacttctggatgattcattagattcgggaactggtgtaacattttaggcccagacaatagacatccctctacaaattcagtttccctgcttttaagttttct

SEQ ID NO: 63112 - DNA, 1773 bp, Zea Mays
accttagtagtagtaggacgtatctagagccatttctacaagagatagagattaataaaaataaaataggagcggagagagaggggcaggaaataaacgaggatctcaaccacacgcaacacaagaagctgacgaagggctaatcccccggaacccgttaacgctgtgggagtgtgagcccacccggccacccgtttcggctaatcccccgctcgccttctcccatcgccatggctgccgcttcctggtccgcgcccaccacctccttcgcgccggcgccggcgccgccatgggggcggtggaggaccaaggcggcgcctttacccatcaggacgcttccccgccgagtgcttctcaacgcagttggcgaatccgccatggttgctgctggtgacacattgcttggtttgtatgagaaagagcggttaggcctgttgcagtatgccgacgacgagtctaaagaagagaggtactgggaaaccttggatgctgatttgcgttactggaccagatccctgcgcccagtgcagagaaagaattgaaggaacaattgaggctcatggatgtcgtcatagagatccgtgatgctaggattcccttgtccaccagccatcctaagatggactcatggctaggcaaccggaaaaggatcatagtcttgaatcgcaaggacatgatctcaactgaggatatgaatgcatgggctacttactttggtaatcagggcatcaaagttgttttctccaatggccagctggggtacaatgaaattaggtaggatggcgaaatcagtagcatctgttgcgaacacaaagagaaaggagaagggattgcttcctcgtccggttcgagctggaatagttggatatccaaatgttggcaaatcttccttgattaatcgcttgctaaaacgaagaatgtgcccagcagcacctaggccaggtgtcacaagagagctgaagtgggttcgttttggaacagacctagagttgttagattcacctggaattttacctatgcgaattagtgaccagacatctgcaatcaagctcgctatatgtgatgatattggagaaaggtcatacgattttgctgatgtggcggcgattcttgtgcagatgttgataagacatcctgcagtaggttctgaagcatttcgaagacgatataagattgatgtagatagtgagtgcggtaaaacgtttgtcacaaagctctctgttcacttgttcaatggagacacaagccaggcagctttccgcatattgtctgactacaggaaaggcaaatttggatgggtagcgctggagagacctccaacatgaacaagcgggatatcatagatccttagataaaagacatgtgcttgttcatgtagtatcacacaatttagtgtcgttcattggaccactctcgacagttttcactggacctgcacatatacgaggaattaattcagaatagctgtccatctgatgatctaaagacaaaacttaagaaatgctcctgctgttatcagacagtccagagcaaacgagctgatttgtatgatctattgaatgagctcaactatgtttctatgtaacggaattaggtttgagaaatgaaagattgtatgtctcctaatttagttgctcatgtactttgttcttttaggaaaagttgctcctgtacttctggatgattcattagattcgggaactggtgtaacattttaggcccagacaatagacatccctctacaaattcagtttccctgcttttaagttttct

SEQ ID NO: 63113 - DNA, 1778 bp, Zea Mays
accttagtagtagtaggacgtatctagagccatttctacaagagatagagattaataaaaataaaataggagcggagagagaggggcaggaaataaacgaggatctcaaccacacgcaacacaagaagctgacgaagggctaatcccccggaacccgttaacgctgtgggagtgtgagcccacccggccacccgtttcggctaatcccccgctcgccttctcccatcgccatggctgccgcttcctggtccgcgcccaccacctccttcgcgccggcgccggcgccgccatgggggcggtggaggaccaaggcggcgcctttacccatcaggacgcttccccgccgagtgcttctcaacgcagttggcgaatccgccatggttgctgctggtgacacattgcttggtttgtatgagaaagagcggttaggcctgttgcagtatgccgacgacgagtctaaagaagagaggtactgggaaaccttggatgctgatttgcgttactggaccagatccctgcgcccagtgcagagaaagaattgaaggaacaattgaggctcatggatgtcgtcatagagatccgtgatgctaggattcccttgtccaccagccatcctaagatggactcatggctaggcaaccggaaaaggatcatagtcttgaatcgcaaggacatgatctcaactgaggatatgaatgcatgggctacttactttggtaatcagggcatcaaagttgttttctccaatggccagctgggtatgggtacaatgaaattaggtaggatggcgaaatcagtagcatctgttgcgaacacaaagagaaaggagaagggattgcttcctcgtccggttcgagctggaatagttggatatccaaatgttggcaaatcttccttgattaatcgcttgctaaaacgaagaatgtgcccagcagcacctaggccaggtgtcacaagagagctgaagtgggttcgttttggaacagacctagagttgttagattcacctggaattttacctatgcgaattagtgaccagacatctgcaatcaagctcgctatatgtgatgatattggagaaaggtcatacgattttgctgatgtggcggcgattcttgtgcagatgttgataagacatcctgcagtaggttctgaagcatttcgaagacgatataagattgatgtagatagtgagtgcggtaaaacgtttgtcacaaagctctctgttcacttgttcaatggagacacaagccaggcagctttccgcatattgtctgactacaggaaaggcaaatttggatgggtagcgctggagagacctccaacatgaacaagcgggatatcatagatccttagataaaagacatgtgcttgttcatgtagtatcacacaatttagtgtcgttcattggaccactctcgacagttttcactggacctgcacatatacgaggaattaattcagaatagctgtccatctgatgatctaaagacaaaacttaagaaatgctcctgctgttatcagacagtccagagcaaacgagctgatttgtatgatctattgaatgagctcaactatgtttctatgtaacggaattaggtttgagaaatgaaagattgtatgtctcctaatttagttgctcatgtactttgttcttttaggaaaagttgctcctgtacttctggatgattcattagattcgggaactggtgtaacattttaggcccagacaatagacatccctctacaaattcagtttccctgcttttaagttttct

SEQ ID NO: 63114 - DNA, 1795 bp, Zea Mays
accttagtagtagtaggacgtatctagagccatttctacaagagatagagattaataaaaataaaataggagcggagagagaggggcaggaaataaacgaggatctcaaccacacgcaacacaagaagctgacgaagggctaatcccccggaacccgttaacgctgtgggagtgtgagcccacccggccacccgtttcggctaatcccccgctcgccttctcccatcgccatggctgccgcttcctggtccgcgcccaccacctccttcgcgccggcgccggcgccgccatgggggcggtggaggaccaaggcggcgcctttacccatcaggacgcttccccgccgagtgcttctcaacgcagttggcgaatccgccatggttgctgctggtgacacattgcttggtttgtatgagaaagagcggttaggcctgttgcagtatgccgacgacgagtctaaagaagagaggtactgggaaaccttggatgctgatttgcgttactggaccagatccctgcgcccagtgcagagaaagaattgaaggaacaattgaggctcatggatgtcgtcatagagatccgtgatgctaggattcccttgtccaccagccatcctaagatggactcatggctaggcaaccggaaaaggatcatagtcttgaatcgcaaggacatgatctcaactgaggatatgaatgcatgggctacttactttggtaatcagggcatcaaagttgttttctccaatggccagctgggtatgggtacaatgaaattaggtaggatggcgaaatcagtagcatctgttgcgaacacaaagagaaaggagaagggattgcttcctcgtccggttcgagctggaatagttggatatccaaatgttggcaaatcttccttgattaatcgcttgctaaaacgaagaatgtgcccagcagcacctaggccaggtgtcacaagagagctgaagtgggttcgttttggaacagacctagagttgttagattcacctggaattttacctatgcgaattagtgaccagacatctgcaatcaagctcgctatatgtgatgatattggagaaaggtcatacgattttgctgatgtggcggcgattcttgtgcagatgttgataagacatcctgcagtaggttctgaagcatttcgaagacgatataagattgatgtagatagtgagtgcggtaaaacttttctataagctgcaggtttgtcacaaagctctctgttcacttgttcaatggagacacaagccaggcagctttccgcatattgtctgactacaggaaaggcaaatttggatgggtagcgctggagagacctccaacatgaacaagcgggatatcatagatccttagataaaagacatgtgcttgttcatgtagtatcacacaatttagtgtcgttcattggaccactctcgacagttttcactggacctgcacatatacgaggaattaattcagaatagctgtccatctgatgatctaaagacaaaacttaagaaatgctcctgctgttatcagacagtccagagcaaacgagctgatttgtatgatctattgaatgagctcaactatgtttctatgtaacggaattaggtttgagaaatgaaagattgtatgtctcctaatttagttgctcatgtactttgttcttttaggaaaagttgctcctgtacttctggatgattcattagattcgggaactggtgtaacattttaggcccagacaatagacatccctctacaaattcagtttccctgcttttaagttttct

SEQ ID NO: 63115 - DNA, 1829 bp, Zea Mays
accttagtagtagtaggacgtatctagagccatttctacaagagatagagattaataaaaataaaataggagcggagagagaggggcaggaaataaacgaggatctcaaccacacgcaacacaagaagctgacgaagggctaatcccccggaacccgttaacgctgtgggagtgtgagcccacccggccacccgtttcggctaatcccccgctcgccttctcccatcgccatggctgccgcttcctggtccgcgcccaccacctccttcgcgccggcgccggcgccgccatgggggcggtggaggaccaaggcggcgcctttacccatcaggacgcttccccgccgagtgcttctcaacgcagttggcgaatccgccatggttgctgctggtgacacattgcttggtttgtatgagaaagagcggttaggcctgttgcagtatgccgacgacgagtctaaagaagagaggtactgggaaaccttggatgctgatttgcgttactggaccagatccctgcgcccagtgcaggtatacttaagtggtatcctggtcatattgcaaaaacagagaaagaattgaaggaacaattgaggctcatggatgtcgtcatagagatccgtgatgctaggattcccttgtccaccagccatcctaagatggactcatggctaggcaaccggaaaaggatcatagtcttgaatcgcaaggacatgatctcaactgaggatatgaatgcatgggctacttactttggtaatcagggcatcaaagttgttttctccaatggccagctggggtacaatgaaattaggtaggatggcgaaatcagtagcatctgttgcgaacacaaagagaaaggagaagggattgcttcctcgtccggttcgagctggaatagttggatatccaaatgttggcaaatcttccttgattaatcgcttgctaaaacgaagaatgtgcccagcagcacctaggccaggtgtcacaagagagctgaagtgggttcgttttggaacagacctagagttgttagattcacctggaattttacctatgcgaattagtgaccagacatctgcaatcaagctcgctatatgtgatgatattggagaaaggtcatacgattttgctgatgtggcggcgattcttgtgcagatgttgataagacatcctgcagtaggttctgaagcatttcgaagacgatataagattgatgtagatagtgagtgcggtaaaacttttctataagctgcaggtttgtcacaaagctctctgttcacttgttcaatggagacacaagccaggcagctttccgcatattgtctgactacaggaaaggcaaatttggatgggtagcgctggagagacctccaacatgaacaagcgggatatcatagatccttagataaaagacatgtgcttgttcatgtagtatcacacaatttagtgtcgttcattggaccactctcgacagttttcactggacctgcacatatacgaggaattaattcagaatagctgtccatctgatgatctaaagacaaaacttaagaaatgctcctgctgttatcagacagtccagagcaaacgagctgatttgtatgatctattgaatgagctcaactatgtttctatgtaacggaattaggtttgagaaatgaaagattgtatgtctcctaatttagttgctcatgtactttgttcttttaggaaaagttgctcctgtacttctggatgattcattagattcgggaactggtgtaacattttaggcccagacaatagacatccctctacaaattcagtttccctgcttttaagttttct

SEQ ID NO: 63116 - DNA, 1812 bp, Zea Mays
accttagtagtagtaggacgtatctagagccatttctacaagagatagagattaataaaaataaaataggagcggagagagaggggcaggaaataaacgaggatctcaaccacacgcaacacaagaagctgacgaagggctaatcccccggaacccgttaacgctgtgggagtgtgagcccacccggccacccgtttcggctaatcccccgctcgccttctcccatcgccatggctgccgcttcctggtccgcgcccaccacctccttcgcgccggcgccggcgccgccatgggggcggtggaggaccaaggcggcgcctttacccatcaggacgcttccccgccgagtgcttctcaacgcagttggcgaatccgccatggttgctgctggtgacacattgcttggtttgtatgagaaagagcggttaggcctgttgcagtatgccgacgacgagtctaaagaagagaggtactgggaaaccttggatgctgatttgcgttactggaccagatccctgcgcccagtgcaggtatacttaagtggtatcctggtcatattgcaaaaacagagaaagaattgaaggaacaattgaggctcatggatgtcgtcatagagatccgtgatgctaggattcccttgtccaccagccatcctaagatggactcatggctaggcaaccggaaaaggatcatagtcttgaatcgcaaggacatgatctcaactgaggatatgaatgcatgggctacttactttggtaatcagggcatcaaagttgttttctccaatggccagctggggtacaatgaaattaggtaggatggcgaaatcagtagcatctgttgcgaacacaaagagaaaggagaagggattgcttcctcgtccggttcgagctggaatagttggatatccaaatgttggcaaatcttccttgattaatcgcttgctaaaacgaagaatgtgcccagcagcacctaggccaggtgtcacaagagagctgaagtgggttcgttttggaacagacctagagttgttagattcacctggaattttacctatgcgaattagtgaccagacatctgcaatcaagctcgctatatgtgatgatattggagaaaggtcatacgattttgctgatgtggcggcgattcttgtgcagatgttgataagacatcctgcagtaggttctgaagcatttcgaagacgatataagattgatgtagatagtgagtgcggtaaaacgtttgtcacaaagctctctgttcacttgttcaatggagacacaagccaggcagctttccgcatattgtctgactacaggaaaggcaaatttggatgggtagcgctggagagacctccaacatgaacaagcgggatatcatagatccttagataaaagacatgtgcttgttcatgtagtatcacacaatttagtgtcgttcattggaccactctcgacagttttcactggacctgcacatatacgaggaattaattcagaatagctgtccatctgatgatctaaagacaaaacttaagaaatgctcctgctgttatcagacagtccagagcaaacgagctgatttgtatgatctattgaatgagctcaactatgtttctatgtaacggaattaggtttgagaaatgaaagattgtatgtctcctaatttagttgctcatgtactttgttcttttaggaaaagttgctcctgtacttctggatgattcattagattcgggaactggtgtaacattttaggcccagacaatagacatccctctacaaattcagtttccctgcttttaagttttct

SEQ ID NO: 63117 - DNA, 1771 bp, Zea Mays
accttagtagtagtaggacgtatctagagccatttctacaagagatagagattaataaaaataaaataggagcggagagagaggggcaggaaataaacgaggatctcaaccacacgcaacacaagaagctgacgaagggctaatcccccggaacccgttaacgctgtgggagtgtgagcccacccggccacccgtttcggctaatcccccgctcgccttctcccatcgccatggctgccgcttcctggtccgcgcccaccacctccttcgcgccggcgccggcgccgccatgggggcggtggaggaccaaggcggcgcctttacccatcaggacgcttccccgccgagtgcttctcaacgcagttggcgaatccgccatggttgctgctggtgacacattgcttggtttgtatgagaaagagcggttaggcctgttgcagtatgccgacgacgagtctaaagaagagaggtactgggaaaccttggatgctgatttgcgttactggaccagatccctgcgcccagtgcagagaaagaattgaaggaacaattgaggctcatggatgtcgtcatagagatccgtgatgctaggattcccttgtccaccagccatcctaagatggactcatggctaggcaaccggaaaaggatcatagtcttgaatcgcaaggacatgatctcaactgaggatatgaatgcatgggctacttactttggtaatcagggcatcaaagttgttttctccaatggccagctgggtatgggtacaatgaaattaggtaggatggcgaaatcagtagcatctgttgcgaacacaaagagaaaggagaagggattgcttcctcgtccggttcgagctggaatagttggatatccaaatgttggcaaatcttccttgattaatcgcttgctaaaacgaagaatgtgcccagcagcacctaggccaggtgtcacaagagagctgaagtgggttcgttttggaacagacctagagttgttagattcacctggaattttacctatgcgaattagtgaccagacatctgcaatcaagctcgctatatgtgatgatattggagaaaggtcatacgattttgctgatgtggcggcgattcttgtgcagatgttgataagacatcctgcagtaggttctgaagcatttcgaagacgatataagattgatgtagatagtgagtgcggtttgtcacaaagctctctgttcacttgttcaatggagacacaagccaggcagctttccgcatattgtctgactacaggaaaggcaaatttggatgggtagcgctggagagacctccaacatgaacaagcgggatatcatagatccttagataaaagacatgtgcttgttcatgtagtatcacacaatttagtgtcgttcattggaccactctcgacagttttcactggacctgcacatatacgaggaattaattcagaatagctgtccatctgatgatctaaagacaaaacttaagaaatgctcctgctgttatcagacagtccagagcaaacgagctgatttgtatgatctattgaatgagctcaactatgtttctatgtaacggaattaggtttgagaaatgaaagattgtatgtctcctaatttagttgctcatgtactttgttcttttaggaaaagttgctcctgtacttctggatgattcattagattcgggaactggtgtaacattttaggcccagacaatagacatccctctacaaattcagtttccctgcttttaagttttct

SEQ ID NO: 63118 - DNA, 1748 bp, Zea Mays
accttagtagtagtaggacgtatctagagccatttctacaagagatagagattaataaaaataaaataggagcggagagagaggggcaggaaataaacgaggatctcaaccacacgcaacacaagaagctgacgaagggctaatcccccggaacccgttaacgctgtgggagtgtgagcccacccggccacccgtttcggctaatcccccgctcgccttctcccatcgccatggctgccgcttcctggtccgcgcccaccacctccttcgcgccggcgccggcgccgccatgggggcggtggaggaccaaggcggcgcctttacccatcaggacgcttccccgccgagtgcttctcaacgcagttggcgaatccgccatggttgctgctggtgacacattgcttggtttgtatgagaaagagcggttaggcctgttgcagtatgccgacgacgagtctaaagaagagaggtactgggaaaccttggatgctgatttgcgttactggaccagatccctgcgcccagtgcagtggtatcctggtcatattgcaaaaacagagaaagaattgaaggaacaattgaggctcatggatgtcgtcatagagatccgtgatgctaggattcccttgtccaccagccatcctaagatggactcatggctaggcaaccggaaaaggatcatagtcttgaatcgcaaggacatgatctcaactgaggatatgaatgcatgggctacttactttggtaatcagggcatcaaagttgttttctccaatggccagctgggtatgggtacaatgaaattaggtaggatggcgaaatcagtagcatctgttgcgaacacaaagagaaaggagaagggattgcttcctcgtccggttcgagctggaatagttggatatccaaatgttggcaaatcttccttgattaatcgcttgctaaaacgaagaatgtgcccagcagcacctaggccaggtgtcacaagagagctgaagtgggttcgttttggaacagacctagagttgttagattcacctggaattttacctatgcgaattagtgaccagacatctgcaatcaagctcgctatatgtgatgatattggagaaaggtcatacgattttgctgatgtggcggcgattcttgtgcagatgttgataagacatcctgcagtaggtttgtcacaaagctctctgttcacttgttcaatggagacacaagccaggcagctttccgcatattgtctgactacaggaaaggcaaatttggatgggtagcgctggagagacctccaacatgaacaagcgggatatcatagatccttagataaaagacatgtgcttgttcatgtagtatcacacaatttagtgtcgttcattggaccactctcgacagttttcactggacctgcacatatacgaggaattaattcagaatagctgtccatctgatgatctaaagacaaaacttaagaaatgctcctgctgttatcagacagtccagagcaaacgagctgatttgtatgatctattgaatgagctcaactatgtttctatgtaacggaattaggtttgagaaatgaaagattgtatgtctcctaatttagttgctcatgtactttgttcttttaggaaaagttgctcctgtacttctggatgattcattagattcgggaactggtgtaacattttaggcccagacaatagacatccctctacaaattcagtttccctgcttttaagttttct

SEQ ID NO: 63119 - DNA, 1801 bp, Zea Mays
accttagtagtagtaggacgtatctagagccatttctacaagagatagagattaataaaaataaaataggagcggagagagaggggcaggaaataaacgaggatctcaaccacacgcaacacaagaagctgacgaagggctaatcccccggaacccgttaacgctgtgggagtgtgagcccacccggccacccgtttcggctaatcccccgctcgccttctcccatcgccatggctgccgcttcctggtccgcgcccaccacctccttcgcgccggcgccggcgccgccatgggggcggtggaggaccaaggcggcgcctttacccatcaggacgcttccccgccgagtgcttctcaacgcagttggcgaatccgccatggttgctgctggtgacacattgcttggtttgtatgagaaagagcggttaggcctgttgcagtatgccgacgacgagtctaaagaagagaggtactgggaaaccttggatgctgatttgcgttactggaccagatccctgcgcccagtgcaggtatacttaagtggtatcctggtcatattgcaaaaacagagaaagaattgaaggaacaattgaggctcatggatgtcgtcatagagatccgtgatgctaggattcccttgtccaccagccatcctaagatggactcatggctaggcaaccggaaaaggatcatagtcttgaatcgcaaggacatgatctcaactgaggatatgaatgcatgggctacttactttggtaatcagggcatcaaagttgttttctccaatggccagctgggtatgggtacaatgaaattaggtaggatggcgaaatcagtagcatctgttgcgaacacaaagagaaaggagaagggattgcttcctcgtccggttcgagctggaatagttggatatccaaatgttggcaaatcttccttgattaatcgcttgctaaaacgaagaatgtgcccagcagcacctaggccaggtgtcacaagagagctgaagtgggttcgttttggaacagacctagagttgttagattcacctggaattttacctatgcgaattagtgaccagacatctgcaatcaagctcgctatatgtgatgatattggagaaaggtcatacgattttgctgatgtggcggcgattcttgtgcagatgttgataagacatcctgcagtaggttctgaagcatttcgaagacgatataagattgatgtagatagtttgtcacaaagctctctgttcacttgttcaatggagacacaagccaggcagctttccgcatattgtctgactacaggaaaggcaaatttggatgggtagcgctggagagacctccaacatgaacaagcgggatatcatagatccttagataaaagacatgtgcttgttcatgtagtatcacacaatttagtgtcgttcattggaccactctcgacagttttcactggacctgcacatatacgaggaattaattcagaatagctgtccatctgatgatctaaagacaaaacttaagaaatgctcctgctgttatcagacagtccagagcaaacgagctgatttgtatgatctattgaatgagctcaactatgtttctatgtaacggaattaggtttgagaaatgaaagattgtatgtctcctaatttagttgctcatgtactttgttcttttaggaaaagttgctcctgtacttctggatgattcattagattcgggaactggtgtaacattttaggcccagacaatagacatccctctacaaattcagtttccctgcttttaagttttct

SEQ ID NO: 63120 - DNA, 1678 bp, Zea Mays
ctccagtccactctctcccctcgtttctctcgatctctccagctctcccccctctgcctgcctcttcaacttgtctccagagtccagaaccgccagccgccggcccacttgctcccgagggccgttcgccgccgccgccgctgccgctgccgctgacttctcctgaggagctaactgcctaggccgcttcccttgcagcgccgcgccgaggagcgggggagaccgaaattggcgcgccttcgccgcgctgccgcctcgccgattcgaccgacacgttcctctcccgttcgggcaggcaggtgccgatcccgcgcgccggcctgcgcgggcgcggcggcgcgaggcgtgatgtgcagcggatcggagcgcgggcgtgatcgcgtctccgccgagtagaggccggtgaggcccgcgggtgccggtgtgccaggagggtgggtgggtggggttgttgcgcgtgctggcgtgctgctgcggacttgacgatgtacatagcgcgggagacttccaaggtgtggaggaaggtggccacggaggtatcggtggagctgcagctcctgcgcgagaagtgggggctccttctcgccggtctgatctttcagtatattcatggattagctgctcgaggagtgcattatttgcatcgacctggaccactgctccaggacttgggatttatggcccttccagagctcgggcaagacaaaggttatcttagtgagactatattttcttccatcttcatctcctttgtgttgtggacattccatccttttatttatcacagcaaacgtttctatactgtcctaatctggcgcagggtgcttgcttttttagttgcttcacaatttttaaggattattacattctattcgacccagctcccaggtccaaattatcattgtcgtgagggctcaaaactggcaactcttccaccacccaatagtgtacttgaagtgctcctgattaactgtttattaagttccttgcttggttcatggctataattcagagtctccttataattgcttctcgcaagcactactcggtcgatgttgttgttgcgtggtacactgtaaacttagtagtattctttgtcgacaacaagctgccagaaatgccggatcggacgagtggactacatttgcttccattaagctccaaagaaaaagagggcaggcagaaggaggagaaagacagtaaactgaaggacgagttccacaagttactgaatgggaaccatgcggatcctactgatcggcgacagcgggcacagatgaacgggaggcacgacgaagacatcaatcacgcgctctccgaggccactgccaacggcacgtaagggcccgtcggcatctgcttttcaccgggggctttgtccttggcgctcggaggagaatcctcgcgggggtcgagaaaacctgcctggtgtggtgccccggccgcctttttctgaattatgaagctgtccgagattccagcgatccagccattcacatcatgcatcttcctgaaccgctgttgcgttgcgttgcgcaagaatcagaatctcgtggcgttcctcggtacagtttgcaccatacttcattgcaatgacatttatcagaaaggcacggtggggaaatgatcttgtacatactgatccgctaaaacatgcgtgcattcgcctcggccctgc

SEQ ID NO: 63121 - DNA, 1638 bp, Zea Mays
ctccagtccactctctcccctcgtttctctcgatctctccagctctcccccctctgcctgcctcttcaacttgtctccagagtccagaaccgccagccgccggcccacttgctcccgagggccgttcgccgccgccgccgctgccgctgccgctgacttctcctgaggagctaactgcctaggccgcttcccttgcagcgccgcgccgaggagcgggggagaccgaaattggcgcgccttcgccgcgctgccgcctcgccgattcgaccgacacgttcctctcccgttcgggcaggcaggtgccgatcccgcgcgccggcctgcgcgggcgcggcggcgcgaggcgtgatgtgcagcggatcggagcgcgggcgtgatcgcgtctccgccgagtagaggccggtgaggcccgcgggtgccggtgtgccaggagggtgggtgggtggggttgttgcgcgtgctggcgtgctgctgcggacttgacgatgtacatagcgcgggagacttccaaggtgtggaggaaggtggccacggaggtatcggtggagctgcagctcctgcgcgagaagtgggggctccttctcgccggtctgatctttcagtatattcatggattagctgctcgaggagtgcattatttgcatcgacctggaccactgctccaggacttgggatttatggcccttccagagctcgggcaagacaaaggttatcttagtgagactatattttcttccatcttcatctcctttgtgttgtggacattccatccttttatttatcacagcaaacgtttctatactgtcctaatctggcgcagggtgcttgcttttttagttgcttcacaatttttaaggattattacattctattcgacccagctcccaggtccaaattatcattgtcgtgagggctcaaaactggcaactcttccaccacccaatagtgtacttgaagtgctcctgattaactagtctccttataattgcttctcgcaagcactactcggtcgatgttgttgttgcgtggtacactgtaaacttagtagtattctttgtcgacaacaagctgccagaaatgccggatcggacgagtggactacatttgcttccattaagctccaaagaaaaagagggcaggcagaaggaggagaaagacagtaaactgaaggacgagttccacaagttactgaatgggaaccatgcggatcctactgatcggcgacagcgggcacagatgaacgggaggcacgacgaagacatcaatcacgcgctctccgaggccactgccaacggcacgtaagggcccgtcggcatctgcttttcaccgggggctttgtccttggcgctcggaggagaatcctcgcgggggtcgagaaaacctgcctggtgtggtgccccggccgcctttttctgaattatgaagctgtccgagattccagcgatccagccattcacatcatgcatcttcctgaaccgctgttgcgttgcgttgcgcaagaatcagaatctcgtggcgttcctcggtacagtttgcaccatacttcattgcaatgacatttatcagaaaggcacggtggggaaatgatcttgtacatactgatccgctaaaacatgcgtgcattcgcctcggccctgc

SEQ ID NO: 63122 - DNA, 1765 bp, Zea Mays
ctccagtccactctctcccctcgtttctctcgatctctccagctctcccccctctgcctgcctcttcaacttgtctccagagtccagaaccgccagccgccggcccacttgctcccgagggccgttcgccgccgccgccgctgccgctgccgctgacttctcctgaggagctaactgcctaggccgcttcccttgcagcgccgcgccgaggagcgggggagaccgaaattggcgcgccttcgccgcgctgccgcctcgccgattcgaccgacacgttcctctcccgttcgggcaggcaggtgccgatcccgcgcgccggcctgcgcgggcgcggcggcgcgaggcgtgatgtgcagcggatcggagcgcgggcgtgatcgcgtctccgccgagtagaggccggtgaggcccgcgggtgccggtgtgccaggagggtgggtgggtggggttgttgcgcgtgctggcgtgctgctgcggacttgacgatgtacatagcgcgggagacttccaaggtgtggaggaaggtggccacggaggtatcggtggagctgcagctcctgcgcgagaagtgggggctccttctcgccggtctgatctttcagctgctcgaggagtgcattatttgcatcgacctggaccactgctccaggacttgggatttatggcccttccagagctcgggcaagacaaaggttatcttagtgagactatattttcttccatcttcatctcctttgtgttgtggacattccatccttttatttatcacagcaaacgtttctatactgtcctaatctggcgcagggtgcttgcttttttagttgcttcacaatttttaaggattattacattctattcgacccagctcccaggtccaaattatcattgtcgtgagggctcaaaactggcaactcttccaccacccaatagtgtacttgaagtgctcctgattaactttcctcgtggggtactttttggttgtggtgatttgatattttcatctcacatgattttcactctggttttcgttcgaacttaccaaaaatatggttcgaaaaggtttattaagttccttgcttggttcatggctataattcagagtctccttataattgcttctcgcaagcactactcggtcgatgttgttgttgcgtggtacactgtaaacttagtagtattctttgtcgacaacaagctgccagaaatgccggatcggacgagtggactacatttgcttccattaagctccaaagaaaaagagggcaggcagaaggaggagaaagacagtaaactgaaggacgagttccacaagttactgaatgggaaccatgcggatcctactgatcggcgacagcgggcacagatgaacgggaggcacgacgaagacatcaatcacgcgctctccgaggccactgccaacggcacgtaagggcccgtcggcatctgcttttcaccgggggctttgtccttggcgctcggaggagaatcctcgcgggggtcgagaaaacctgcctggtgtggtgccccggccgcctttttctgaattatgaagctgtccgagattccagcgatccagccattcacatcatgcatcttcctgaaccgctgttgcgttgcgttgcgcaagaatcagaatctcgtggcgttcctcggtacagtttgcaccatacttcattgcaatgacatttatcagaaaggcacggtggggaaatgatcttgtacatactgatccgctaaaacatgcgtgcattcgcctcggccctgc

SEQ ID NO: 63123 - DNA, 1568 bp, Zea Mays
ctccagtccactctctcccctcgtttctctcgatctctccagctctcccccctctgcctgcctcttcaacttgtctccagagtccagaaccgccagccgccggcccacttgctcccgagggccgttcgccgccgccgccgctgccgctgccgctgacttctcctgaggagctaactgcctaggccgcttcccttgcagcgccgcgccgaggagcgggggagaccgaaattggcgcgccttcgccgcgctgccgcctcgccgattcgaccgacacgttcctctcccgttcgggcaggcaggtgccgatcccgcgcgccggcctgcgcgggcgcggcggcgcgaggcgtgatgtgcagcggatcggagcgcgggcgtgatcgcgtctccgccgagtagaggccggtgtggaggaaggtggccacggaggtatcggtggagctgcagctcctgcgcgagaagtgggggctccttctcgccggtctgatctttcagtatattcatggattagctgctcgaggagtgcattatttgcatcgacctggaccactgctccaggacttgggatttatggcccttccagagctcgggcaagacaaaggttatcttagtgagactatattttcttccatcttcatctcctttgtgttgtggacattccatccttttatttatcacagcaaacgtttctatactgtcctaatctggcgcagggtgcttgcttttttagttgcttcacaatttttaaggattattacattctattcgacccagctcccaggtccaaattatcattgtcgtgagggctcaaaactggcaactcttccaccacccaatagtgtacttgaagtgctcctgattaactgtttattaagttccttgcttggttcatggctataattcagagtctccttataattgcttctcgcaagcactactcggtcgatgttgttgttgcgtggtacactgtaaacttagtagtattctttgtcgacaacaagctgccagaaatgccggatcggacgagtggactacatttgcttccattaagctccaaagaaaaagagggcaggcagaaggaggagaaagacagtaaactgaaggacgagttccacaagttactgaatgggaaccatgcggatcctactgatcggcgacagcgggcacagatgaacgggaggcacgacgaagacatcaatcacgcgctctccgaggccactgccaacggcacgtaagggcccgtcggcatctgcttttcaccgggggctttgtccttggcgctcggaggagaatcctcgcgggggtcgagaaaacctgcctggtgtggtgccccggccgcctttttctgaattatgaagctgtccgagattccagcgatccagccattcacatcatgcatcttcctgaaccgctgttgcgttgcgttgcgcaagaatcagaatctcgtggcgttcctcggtacagtttgcaccatacttcattgcaatgacatttatcagaaaggcacggtggggaaatgatcttgtacatactgatccgctaaaacatgcgtgcattcgcctcggccctgc

SEQ ID NO: 63124 - DNA, 1638 bp, Zea Mays
cgaaaagaaaatgattttccggatggctgctgttttctctctcctcggcgtcctctttttttataagagtagaagagtcccaggcgtcggcctcggccggtttttaataccccctcgtcgcccgtcgacattccgttcgccttcctcgcccccatctctttctcgccgtgccactcccacctcttttcgctgataagcacgccgctactccccactccatccatccatccatccacccgccgcttttctctctgctttggagagggagccgcacgcagtggttgttgttgctgctgctgccgctggtccgccagatgcaggctgctcagttccatctcctgaagcaacagcaactgctcaagctacagagggagcgccaccagcttgccgctgccgcggcgtggagcgcgcgccagggcgcatgcgccaagcccgtcggctgcgttcgcggcgacgcgctgcttggtctgaacccggcggcgtgcctcccgcctcagaagccgcagcaccaccaccacccccaccatgcgccggcggctccggcctctggcatgcgtgccgtgttcctcaccccgtccggccccaagcgcgagcgtaacggcactggcgtgtttcttcccaggccggctggcgccccggcagagccgaagaaaaagacagggtgttcgacggttcttgtccctgctcgcgtcgtccaggctctcaatctcaacctcgacgacctcggcgcgcagcctcgttacccaggcggctttgttcttgatcacgaggccttgattagtaggagcaacgccatgcttgcgagccagaagcgccgggctgcctcgcaggcactgtgccacagttcttgagtgatgtcgccgccgactggaccagccttcgcgtggtcgtcgctccagctacattcctaataattaaaaaaatagttccgagtaccttttgttaggtagtgtgttagcagcagagttaggaagacagtagtagcgttagcatcagtggtaggtctgttcattttggatccggtgatatattggttctttggagatggaggagaagcttagaaatccagtttggtggttcgggggaacagtaataataaggggttcgagagagagagagagagaggtgttagctgatgcaagaatgttgagatttgaaaaaaaaatgttggattagggatttatcgctcatggagatgataggaaaacaacctgtcgtttccccatccatccacgagtggcttttgcttgctttggtgggctaccagcagacgcagcaagagcctctctctctctctctcgtccctctgtttgcaaaccttttcttacttgcaaaagaagcttgccgtgggctccatgaataagggcgtttgctttgttgtcctaagtatttatcaaaggaattgtttgtgtttcgtctgtaccagtgcttgctagtagtaacagtgtccccctgtttcgctactagtaatggtgtttattagttaagtagctagttgcttagcacagctgctggttgcaggtttccagtgtcgacagcagcgatataaatttatatatatcttgtgtatgcctctcatggctttgtggtacaataatatatggaatttcactactactgaacaagcaaagccttaac

SEQ ID NO: 63125 - DNA, 1276 bp, Zea Mays
cttcactctgtcgctcagttattattatctcactgttccgcatgtgcagcaggccttcacctgggactgcggcctcgcttgcgtgctcatggtgctcaggacgctagggattgattgctgcgacggcattgccgatctagagaggctctgccgcaccacaagcatttggacggttgacttagcatatctgttaaacaagttttcagtcagcttttctttctgtaccgtgacccttggagcaaatccacaatattctgctgaatccttttatagggagcaattgcaagaagacatcgatcgagtggatgagctatttgggaaggcgctcgatgctggaattagcattcaatgcaggtccatcaccgcatacgacattgcttttctactgttatctgggcactgcattgctattgctttagtggacaaatcgaagctaaatttgccctgcatgagtgatcatgatgtacaacagcacaacgatgagcctgactacatgggacactatgtcgtaatatgtgggtatgatgctgatgattgtgaatttgagataagagatcctgccagttccaggaaacgcgaacgggtgacaatgaagagcttggacgaggcccggaaatcctttgggacagacgaggacattctcttggtctctttaacaggaaagagtgggatgaagctgtcgcgtaagctacttgcctgctccatgtagataaataaataggtcactagcaaccttgtgaatacgctgtacatgtccctgtagtagttatgactgtcgagtgccagccctgtacgtagctgagaacgttctcgcagttaccgctgataacagcagtgtggtagtgagcttagtaggcaccctgtatgttggcccatgccgtcgccaaaccatggccgcgcaaaggggttcagcggcagcaaaaggctctgctgaccttgtaaacgagcaagtgttctatgtacgattgttaactgaacgtgtacagatctccggaaataagaattaaaatcgtgctcctctctgcaaccgtgctccgtccgcttgctgtgctgtgctgggagcgctcgcgttgctgtcgcctgtcggagtgtcggtcgtgtctgaatctcgccaatcattcgaggtagcttctgccagacccaaccgctggtgagttgagtgttaggtcgcaggaatcgaactggcgccgaatccaacctctcactcacccttcctacctgcctgcacgttgctttctactagcggtttgcattttagagggagcgataataattg

SEQ ID NO: 63126 - DNA, 2228 bp, Zea Mays
gctgcgctcctcgattcgacccccgcttccctccaactcgcctccgcgctcggcagtcggcacccacccctcttcctcctctctgccggcaacaggacgcaggcgcataaaaaatagcaccgccaccaccacgctccacacgctgcagtttctggaaggccaccccctctgtccgctttaaggcgccgtccgcaccggtcgcctccctcccccactagcgctgccgcggccctcgcccatatacagcgcggccgcgcccaatcgttcgttccgttccgctccgccacagcggctccgcaccaaatacaggcgtgtccaccgcgctcgccccctgctggtctgcgctgctctcgtcttgctcgccctcttattccctctcctccccgctccgaactcccaaagcctccacccgaggaggaggcctgccaggttcgttgccggccgtgtttgttcgcccggccggccggcccgaccgaggggaagctgcagcctgctcgctcgctcgagctattgcgtaggccgttgacgatgtcatgtggcccctgtgcgtcatctccgagaagctcttcaggatggcgggcgacgacggcgcgcagggggcggcgggctcgccgtaccccgacgggcggatttcactagcacgccgatcgtactacatcgatgttccgcatgtgcagcaggccttcacctgggactgcggcctcgcttgcgtgctcatggtgctcaggacgctagggattgattgctgcgacggcattgccgatctagagaggctctgccgcaccacaagcatttggacggttgacttagcatatctgttaaacaagttttcagtcagcttttctttctgtaccgtgacccttggagcaaatccacaatattctgctgaatccttttatagggagcaattgcaagaagacatcgatcgagtggatgagctatttgggaaggcgctcgatgctggaattagcattcaagtccatcaccgcatacgacattgcttttctactgttatctgggcactgcattgctattgctttagtggacaaatcgaagctaaaaagaggtgatagttgaaaagctcaactatatactggttgctctgctcccagcttttcaagagtgtcatctctgttgaagcagcagtggatacgagaacagtctgcagttcttgaaattcacttcgggtgaactttttttttgtttcataagacaaacatctgtccatgcatccatgtgtgcatgtactacaaataaacagcctattatttaggttacttaggtgcaaaatcatttggttttcaactgaaaacaagtggtcctatattgttatggttatgaaatttgaggtgccgacagaacataataataaccgtaatcttgaatgcagtttgccctgcatgagtgatcatgatgtacaacagcacaacgatgagcctgactacatgggacactatgtcgtaatatgtgggtatgatgctgatgattgtgaatttgagataagagatcctgccagttccaggaaacgcgaacgggtgacaatgaagagcttggacgaggcccggaaatcctttgggacagacgaggacattctcttggtctctttaacaggaaagagtgggatgaagctgtcgcgtaagctacttgcctgctccatgtagataaataaataggtcactagcaaccttgtgaatacgctgtacatgtccctgtagtagttatgactgtcgagtgccagccctgtacgtagctgagaacgttctcgcagttaccgctgataacagcagtgtggtagtgagcttagtaggcaccctgtatgttggcccatgccgtcgccaaaccatggccgcgcaaaggggttcagcggcagcaaaaggctctgctgaccttgtaaacgagcaagtgttctatgtacgattgttaactgaacgtgtacagatctccggaaataagaattaaaatcgtgctcctctctgcaaccgtgctccgtccgcttgctgtgctgtgctgggagcgctcgcgttgctgtcgcctgtcggagtgtcggtcgtgtctgaatctcgccaatcattcgaggtagcttctgccagacccaaccgctggtgagttgagtgttaggtcgcaggaatcgaactggcgccgaatccaacctctcactcacccttcctacctgcctgcacgttgctttctactagcggtttgcattttagagggagcgataataattg

SEQ ID NO: 63127 - DNA, 2675 bp, Zea Mays
cctatccatctccccgctgcgctcctcgattcgacccccgcttccctccaactcgcctccgcgctcggcagtcggcacccacccctcttcctcctctctgccggcaacaggacgcaggcgcataaaaaatagcaccgccaccaccacgctccacacgctgcagtttctggaaggccaccccctctgtccgctttaaggcgccgtccgcaccggtcgcctccctcccccactagcgctgccgcggccctcgcccatatacagcgcggccgcgcccaatcgttcgttccgttccgctccgccacagcggctccgcaccaaatacaggcgtgtccaccgcgctcgccccctgctggtctgcgctgctctcgtcttgctcgccctcttattccctctcctccccgctccgaactcccaaagcctccacccgaggaggaggcctgccaggttcgttgccggccgtgtttgttcgcccggccggccggcccgaccgaggggaagctgcagcctgctcgctcgctcgagctattgcgtaggccgttgacgatgtcatgtggcccctgtgcgtcatctccgagaagctcttcaggatggcgggcgacgacggcgcgcagggggcggcgggctcgccgtaccccgacgggcggatttcactagcacgccgatcgtactacatcgatgttccgcatgtgcagcaggccttcacctgggactgcggcctcgcttgcgtgctcatggtgctcaggacgctagggattgattgctgcgacggcattgccgatctagagaggctctgccgcaccacaaggttctctctaggactggaacttcacaattttaagtacaattagctgtacagcagaactaaagaaatgatcgtcaccttgattttgtggccctaacccctaagcatggcacatccagaaagtagaaggaacaaaaaaaaaggaaagtagtagtacagagctaaatgactgttgttcaatgatcataagagaatatttggtcagagtagtcataagttcagaaaaatgcaatagttgcttcatccaaaacaaatgcagcatttggacggttgacttagcatatctgttaaacaagttttcagtcagcttttctttctgtaccgtgacccttggagcaaatccacaatattctgctgaatccttttatagggagcaattgcaagaagacatcgatcgagtggatgagctatttgggaaggcgctcgatgctggaattagcattcaatgcaggtccatcaccgcatacgacattgcttttctactgttatctgggcactgcattgctattgctttagtggacaaatcgaagctaaagtgagtgctttcatgttgctgttactagagtgatatgtatctgcttttgattcactctttctccatgaactaaaaatttcatagaaacaaagttgaagttggttttaaaaatggtgatggttagcctatcgttatttcaactttcaagtgtgttgtgtacttgtgtgacagaagaggtgatagttgaaaagctcaactatatactggttgctctgctcccagcttttcaagagtgtcatctctgttgaagcagcagtggatacgagaacagtctgcagttcttgaaattcacttcgggtgaactttttttttgtttcataagacaaacatctgtccatgcatccatgtgtgcatgtactacaaataaacagcctattatttaggttacttaggtgcaaaatcatttggttttcaactgaaaacaagtggtcctatattgttatggttatgaaatttgaggtgccgacagaacataataataaccgtaatcttgaatgcagtttgccctgcatgagtgatcatgatgtacaacagcacaacgatgagcctgactacatgggacactatgtcgtaatatgtgggtatgatgctgatgattgtgaatttgagataagagatcctgccagttccaggaaacgcgaacgggtgacaatgaagagcttggacgaggcccggaaatcctttgggacagacgaggacattctcttggtctctttaacaggaaagagtgggatgaagctgtcgcgtaagctacttgcctgctccatgtagataaataaataggtcactagcaaccttgtgaatacgctgtacatgtccctgtagtagttatgactgtcgagtgccagccctgtacgtagctgagaacgttctcgcagttaccgctgataacagcagtgtggtagtgagcttagtaggcaccctgtatgttggcccatgccgtcgccaaaccatggccgcgcaaaggggttcagcggcagcaaaaggctctgctgaccttgtaaacgagcaagtgttctatgtacgattgttaactgaacgtgtacagatctccggaaataagaattaaaatcgtgctcctctctgcaaccgtgctccgtccgcttgctgtgctgtgctgggagcgctcgcgttgctgtcgcctgtcggagtgtcggtcgtgtctgaatctcgccaatcattcgaggtagcttctgccagacccaaccgctggtgagttgagtgttaggtcgcaggaatcgaactggcgccgaatccaacctctcactcacccttcctacctgcctgcacgttgctttctactagcggtttgcattttagagggagcgataataattg

SEQ ID NO: 63128 - DNA, 2750 bp, Zea Mays
ccaatccctatccatctccccgctgcgctcctcgattcgacccccgcttccctccaactcgcctccgcgctcggcagtcggcacccacccctcttcctcctctctgccggcaacaggacgcaggcgcataaaaaatagcaccgccaccaccacgctccacacgctgcagtttctggaaggccaccccctctgtccgctttaaggcgccgtccgcaccggtcgcctccctcccccactagcgctgccgcggccctcgcccatatacagcgcggccgcgcccaatcgttcgttccgttccgctccgccacagcggctccgcaccaaatacaggcgtgtccaccgcgctcgccccctgctggtctgcgctgctctcgtcttgctcgccctcttattccctctcctccccgctccgaactcccaaagcctccacccgaggaggaggcctgccaggttcgttgccggccgtgtttgttcgcccggccggccggcccgaccgaggggaagctgcagcctgctcgctcgctcgagctattgcgtaggccgttgacgatgtcatgtggcccctgtgcgtcatctccgagaagctcttcaggatggcgggcgacgacggcgcgcagggggcggcgggctcgccgtaccccgacgggcggatttcactagcacgccgatcgtactacatcgatgttccgcatgtgcagcaggccttcacctgggactgcggcctcgcttgcgtgctcatggtgctcaggacgctagggattgattgctgcgacggcattgccgatctagagaggctctgccgcaccacaaggttctctctaggactggaacttcacaattttaagtacaattagctgtacagcagaactaaagaaatgatcgtcaccttgattttgtggccctaacccctaagcatggcacatccagaaagtagaaggaacaaaaaaaaaggaaagtagtagtacagagctaaatgactgttgttcaatgatcataagagaatatttggtcagagtagtcataagttcagaaaaatgcaatagttgcttcatccaaaacaaatgcaggtatacttaaagaacgcaggctccattttttgtttgtttggaaaactaacgccctttaacacttctgtttgcagcatttggacggttgacttagcatatctgttaaacaagttttcagtcagcttttctttctgtaccgtgacccttggagcaaatccacaatattctgctgaatccttttatagggagcaattgcaagaagacatcgatcgagtggatgagctatttgggaaggcgctcgatgctggaattagcattcaagtccatcaccgcatacgacattgcttttctactgttatctgggcactgcattgctattgctttagtggacaaatcgaagctaaagtgagtgctttcatgttgctgttactagagtgatatgtatctgcttttgattcactctttctccatgaactaaaaatttcatagaaacaaagttgaagttggttttaaaaatggtgatggttagcctatcgttatttcaactttcaagtgtgttgtgtacttgtgtgacagaagaggtgatagttgaaaagctcaactatatactggttgctctgctcccagcttttcaagagtgtcatctctgttgaagcagcagtggatacgagaacagtctgcagttcttgaaattcacttcgggtgaactttttttttgtttcataagacaaacatctgtccatgcatccatgtgtgcatgtactacaaataaacagcctattatttaggttacttaggtgcaaaatcatttggttttcaactgaaaacaagtggtcctatattgttatggttatgaaatttgaggtgccgacagaacataataataaccgtaatcttgaatgcagtttgccctgcatgagtgatcatgatgtacaacagcacaacgatgagcctgactacatgggacactatgtcgtaatatgtgggtatgatgctgatgattgtgaatttgagataagagatcctgccagttccaggaaacgcgaacgggtgacaatgaagagcttggacgaggcccggaaatcctttgggacagacgaggacattctcttggtctctttaacaggaaagagtgggatgaagctgtcgcgtaagctacttgcctgctccatgtagataaataaataggtcactagcaaccttgtgaatacgctgtacatgtccctgtagtagttatgactgtcgagtgccagccctgtacgtagctgagaacgttctcgcagttaccgctgataacagcagtgtggtagtgagcttagtaggcaccctgtatgttggcccatgccgtcgccaaaccatggccgcgcaaaggggttcagcggcagcaaaaggctctgctgaccttgtaaacgagcaagtgttctatgtacgattgttaactgaacgtgtacagatctccggaaataagaattaaaatcgtgctcctctctgcaaccgtgctccgtccgcttgctgtgctgtgctgggagcgctcgcgttgctgtcgcctgtcggagtgtcggtcgtgtctgaatctcgccaatcattcgaggtagcttctgccagacccaaccgctggtgagttgagtgttaggtcgcaggaatcgaactggcgccgaatccaacctctcactcacccttcctacctgcctgcacgttgctttctactagcggtttgcattttagagggagcgataataattg

SEQ ID NO: 63129 - DNA, 2319 bp, Zea Mays
cctcccccaatccctatccatctccccgctgcgctcctcgattcgacccccgcttccctccaactcgcctccgcgctcggcagtcggcacccacccctcttcctcctctctgccggcaacaggacgcaggcgcataaaaaatagcaccgccaccaccacgctccacacgctgcagtttctggaaggccaccccctctgtccgctttaaggcgccgtccgcaccggtcgcctccctcccccactagcgctgccgcggccctcgcccatatacagcgcggccgcgcccaatcgttcgttccgttccgctccgccacagcggctccgcaccaaatacaggcgtgtccaccgcgctcgccccctgctggtctgcgctgctctcgtcttgctcgccctcttattccctctcctccccgctccgaactcccaaagcctccacccgaggaggaggcctgccaggttcgttgccggccgtgtttgttcgcccggccggccggcccgaccgaggggaagctgcagcctgctcgctcgctcgagctattgcgtaggccgttgacgatgtcatgtggcccctgtgcgtcatctccgagaagctcttcaggatggcgggcgacgacggcgcgcagggggcggcgggctcgccgtaccccgacgggcggatttcactagcacgccgatcgtactacatcgatgttccgcatgtgcagcaggccttcacctgggactgcggcctcgcttgcgtgctcatggtgctcaggacgctagggattgattgctgcgacggcattgccgatctagagaggctctgccgcaccacaaggagcaattgcaagaagacatcgatcgagtggatgagctatttgggaaggcgctcgatgctggaattagcattcaatgcaggtccatcaccgcatacgacattgcttttctactgttatctgggcactgcattgctattgctttagtggacaaatcgaagctaaagtgagtgctttcatgttgctgttactagagtgatatgtatctgcttttgattcactctttctccatgaactaaaaatttcatagaaacaaagttgaagttggttttaaaaatggtgatggttagcctatcgttatttcaactttcaagtgtgttgtgtacttgtgtgacagaagaggtgatagttgaaaagctcaactatatactggttgctctgctcccagcttttcaagagtgtcatctctgttgaagcagcagtggatacgagaacagtctgcagttcttgaaattcacttcgggtgaactttttttttgtttcataagacaaacatctgtccatgcatccatgtgtgcatgtactacaaataaacagcctattatttaggttacttaggtgcaaaatcatttggttttcaactgaaaacaagtggtcctatattgttatggttatgaaatttgaggtgccgacagaacataataataaccgtaatcttgaatgcagtttgccctgcatgagtgatcatgatgtacaacagcacaacgatgagcctgactacatgggacactatgtcgtaatatgtgggtatgatgctgatgattgtgaatttgagataagagatcctgccagttccaggaaacgcgaacgggtgacaatgaagagcttggacgaggcccggaaatcctttgggacagacgaggacattctcttggtctctttaacaggaaagagtgggatgaagctgtcgcgtaagctacttgcctgctccatgtagataaataaataggtcactagcaaccttgtgaatacgctgtacatgtccctgtagtagttatgactgtcgagtgccagccctgtacgtagctgagaacgttctcgcagttaccgctgataacagcagtgtggtagtgagcttagtaggcaccctgtatgttggcccatgccgtcgccaaaccatggccgcgcaaaggggttcagcggcagcaaaaggctctgctgaccttgtaaacgagcaagtgttctatgtacgattgttaactgaacgtgtacagatctccggaaataagaattaaaatcgtgctcctctctgcaaccgtgctccgtccgcttgctgtgctgtgctgggagcgctcgcgttgctgtcgcctgtcggagtgtcggtcgtgtctgaatctcgccaatcattcgaggtagcttctgccagacccaaccgctggtgagttgagtgttaggtcgcaggaatcgaactggcgccgaatccaacctctcactcacccttcctacctgcctgcacgttgctttctactagcggtttgcattttagagggagcgataataattg

SEQ ID NO: 63130 - DNA, 2568 bp, Zea Mays
catccatatcctcccccaatccctatccatctccccgctgcgctcctcgattcgacccccgcttccctccaactcgcctccgcgctcggcagtcggcacccacccctcttcctcctctctgccggcaacaggacgcaggcgcataaaaaatagcaccgccaccaccacgctccacacgctgcagtttctggaaggccaccccctctgtccgctttaaggcgccgtccgcaccggtcgcctccctcccccactagcgctgccgcggccctcgcccatatacagcgcggccgcgcccaatcgttcgttccgttccgctccgccacagcggctccgcaccaaatacaggcgtgtccaccgcgctcgccccctgctggtctgcgctgctctcgtcttgctcgccctcttattccctctcctccccgctccgaactcccaaagcctccacccgaggaggaggcctgccaggttcgttgccggccgtgtttgttcgcccggccggccggcccgaccgaggggaagctgcagcctgctcgctcgctcgagctattgcgtaggccgttgacgatgtcatgtggcccctgtgcgtcatctccgagaagctcttcaggatggcgggcgacgacggcgcgcagggggcggcgggctcgccgtaccccgacgggcggatttcactagcacgccgatcgtactacatcgatgttccgcatgtgcagcaggccttcacctgggactgcggcctcgcttgcgtgctcatggtgctcaggacgctagggattgattgctgcgacggcattgccgatctagagaggctctgccgcaccacaagcatttggacggttgacttagcatatctgttaaacaagttttcagtcagcttttctttctgtaccgtgacccttggagcaaatccacaatattctgctgaatccttttatagggagcaattgcaagaagacatcgatcgagtggatgagctatttgggaaggcgctcgatgctggaattagcattcaatgcaggtccatcaccgcatacgacattgcttttctactgttatctgggcactgcattgctattgctttagtggacaaatcgaagctaaaaagaggtgatagttgaaaagctcaactatatactggttgctctgctcccagcttttcaagagtgtcatctctgttgaagcagcagtggatacgagaacagtctgcagttcttgaaattcacttcgggtgaactttttttttgtttcataagacaaacatctgtccatgcatccatgtgtgcatgtactacaaataaacagcctattatttaggttacttaggtgcaaaatcatttggttttcaactgaaaacaagtggtcctatattgttatggttatgaaatttgaggtgccgacagaacataataataaccgtaatcttgaatgcagtttgccctgcatgagtgatcatgatgtacaacagcacaacgatgagcctgactacatgggacactatgtcgtaatatgtgggtatgatgctgatgattgtgaatttgagataagagatcctgccagttccaggtaaacaacagtcactgtctgtattttttcgccgtgacgtacaactgagtgctttcatttgagtttggatagtacttctccccttctgctaattgcatagcttacatgccaatgaatcaatgaccaattaaacagtaacgttaaattgtggaattccagtttctgatttgaggcaatgcctcatggcaccacccatctgtaccggggttcctgtttatattacttggtcgtgggcaacagcagcaaaatctgaatcagaaacataaagactgtttttttttgtttttttactataccaggaaacgcgaacgggtgacaatgaagagcttggacgaggcccggaaatcctttgggacagacgaggacattctcttggtctctttaacaggaaagagtgggatgaagctgtcgcgtaagctacttgcctgctccatgtagataaataaataggtcactagcaaccttgtgaatacgctgtacatgtccctgtagtagttatgactgtcgagtgccagccctgtacgtagctgagaacgttctcgcagttaccgctgataacagcagtgtggtagtgagcttagtaggcaccctgtatgttggcccatgccgtcgccaaaccatggccgcgcaaaggggttcagcggcagcaaaaggctctgctgaccttgtaaacgagcaagtgttctatgtacgattgttaactgaacgtgtacagatctccggaaataagaattaaaatcgtgctcctctctgcaaccgtgctccgtccgcttgctgtgctgtgctgggagcgctcgcgttgctgtcgcctgtcggagtgtcggtcgtgtctgaatctcgccaatcattcgaggtagcttctgccagacccaaccgctggtgagttgagtgttaggtcgcaggaatcgaactggcgccgaatccaacctctcactcacccttcctacctgcctgcacgttgctttctactagcggtttgcattttagagggagcgataataattg

SEQ ID NO: 63131 - DNA, 2066 bp, Zea Mays
catccatatcctcccccaatccctatccatctccccgctgcgctcctcgattcgacccccgcttccctccaactcgcctccgcgctcggcagtcggcacccacccctcttcctcctctctgccggcaacaggacgcaggcgcataaaaaatagcaccgccaccaccacgctccacacgctgcagtttctggaaggccaccccctctgtccgctttaaggcgccgtccgcaccggtcgcctccctcccccactagcgctgccgcggccctcgcccatatacagcgcggccgcgcccaatcgttcgttccgttccgctccgccacagcggctccgcaccaaatacaggcgtgtccaccgcgctcgccccctgctggtctgcgctgctctcgtcttgctcgccctcttattccctctcctccccgctccgaactcccaaagcctccacccgaggaggaggcctgccaggttcgttgccggccgtgtttgttcgcccggccggccggcccgaccgaggggaagctgcagcctgctcgctcgctcgagctattgcgtaggccgttgacgatgtcatgtggcccctgtgcgtcatctccgagaagctcttcaggatggcgggcgacgacggcgcgcagggggcggcgggctcgccgtaccccgacgggcggatttcactagcacgccgatcgtactacatcgatgttccgcatgtgcagcaggccttcacctgggactgcggcctcgcttgcgtgctcatggtgctcaggacgctagggattgattgctgcgacggcattgccgatctagagaggctctgccgcaccacaagcatttggacggttgacttagcatatctgttaaacaagttttcagtcagcttttctttctgtaccgtgacccttggagcaaatccacaatattctgctgaatccttttatagggagcaattgcaagaagacatcgatcgagtggatgagctatttgggaaggcgctcgatgctggaattagcattcaatgcaggtccatcaccgcatacgacattgcttttctactgttatctgggcactgcattgctattgctttagtggacaaatcgaagctaaaaagaggtgatagttgaaaagctcaactatatactggttgctctgctcccagcttttcaagagtgtcatctctgttgaagcagcagtggatacgagaacagtctgcagttcttgaaattcacttcggtttgccctgcatgagtgatcatgatgtacaacagcacaacgatgagcctgactacatgggacactatgtcgtaatatgtgggtatgatgctgatgattgtgaatttgagataagagatcctgccagttccaggaaacgcgaacgggtgacaatgaagagcttggacgaggcccggaaatcctttgggacagacgaggacattctcttggtctctttaacaggaaagagtgggatgaagctgtcgcgtaagctacttgcctgctccatgtagataaataaataggtcactagcaaccttgtgaatacgctgtacatgtccctgtagtagttatgactgtcgagtgccagccctgtacgtagctgagaacgttctcgcagttaccgctgataacagcagtgtggtagtgagcttagtaggcaccctgtatgttggcccatgccgtcgccaaaccatggccgcgcaaaggggttcagcggcagcaaaaggctctgctgaccttgtaaacgagcaagtgttctatgtacgattgttaactgaacgtgtacagatctccggaaataagaattaaaatcgtgctcctctctgcaaccgtgctccgtccgcttgctgtgctgtgctgggagcgctcgcgttgctgtcgcctgtcggagtgtcggtcgtgtctgaatctcgccaatcattcgaggtagcttctgccagacccaaccgctggtgagttgagtgttaggtcgcaggaatcgaactggcgccgaatccaacctctcactcacccttcctacctgcctgcacgttgctttctactagcggtttgcattttagagggagcgataataattg

SEQ ID NO: 63132 - DNA, 2200 bp, Zea Mays
cggacatccatatcctcccccaatccctatccatctccccgctgcgctcctcgattcgacccccgcttccctccaactcgcctccgcgctcggcagtcggcacccacccctcttcctcctctctgccggcaacaggacgcaggcgcataaaaaatagcaccgccaccaccacgctccacacgctgcagtttctggaaggccaccccctctgtccgctttaaggcgccgtccgcaccggtcgcctccctcccccactagcgctgccgcggccctcgcccatatacagcgcggccgcgcccaatcgttcgttccgttccgctccgccacagcggctccgcaccaaatacaggcgtgtccaccgcgctcgccccctgctggtctgcgctgctctcgtcttgctcgccctcttattccctctcctccccgctccgaactcccaaagcctccacccgaggaggaggcctgccaggttcgttgccggccgtgtttgttcgcccggccggccggcccgaccgaggggaagctgcagcctgctcgctcgctcgagctattgcgtaggccgttgacgatgtcatgtggcccctgtgcgtcatctccgagaagctcttcaggatggcgggcgacgacggcgcgcagggggcggcgggctcgccgtaccccgacgggcggatttcactagcacgccgatcgtactacatcgatgttccgcatgtgcagcaggccttcacctgggactgcggcctcgcttgcgtgctcatggtgctcaggacgctagggattgattgctgcgacggcattgccgatctagagaggctctgccgcaccacaaggttctctctaggactggaacttcacaattttaagtacaattagctgtacagcagaactaaagaaatgatcgtcaccttgattttgtggccctaacccctaagcatggcacatccagaaagtagaaggaacaaaaaaaaaggaaagtagtagtacagagctaaatgactgttgttcaatgatcataagagaatatttggtcagagtagtcataagttcagaaaaatgcaatagttgcttcatccaaaacaaatgcagcatttggacggttgacttagcatatctgttaaacaagttttcagtcagcttttctttctgtaccgtgacccttggagcaaatccacaatattctgctgaatccttttatagggagcaattgcaagaagacatcgatcgagtggatgagctatttgggaaggcgctcgatgctggaattagcattcaatgcaggtccatcaccgcatacgacattgcttttctactgttatctgggcactgcattgctattgctttagtggacaaatcgaagctaaatttgccctgcatgagtgatcatgatgtacaacagcacaacgatgagcctgactacatgggacactatgtcgtaatatgtgggtatgatgctgatgattgtgaatttgagataagagatcctgccagttccaggaaacgcgaacgggtgacaatgaagagcttggacgaggcccggaaatcctttgggacagacgaggacattctcttggtctctttaacaggaaagagtgggatgaagctgtcgcgtaagctacttgcctgctccatgtagataaataaataggtcactagcaaccttgtgaatacgctgtacatgtccctgtagtagttatgactgtcgagtgccagccctgtacgtagctgagaacgttctcgcagttaccgctgataacagcagtgtggtagtgagcttagtaggcaccctgtatgttggcccatgccgtcgccaaaccatggccgcgcaaaggggttcagcggcagcaaaaggctctgctgaccttgtaaacgagcaagtgttctatgtacgattgttaactgaacgtgtacagatctccggaaataagaattaaaatcgtgctcctctctgcaaccgtgctccgtccgcttgctgtgctgtgctgggagcgctcgcgttgctgtcgcctgtcggagtgtcggtcgtgtctgaatctcgccaatcattcgaggtagcttctgccagacccaaccgctggtgagttgagtgttaggtcgcaggaatcgaactggcgccgaatccaacctctcactcacccttcctacctgcctgcacgttgctttctactagcggtttgcattttagagggagcgataataattg

SEQ ID NO: 63133 - DNA, 1329 bp, Zea Mays
gtcttagggatctttttcgtggggagcgcaaatgacgcaaagcaggccgacctgtacacgatgctgaacaagcagagctccagagggcagaatggcagtggcattacagatggcaaatcacacggccgccctacttacaaggatggaaaacatgcttatccaaatgactcgtcagaatccccttacttcggttcgtccgtgcattacggtggtcgggaattctacagcagcacgttacagaagcagccagccaatgaaccccagacaaaatacaaggaggacaagtcggatggctctgctactagaggtgattggtggcaaggttcactttattactgaacaatctgctgggaactctcctttttttgtgaacaaggaataaaaaaggggtggagctgagcttggtttgtcataatagtgttggaactgttgatgcgagccgttaggcatggaccgaaagtaatagctgtaatccggtcggtggaggcagtatttagatgcatcatcacacctggacagacgtggatgtaggctgcgtccttttgtgttcctgttttcgctaagtgtgttcttgtggttttagatgtgcagccgtgcagtgctgaacttactaatgaactggtaggtcagcctgaagtagttttgataaaagcagttgccaaagagtctgcagctcgcaggatcacctgctatatgtgcgtgttcctgctatctttcggaaagatttgggttgtacataatctgtccttacccttcttttttaaaaaaaaattatgttcctactattcttacttacccgtactctcagtatgatggaaaaggatgaggtggagtttggtggccctgttgtgactgaggtgtaaaccaggcttgctttctatgtccgttcgttatggactggtcacggttactcgcgctccgacagacagtgtcctttgatccgatcaacatctggtgtccaatcctgacacacgctactagacgccgcaacaagcggcaacaagagaaaccgccctgggatgctactgtaagtcagtaacacacgctactacacgccgcaacagatcatggtcagtatgtatggtagagagatcaaatgtgtggagctggaacatgcttttgagttgtgaaacatggaccttttggtgggtttaaccgtttgagctgtaggggtgctgtgcttggtgtggttttggcctttgagattaggtttcggggatccatgaggtttggtctcggatttggattatcacccaaactggtgttcgggtggtttcatatttgagtttgggtgtccggcaaaattaacagtgctgctgtgtaaatttc

SEQ ID NO: 63134 - DNA, 1345 bp, Zea Mays
cttcacaccatcgttctgatggattcttggggtcttagggatctttttcgtggggagcgcaaatgacgcaaagcaggccgacctgtacacgatgctgaacaagcagagctccagagggcagaatggcagtggcattacagatggcaaatcacacggccgccctacttacaaggatggaaaacatgcttatccaaatgactcgtcagaatccccttacttcggttcgtccgtgcattacggtggtcgggaattctacagcagcacgttacagaagcagccagccaatgaaccccagacaaaatacaaggaggacaagtcggatggctctgctactagaggttcactttattactgaacaatctgctgggaactctcctttttttgtgaacaaggaataaaaaaggggtggagctgagcttggtttgtcataatagtgttggaactgttgatgcgagccgttaggcatggaccgaaagtaatagctgtaatccggtcggtggaggcagtatttagatgcatcatcacacctggacagacgtggatgtaggctgcgtccttttgtgttcctgttttcgctaagtgtgttcttgtggttttagatgtgcagccgtgcagtgctgaacttactaatgaactggtaggtcagcctgaagtagttttgataaaagcagttgccaaagagtctgcagctcgcaggatcacctgctatatgtgcgtgttcctgctatctttcggaaagatttgggttgtacataatctgtccttacccttcttttttaaaaaaaaattatgttcctactattcttacttacccgtactctcagtatgatggaaaaggatgaggtggagtttggtggccctgttgtgactgaggtgtaaaccaggcttgctttctatgtccgttcgttatggactggtcacggttactcgcgctccgacagacagtgtcctttgatccgatcaacatctggtgtccaatcctgacacacgctactagacgccgcaacaagcggcaacaagagaaaccgccctgggatgctactgtaagtcagtaacacacgctactacacgccgcaacagatcatggtcagtatgtatggtagagagatcaaatgtgtggagctggaacatgcttttgagttgtgaaacatggaccttttggtgggtttaaccgtttgagctgtaggggtgctgtgcttggtgtggttttggcctttgagattaggtttcggggatccatgaggtttggtctcggatttggattatcacccaaactggtgttcgggtggtttcatatttgagtttgggtgtccggcaaaattaacagtgctgctgtgtaaatttc

SEQ ID NO: 63135 - DNA, 358 bp, Zea Mays
acgccacgaggcgaacaaccaactgcttccttccgcgccgccgccgcctacaacgaccacttcacgtgacttacctcttctccgcctcaagtgttcacggctccatcctctctagagtctaagcccatctcgcgaagccgctaacgccgaaaacgaccctacatatggaggcgaagaagtcgggtcccgccgctgccggagccgcggcgccgccgccggctaacgggtacttcagcaccgtcttctccgcgtcgcctgcggggagcgcaaatgacgcaaagcaggccgacctgtacacgatgctgaacaagcagagctccagagggcagaatggcagtggcattacagtttaaattca

SEQ ID NO: 63136 - DNA, 1947 bp, Zea Mays
aggcgttccccttttcctttgtgtactgttatttgtttattggatttatttaaagcataattatccgatgtggtaggtgggtcctactagtcagttgaaagctataaaatcgcgcttcaaagacctgtcctctctccactccttgcgattgcggcgacgagagacgagagagagggaggtgccgaaaaaaaaaacggacaagagagggcgaagttaacactaacagggagggcagacggagaaccaggagcggcgtcgagctaaaagccccggcggcggtcatggccaccgcagaccagagccgtattttcatgaaggacgtcaaacgcgtcatcatcaaggtgggcactgcagttgtcacgaggcatgatgggcgagtatccacaggcaattttggtgttctttgtgaacaggtgaaagagataaatgctctaggatacgaggtgatcattgtgtcctcaggtgctgttggtgtggggaagcagaggctcaattacaggaagcttgtcaatagcagctttgctgatatgcaaaagccacagacggagctggatggaaaggcttgcgctgccgttggacagagtggcctcatggctctctatgatatgctatttactcaacttgatgtatcctcttcccaacttcttgtgacagacagtgattttgagaatccaaacttcagggagaggcttcgtgaaactgttgagtcactattagatcttaaagttgtaccaatatttaatgaaaatgatgccatcagcaccagaaaggctccgtatgaggattcatcgggtatattttgggataatgacagtttagccggtcttttggctatagaacttaaagcagatcttcttgttctactcagtgacgtggatggcctctacagcggtccacctagtgaacctcaatcaaagatgatacatacatacatcaaagataaatatcataacgaaattacttttggggataagtcacgtgtaggtagaggaggaatgacagctaaagtgaaggctgctctcgtggcttcaaacagtggcacacctgttgttataacaagtggatctgcatctgggagcatcattagagttctccaaggagagaagattggtactctctttcataaggacgcgagtttgtgggaaccatccagtgatgttagtgcatgtgagatggctgttactgcaagagaatgttcaaggcgtctgcagaatttgtcgtcggatgagcgcaataaaatattgctagacgtggcggatgctttggagaaaaatgagaatctaattaggaccgagaatgaagccgatgtagctgcagcgcaagatgctggatatgagaaatttttggttgatagattgaccctaaagccaggaaagatatcagccctcgcgaaatccattcgcactcttgcacgtatggaagacccaatcaaccaaatactcaaaagaacagagattgctgaaaatttaattctcgagaaaacatcatgtcctttgggtgtcctattggttatttttgagtccaggcctgatgccttggtccagattgcatctttagcgattcgaagtggcaatggtcttctcttgaaaggtggaaaagaagccatgagatcaaacaaagtattgcataagcttcatgatgtaattgatcttgtcattccaagaggcagcaataagctggtttcacaaatcaagacatcaactaagatccctgttcttggtcatgctgatggtatctgtcatgtatacatcgacaaatcagctaacatgaatatggcaaaacaaatagtgatggatgccaaaattgattacccagcagcctgcaatgctatggtatgtctaatttgttacaatttatagtatttaacatgtctcttttcagcttgcatacttaactactcttggcacgtccttactcaagagaaccaagtgataccttacacactag

SEQ ID NO: 63137 - DNA, 1516 bp, Zea Mays
cggcgacgagagacgagagagagggaggtgccgaaaaaaaaaacggacaagagagggcgaagttaacactaacagggagggcagacggagaaccaggagcggcgtcgagctaaaagccccggcggcggtcatggccaccgcagaccagagccgtattttcatgaaggacgtcaaacgcgtcatcatcaaggtgggcactgcagttgtcacgaggcatgatgggcgagtatccacaggcaattttggtgttctttgtgaacaggtgaaagagataaatgctctaggatacgaggtgatcattgtgtcctcaggtgctgttggtgtggggaagcagaggctcaattacaggaagcttgtcaatagcagctttgctgatatgcaaaagccacagacggagctggatggaaaggcttgcgctgccgttggacagagtggcctcatggctctctatgatatgctatttactcaacttgatgtatcctcttcccaacttcttgtgacagacagtgattttgagaatccaaacttcagggagaggcttcgtgaaactgttgagtcactattagatcttaaagttgtaccaatatttaatgaaaatgatgccatcagcaccagaaaggctccgtatgaggattcatcgggtatattttgggataatgacagtttagccggtcttttggctatagaacttaaagcagatcttcttgttctactcagtgacgtggatggcctctacagcggtccacctagtgaacctcaatcaaagatgatacatacatacatcaaagataaatatcataacgaaattacttttggggataagtcacgtgtaggtagaggaggaatgacagctaaagtgaaggctgctctcgtggcttcaaacagtggcacacctgttgttataacaagtggatctgcatctgggagcatcattagagttctccaaggagagaagattggtactctctttcataaggacgcgagtttgtgggaaccatccagtgatgttagtgcatgtgagatggctgttactgcaagagaatgttcaaggcgtctgcagaatttgtcgtcggatgagcgcaataaaatattgctagacgtggcggatgctttggagaaaaatgagaatctaattaggaccgagaatgaagccgatgtagctgcagcgcaagatgctggatatgagaaatttttggttgatagattgaccctaaagccaggaaagatatcagccctcgcgaaatccattcgcactcttgcacgtatggaagacccaatcaaccaaatactcaaaagaacagagattgctgaaaatttaattctcgagaaaacatcatgtcctttgggtgtcctattggttatttttgagtccaggcctgatgccttggtccagattgcatctttagcgattcgaagtggcaatggtcttctcttgaaaggtggaaaagaagccatgagatcaaacaaagtattgcataagcaacgtgggtgaaaaacttattggccttgttacaag

SEQ ID NO: 63138 - DNA, 1622 bp, Zea Mays
gaagcaacaccgagcacgagggcattcgacgacgacttcctctctctcacgctagagacgcgcagtcgcgcagagtcctggctttttgcccctttccggctttgccccccttccccccaaaccacaccgatcccaatcccgccgtatccggcgaacgcgcgccgcggccatgtgcagctgctgagagaaggagcgagcgcaacgacgccactggccatggacgagggctattccaacctccccaccagccacctcctcggctccgtccccgctgtgacacaagatgacaggaaattgggtccccccgccgcccaagttgcagatgcagctgccacctctcggttgcaggagttcccacctggaggtggtaatgttggagggtatcggccaccaggtggccctgcagatggagatgttgaaaaccaagcagattggaaaggatacttcaatgttgcatcttatgctccatacttcaatgttgatactgatgttgtagttgacaggctcatcagttcagtttatccaatggatggtttttacaggaaaattgatgctaatcctgacatgtatgggcctttatggatcaccactactctgattttcatgcttgctgtgtttgtattttggatcacgcccaagtcttgttcgattttggtgtatgtggggctattctctgtttatcttcatacctgcatctgtacttttgcttattcctgtgggatttcttcaatgggtcatcatagctcttgctggtggtgcatcatcttggttcatcactttaaatttgaaggaatgcactgaaggagctgatctaatggttctgatggctagtgcatcagtgctgcaatttgctctggcactgttcatcaaagtttactttttcgcctgaggtttgcttgatgattttgcaaaggtgacctgatgcgccctttgcccacggcttgttctggaatacatcttttgaaagggcatggcagaccagttctactcgacatcgtgacatacgtactgaccctagattgttatgctttgggcgttcttcatttgaagtgtctaatctgcaagtctctatctagctagggaacagaattttacagcgtgccgtacagagtaccgagtttaggcaccaaagtctttccacgttgttcagtgaaagcccttcacttggatttgcatacaatcctttcttgggtaaagatctccagtgtgtatttgtgtgctagtacgtctcatccggttttcgaacgtccaactgacaactgatttcgcatagctcttttttttaaaaaaaatggtttagcgaataaaattagcatgctctagccacgaattttcaacgaaaaaaggtttccggatttgtttgctatttagctcagaattgaagataagaagagccttatggtcagacgtgtatcttggaatttttgtatggttgcagaagggaaggtcctgttcctaggatcaagagattagaactatgtatagttttttcaaagtaggttcatgtatgttattatttcaaataaacttcctttccacaaatttcattctgagttcatgagtatttgtgatctgattgaacatatcaacaaaaatattaatgtttaactttttatttaaat

SEQ ID NO: 63139 - DNA, 2030 bp, Zea Mays
gaagcaacaccgagcacgagggcattcgacgacgacttcctctctctcacgctagagacgcgcagtcgcgcagagtcctggctttttgcccctttccggctttgccccccttccccccaaaccacaccgatcccaatcccgccgtatccggcgaacgcgcgccgcggccatgtgcagctgctgagagaaggagcgagcgcaacgacgccactggccatggacgagggctattccaacctccccaccagccacctcctcggctccgtccccgctgtgacacaagatgacaggaaattgggtccccccgccgcccaagttgcagatgcagctgccacctctcggttgcaggagttcccacctggaggtggtaatgttggagggtatcggccaccaggtggccctgcagatggagatgttgaaaaccaagcagattggaaaggatacttcaatgttgcatcttatgctccatacttcaatgttgatactgatgttgtagttgacaggctcatcagttcagtttatccaatggatggtttttacaggaaaattgatgctaatcctgacatgtatgggcctttatggatcaccactactctgattttcatgcttgctgtgtttggtaactatgccacttatctggtgcaaactaaaaaggatatggacatatggaactttgatgttggttatttcagttgggcagcatcagtcatgtatagttatgctatcattgtgcccgtcgtgttctttttcctgtttcagtattttggatcacgcccaagtcttgttcgattttggtgtatgtggggctattctctgtttatcttcatacctgcatctgtaagtattcgatttccatctgtttgtttcgttatttatatcactggcaagaatacacagacattcaattttaacatgatgtacattcataggaattttcagttctctaggttgcaattatatataacggtcctaaaaattgattcacttaatgtaaagaatccatgacgttatcatggttgtgagcgcttggaactcacttctgttcttgaagatgaatgttgccattatgctaacatgagctgccctcctattttgtctggttaaggtacttttgcttattcctgtgggatttcttcaatgggtcatcatagctcttgctggtggtgcatcatcttggttcatcactttaaatttgaaggaatgcactgaaggagctgatctaatggttctgatggctagtgcatcagtgctgcaatttgctctggcactgttcatcaaagtttactttttcgcctgaggtttgcttgatgattttgcaaaggtgacctgatgcgccctttgcccacggcttgttctggaatacatcttttgaaagggcatggcagaccagttctactcgacatcgtgacatacgtactgaccctagattgttatgctttgggcgttcttcatttgaagtgtctaatctgcaagtctctatctagctagggaacagaattttacagcgtgccgtacagagtaccgagtttaggcaccaaagtctttccacgttgttcagtgaaagcccttcacttggatttgcatacaatcctttcttgggtaaagatctccagtgtgtatttgtgtgctagtacgtctcatccggttttcgaacgtccaactgacaactgatttcgcatagctcttttttttaaaaaaaatggtttagcgaataaaattagcatgctctagccacgaattttcaacgaaaaaaggtttccggatttgtttgctatttagctcagaattgaagataagaagagccttatggtcagacgtgtatcttggaatttttgtatggttgcagaagggaaggtcctgttcctaggatcaagagattagaactatgtatagttttttcaaagtaggttcatgtatgttattatttcaaataaacttcctttccacaaatttcattctgagttcatgagtatttgtgatctgattgaacatatcaacaaaaatattaatgtttaactttttatttaaat

SEQ ID NO: 63140 - DNA, 1610 bp, Zea Mays
gaagcaacaccgagcacgagggcattcgacgacgacttcctctctctcacgctagagacgcgcagtcgcgcagagtcctggctttttgcccctttccggctttgccccccttccccccaaaccacaccgatcccaatcccgccgtatccggcgaacgcgcgccgcggccatgtgcagctgctgagagaaggagcgagcgcaacgacgccactggccatggacgagggctattccaacctccccaccagccacctcctcggctccgtccccgctgtgacacaagatgacaggaaattgggtccccccgccgcccaagctgccacctctcggttgcaggagttcccacctggaggtggtaatgttggagggtatcggccaccaggtggccctgcagatggagatgttgaaaaccaagcagattggaaaggatacttcaatgttgcatcttatgctccatacttcaatgttgatactgatgttgtagttgacaggctcatcagttcagtttatccaatggatggtttttacaggaaaattgatgctaatcctgacatgtatgggcctttatggatcaccactactctgattttcatgcttgctgtgtttgtattttggatcacgcccaagtcttgttcgattttggtgtatgtggggctattctctgtttatcttcatacctgcatctgtacttttgcttattcctgtgggatttcttcaatgggtcatcatagctcttgctggtggtgcatcatcttggttcatcactttaaatttgaaggaatgcactgaaggagctgatctaatggttctgatggctagtgcatcagtgctgcaatttgctctggcactgttcatcaaagtttactttttcgcctgaggtttgcttgatgattttgcaaaggtgacctgatgcgccctttgcccacggcttgttctggaatacatcttttgaaagggcatggcagaccagttctactcgacatcgtgacatacgtactgaccctagattgttatgctttgggcgttcttcatttgaagtgtctaatctgcaagtctctatctagctagggaacagaattttacagcgtgccgtacagagtaccgagtttaggcaccaaagtctttccacgttgttcagtgaaagcccttcacttggatttgcatacaatcctttcttgggtaaagatctccagtgtgtatttgtgtgctagtacgtctcatccggttttcgaacgtccaactgacaactgatttcgcatagctcttttttttaaaaaaaatggtttagcgaataaaattagcatgctctagccacgaattttcaacgaaaaaaggtttccggatttgtttgctatttagctcagaattgaagataagaagagccttatggtcagacgtgtatcttggaatttttgtatggttgcagaagggaaggtcctgttcctaggatcaagagattagaactatgtatagttttttcaaagtaggttcatgtatgttattatttcaaataaacttcctttccacaaatttcattctgagttcatgagtatttgtgatctgattgaacatatcaacaaaaatattaatgtttaactttttatttaaat

SEQ ID NO: 63141 - DNA, 1616 bp, Zea Mays
gaagcaacaccgagcacgagggcattcgacgacgacttcctctctctcacgctagagacgcgcagtcgcgcagagtcctggctttttgcccctttccggctttgccccccttccccccaaaccacaccgatcccaatcccgccgtatccggcgaacgcgcgccgcggccatgtgcagctgctgagagaaggagcgagcgcaacgacgccactggccatggacgagggctattccaacctccccaccagccacctcctcggctccgtccccgctgtgacacaagatgacaggaaattgggtccccccgccgcccaagatgcagctgccacctctcggttgcaggagttcccacctggaggtggtaatgttggagggtatcggccaccaggtggccctgcagatggagatgttgaaaaccaagcagattggaaaggatacttcaatgttgcatcttatgctccatacttcaatgttgatactgatgttgtagttgacaggctcatcagttcagtttatccaatggatggtttttacaggaaaattgatgctaatcctgacatgtatgggcctttatggatcaccactactctgattttcatgcttgctgtgtttgtattttggatcacgcccaagtcttgttcgattttggtgtatgtggggctattctctgtttatcttcatacctgcatctgtacttttgcttattcctgtgggatttcttcaatgggtcatcatagctcttgctggtggtgcatcatcttggttcatcactttaaatttgaaggaatgcactgaaggagctgatctaatggttctgatggctagtgcatcagtgctgcaatttgctctggcactgttcatcaaagtttactttttcgcctgaggtttgcttgatgattttgcaaaggtgacctgatgcgccctttgcccacggcttgttctggaatacatcttttgaaagggcatggcagaccagttctactcgacatcgtgacatacgtactgaccctagattgttatgctttgggcgttcttcatttgaagtgtctaatctgcaagtctctatctagctagggaacagaattttacagcgtgccgtacagagtaccgagtttaggcaccaaagtctttccacgttgttcagtgaaagcccttcacttggatttgcatacaatcctttcttgggtaaagatctccagtgtgtatttgtgtgctagtacgtctcatccggttttcgaacgtccaactgacaactgatttcgcatagctcttttttttaaaaaaaatggtttagcgaataaaattagcatgctctagccacgaattttcaacgaaaaaaggtttccggatttgtttgctatttagctcagaattgaagataagaagagccttatggtcagacgtgtatcttggaatttttgtatggttgcagaagggaaggtcctgttcctaggatcaagagattagaactatgtatagttttttcaaagtaggttcatgtatgttattatttcaaataaacttcctttccacaaatttcattctgagttcatgagtatttgtgatctgattgaacatatcaacaaaaatattaatgtttaactttttatttaaat

SEQ ID NO: 63142 - DNA, 2555 bp, Zea Mays
gaagcaacaccgagcacgagggcattcgacgacgacttcctctctctcacgctagagacgcgcagtcgcgcagagtcctggctttttgcccctttccggctttgccccccttccccccaaaccacaccgatcccaatcccgccgtatccggcgaacgcgcgccgcggccatgtgcagctgctgagagaaggagcgagcgcaacgacgccactggccatggacgagggctattccaacctccccaccagccacctcctcggctccgtccccgctgtgacacaagatgacaggaaattgggtccccccgccgcccaagttgcagatgcagctgccacctctcggttgcaggagttcccacctggaggtggtaatgttggagggtatcggccaccaggtggccctgcagatggagatgttgaaaaccaagcagattggaaaggatacttcaatgttgcatcttatgctccatacttcaatgttgatactgatgttgtagttgacaggctcatcagttcagtttatccaatggatggtttttacaggaaaattgatgctaatcctgacatgtaagtttctcctatggtcacaatttgcaatctgactctttgtaaaacaaaacatgtctctttgttacctttctattgtttcagtgtcaacatttctagtgaatagtctaatatgcaatcatgtgataaaaatgtgcataaaatgatatttttcatcataactaagcattgttaatatggaaagaaatgttgcaagttgtataagatgcatattatgaatctgttttaacacttcattgtttattaactgagaaactgataatagcatgagatgacgattcagataggatagttgcagagtttttacaagagtatacaaaaatatagtgcctaagtagcattatacagattgtagcaggtagtgtgtatttgctgcaagcatagttttgggggaactagacatcacagtgttttgaatggattttgatccaaatttttgcatactaaaagttcttgctggattattaaagggtgtacccagtgccgtagcccgtaggcttcctgcactgtgcggggtatggggaagggtatctttaagcgccaagtcttacccgtataatatgcagaggctgtggctcgaacccgggccttacccgtataatatgcagaggttggggctcgaacccaggaccttccggttagactctaccactgcaccaggcccacccttctcttgctggattattgtcttagtaaattttgtcgttaattttagcttttttgtacttcatcaatcatttggatctcttgactccgcattctcttgtgttatgaattattttaatttctgcaggtatgggcctttatggatcaccactactctgattttcatgcttgctgtgtttggtaactatgccacttatctggtgcaaactaaaaaggatatggacatatggaactttgatgttggttatttcagttgggcagcatcagtcatgtatagttatgctatcattgtgcccgtcgtgttctttttcctgtttcagtattttggatcacgcccaagtcttgttcgattttggtgtatgtggggctattctctgtttatcttcatacctgcatctgtacttttgcttattcctgtgggatttcttcaatgggtcatcatagctcttgctggtggtgcatcatcttggttcatcactttaaatttgaaggaatgcactgaaggagctgatctaatggttctgatggctagtgcatcagtgctgcaatttgctctggcactgttcatcaaagtttactttttcgcctgaggtttgcttgatgattttgcaaaggtgacctgatgcgccctttgcccacggcttgttctggaatacatcttttgaaagggcatggcagaccagttctactcgacatcgtgacatacgtactgaccctagattgttatgctttgggcgttcttcatttgaagtgtctaatctgcaagtctctatctagctagggaacagaattttacagcgtgccgtacagagtaccgagtttaggcaccaaagtctttccacgttgttcagtgaaagcccttcacttggatttgcatacaatcctttcttgggtaaagatctccagtgtgtatttgtgtgctagtacgtctcatccggttttcgaacgtccaactgacaactgatttcgcatagctcttttttttaaaaaaaatggtttagcgaataaaattagcatgctctagccacgaattttcaacgaaaaaaggtttccggatttgtttgctatttagctcagaattgaagataagaagagccttatggtcagacgtgtatcttggaatttttgtatggttgcagaagggaaggtcctgttcctaggatcaagagattagaactatgtatagttttttcaaagtaggttcatgtatgttattatttcaaataaacttcctttccacaaatttcattctgagttcatgagtatttgtgatctgattgaacatatcaacaaaaatattaatgtttaactttttatttaaat

SEQ ID NO: 63143 - DNA, 2549 bp, Zea Mays
gaagcaacaccgagcacgagggcattcgacgacgacttcctctctctcacgctagagacgcgcagtcgcgcagagtcctggctttttgcccctttccggctttgccccccttccccccaaaccacaccgatcccaatcccgccgtatccggcgaacgcgcgccgcggccatgtgcagctgctgagagaaggagcgagcgcaacgacgccactggccatggacgagggctattccaacctccccaccagccacctcctcggctccgtccccgctgtgacacaagatgacaggaaattgggtccccccgccgcccaagatgcagctgccacctctcggttgcaggagttcccacctggaggtggtaatgttggagggtatcggccaccaggtggccctgcagatggagatgttgaaaaccaagcagattggaaaggatacttcaatgttgcatcttatgctccatacttcaatgttgatactgatgttgtagttgacaggctcatcagttcagtttatccaatggatggtttttacaggaaaattgatgctaatcctgacatgtaagtttctcctatggtcacaatttgcaatctgactctttgtaaaacaaaacatgtctctttgttacctttctattgtttcagtgtcaacatttctagtgaatagtctaatatgcaatcatgtgataaaaatgtgcataaaatgatatttttcatcataactaagcattgttaatatggaaagaaatgttgcaagttgtataagatgcatattatgaatctgttttaacacttcattgtttattaactgagaaactgataatagcatgagatgacgattcagataggatagttgcagagtttttacaagagtatacaaaaatatagtgcctaagtagcattatacagattgtagcaggtagtgtgtatttgctgcaagcatagttttgggggaactagacatcacagtgttttgaatggattttgatccaaatttttgcatactaaaagttcttgctggattattaaagggtgtacccagtgccgtagcccgtaggcttcctgcactgtgcggggtatggggaagggtatctttaagcgccaagtcttacccgtataatatgcagaggctgtggctcgaacccgggccttacccgtataatatgcagaggttggggctcgaacccaggaccttccggttagactctaccactgcaccaggcccacccttctcttgctggattattgtcttagtaaattttgtcgttaattttagcttttttgtacttcatcaatcatttggatctcttgactccgcattctcttgtgttatgaattattttaatttctgcaggtatgggcctttatggatcaccactactctgattttcatgcttgctgtgtttggtaactatgccacttatctggtgcaaactaaaaaggatatggacatatggaactttgatgttggttatttcagttgggcagcatcagtcatgtatagttatgctatcattgtgcccgtcgtgttctttttcctgtttcagtattttggatcacgcccaagtcttgttcgattttggtgtatgtggggctattctctgtttatcttcatacctgcatctgtacttttgcttattcctgtgggatttcttcaatgggtcatcatagctcttgctggtggtgcatcatcttggttcatcactttaaatttgaaggaatgcactgaaggagctgatctaatggttctgatggctagtgcatcagtgctgcaatttgctctggcactgttcatcaaagtttactttttcgcctgaggtttgcttgatgattttgcaaaggtgacctgatgcgccctttgcccacggcttgttctggaatacatcttttgaaagggcatggcagaccagttctactcgacatcgtgacatacgtactgaccctagattgttatgctttgggcgttcttcatttgaagtgtctaatctgcaagtctctatctagctagggaacagaattttacagcgtgccgtacagagtaccgagtttaggcaccaaagtctttccacgttgttcagtgaaagcccttcacttggatttgcatacaatcctttcttgggtaaagatctccagtgtgtatttgtgtgctagtacgtctcatccggttttcgaacgtccaactgacaactgatttcgcatagctcttttttttaaaaaaaatggtttagcgaataaaattagcatgctctagccacgaattttcaacgaaaaaaggtttccggatttgtttgctatttagctcagaattgaagataagaagagccttatggtcagacgtgtatcttggaatttttgtatggttgcagaagggaaggtcctgttcctaggatcaagagattagaactatgtatagttttttcaaagtaggttcatgtatgttattatttcaaataaacttcctttccacaaatttcattctgagttcatgagtatttgtgatctgattgaacatatcaacaaaaatattaatgtttaactttttatttaaat

SEQ ID NO: 63144 - DNA, 1759 bp, Zea Mays
gaagcaacaccgagcacgagggcattcgacgacgacttcctctctctcacgctagagacgcgcagtcgcgcagagtcctggctttttgcccctttccggctttgccccccttccccccaaaccacaccgatcccaatcccgccgtatccggcgaacgcgcgccgcggccatgtgcagctgctgagagaaggagcgagcgcaacgacgccactggccatggacgagggctattccaacctccccaccagccacctcctcggctccgtccccgctgtgacacaagatgacaggaaattgggtccccccgccgcccaaggttgtggcatgttgtgaaactgtggattggagttcccacctggaggtggtaatgttggagggtatcggccaccaggtggccctgcagatggagatgttgaaaaccaagcagattggaaaggatacttcaatgttgcatcttatgctccatacttcaatgttgatactgatgttgtagttgacaggctcatcagttcagtttatccaatggatggtttttacaggaaaattgatgctaatcctgacatgtatgggcctttatggatcaccactactctgattttcatgcttgctgtgtttggtaactatgccacttatctggtgcaaactaaaaaggatatggacatatggaactttgatgttggttatttcagttgggcagcatcagtcatgtatagttatgctatcattgtgcccgtcgtgttctttttcctgtttcagtattttggatcacgcccaagtcttgttcgattttggtgtatgtggggctattctctgtttatcttcatacctgcatctgtacttttgcttattcctgtgggatttcttcaatgggtcatcatagctcttgctggtggtgcatcatcttggttcatcactttaaatttgaaggaatgcactgaaggagctgatctaatggttctgatggctagtgcatcagtgctgcaatttgctctggcactgttcatcaaagtttactttttcgcctgaggtttgcttgatgattttgcaaaggtgacctgatgcgccctttgcccacggcttgttctggaatacatcttttgaaagggcatggcagaccagttctactcgacatcgtgacatacgtactgaccctagattgttatgctttgggcgttcttcatttgaagtgtctaatctgcaagtctctatctagctagggaacagaattttacagcgtgccgtacagagtaccgagtttaggcaccaaagtctttccacgttgttcagtgaaagcccttcacttggatttgcatacaatcctttcttgggtaaagatctccagtgtgtatttgtgtgctagtacgtctcatccggttttcgaacgtccaactgacaactgatttcgcatagctcttttttttaaaaaaaatggtttagcgaataaaattagcatgctctagccacgaattttcaacgaaaaaaggtttccggatttgtttgctatttagctcagaattgaagataagaagagccttatggtcagacgtgtatcttggaatttttgtatggttgcagaagggaaggtcctgttcctaggatcaagagattagaactatgtatagttttttcaaagtaggttcatgtatgttattatttcaaataaacttcctttccacaaatttcattctgagttcatgagtatttgtgatctgattgaacatatcaacaaaaatattaatgtttaactttttatttaaat

SEQ ID NO: 63145 - DNA, 3913 bp, Zea Mays
atgcaacgctggttcccgggcccggcctataaactccacatgtcctccctgcaggctgctcctctcatcgtccgacgcgactgctttccatttgccactgtcggtgtcgacggacgcagatattctgtggctcaaacctttggaggcacgggcacgggcacggggcaccgaagtgttggtatacgcggcagccgggatagcgagcgtatggccacctacttcgtcctcaacaccggcgcgaagatcccgtcggtcgggctcggcacctggcaggccgacaacgggctcgtcggcgacgccgtctatgccgccgtgaaggcaggttacaggcacattgactgtgctcaagcatacaacaacgagaaagaggtcgggtttggtctcaggagagtgctggacgagggcatagtcaagcgtgaagatctcttcatcacctccaagctttgggacattaaccatgcggcggaggacgtcccggttgcactgaacggcacactgaaggacttgcaaactgactacgtggatctctacctcatgcattggccggtgaggatgaagaaaggcgccggcttcggcccgcacgccgtcgtcccgtcagacatccccgcgacgtgggccgcgatggaggagctgtacgacgccgggaaggcgcgcgccatcggcgtcagcaacttctcgagcaagaagctggcggacctgctggccgtggcgcgcgtgcgccccgccgtcgaccaggtggagtgccacccggtgtggcggcagggcaggctccgcgcgttctgcgcctcccaagggatacacctctccgcctactcgccgctgggctcgccgggcacggcgacggtgaaggcgggcgcggtgctggagcacccggccgtcgtctcggcggcggagacgctggggaagacgccggcgcaggtggcgctgcgctggggcgtccagatggggcacagcgtgctcccgaagagcaccgacgaggggaggatcagggcgaatctcgacgtcttcggctggtccttgccggaggacctgctcgccaagttctctgagatcgagcaggaacggctgattcgtgcgggcttctttgttgatcccgacggcgtgttcaaatccatcgaggagttttgggatggcgagatctgaacaactgtcctgactgggaggagctgagtgacggaatttggccactggcaaggcgtactgtgcctgtggaagaataaatttatgcgtatgaactctgaaaggcagcgtagttttcaggtagtttgtgctcggcactccaataattcctcgatgctcaagtggtctatctatcctctaaactctaaaggccatgccgctcaagcggtcttttaagccagcatatgcacaatgggaaaataggtgctaagactctctccagcaagatccggtaaaaggtccggtactctaaatttatcgtttctttggctcctttttccctccagcagcgatcggtaaacgatgcgctataataccggacgcctccgttggcctgctatgtgtcagattcatccgctcactttgtcatttttttgcagcaagcctacgtggacgctcccttctcatttattgctcgttttttaatcataaaataaagtactgctcttgccattttgaaaaaaaaacaatattttgtagtgggtcaatatttttcagtaggtctacgattttgtccaatactgaataaaatgtataaaataaagtctggtagcatttaaaaaaatttagtaatataggttaccaaacgcaattaatttaattagttcgtaattcaattttgtgcatccattttattgtgtgtaatggaaacaaaacaaaaataaaactaaatggatggaaaaaaaatctgttaacactataactttagaggacaaaatttagaaaacgttggtggagactgagaatatatagatgacagaatcttttagagtgtgctgtaaaggacagagaatatttctttaggagatagaatttaggggacgctgctggagacagcctgaatagaacgccagggacgtgatgtatattctactggaaatttacagtggccacaggaaacggtatttccagcgtacactctttcctacgggaaacgctaggagctagcatgggtggtatgaatataattgaaaagaaataatataatatgtggtatttgatatagagttatgatataaagtaaatatggctgcggagtattgtggtatagggtaaagaattttgatgacgaggacattattttcttttagagtagggatttagaataatatgaatgcgaatagcctaatatacagagaattgttagagaagaggaatattttgcttcctatattatttgaggatgctaaatctagaagttagagagcataaacatcgcgcttcgtagttttgccatccgaatcatatgcttcgcaaaaactagaccctaacatcttccatttgaatacaatgccatttcttgtatttgctttatttttttatttttccttgtattcagagcctgaatagacaaacacaaatatagttgactacgataacaccttgtagctatactctgaagtcgaactgtagtagtatttgttaagcaagcagcagtcacatgtggataatcttgttgaaacacagcaactctacatacatataagaggagcagcagagaggccattatttctcaggggtttctccatgcgaagaaggcgatattctcgactgttcacgaaaagcatctcaagaaatcagaatggtcctgattctctgttctttcgtcctcgtattccacttcaccgtcccaaagatcctccaagagaacttcgccatcagatcgtaagggatggaccaatcaaatatgtcgaagttctctccgatccttgttctgtcggcactcttaggaagcacactctgccccatttgaatcccccagcgcagagcgacctgggcaggcgttttctgcaacctctcggcaacagacatgacaacggggttgctaaggacgtttggcccactgtatccaggtgatccgggtgagcctaagggcgaatatgcctgcagcaacggaaccagaggctcagccagccaatgggaagtgagagcagatgcttatatatgttctctaaaacttacagaaagatgaacacccgttgactggcacagcttgcgtagcttgtcttgctgccaaactggatggcactcgacctggttgaccgctggaggcacacgcgcaacagcgagcagatcctgcagcttcttgcaggaaaaattgctcacaccaatcgcgcgagctttgcctgcgtggtatagcttctccatcgctccccatgtagcagggatgtccgtagggataaggttttccgggataaacatggttcctttctggatacggattggaccatgaatctgtaaagtaaggtcattatcagatagatcttagcaggtaaacagttgtcagactattatctggtaggtaccaagatcaagaacaggaatttacaaggtacagatctacgtagtcgagccgcaaatcttcgagggccgagcaaagatcctcctgcacatcttcaggtgcatggttacctggcctgcaaaattcagagtttctgatcttagagcagaaaccaatgatccgcatcattgcttcagataagcttgagaagagaagccttaccatagcttagaggtgacaaacagatcttcacgcttgaccacgccatcctcaaatagtttctgtaaagccagtccaacctataaaagagaatagacttcaatctaacaactgattgtttatgaacttggcaatgagttcataggaatttcataacttaactcgtgtatctacaaatataaaacgctatatgccttaaatgtttttgcaggactagtagataaatgtgagtag

SEQ ID NO: 63146 - DNA, 2527 bp, Zea Mays
atgcaacgctggttcccgggcccggcctataaactccacatgtcctccctgcaggctgctcctctcatcgtccgacgcgactgctttccatttgccactgtcggtgtcgacggacgcagatattctgtggctcaaacctttggaggcacgggcacgggcacggggcaccgaagtgttggtatacgcggcagccgggatagcgagcgtatggccacctacttcgtcctcaacaccggcgcgaagatcccgtcggtcgggctcggcacctggcaggccgacaacgggctcgtcggcgacgccgtctatgccgccgtgaaggcaggttacaggcacattgactgtgctcaagcatacaacaacgagaaagaggtcgggtttggtctcaggagagtgctggacgagggcatagtcaagcgtgaagatctcttcatcacctccaagctttgggacattaaccatgcggcggaggacgtcccggttgcactgaacggcacactgaaggacttgcaaactgactacgtggatctctacctcatgcattggccggtgaggatgaagaaaggcgccggcttcggcccgcacgccgtcgtcccgtcagacatccccgcgacgtgggccgcgatggaggagctgtacgacgccgggaaggcgcgcgccatcggcgtcagcaacttctcgagcaagaagctggcggacctgctggccgtggcgcgcgtgcgccccgccgtcgaccaggtggagtgccacccggtgtggcggcagggcaggctccgcgcgttctgcgcctcccaagggatacacctctccgcctactcgccgctgggctcgccgggcacggcgacggtgaaggcgggcgcggtgctggagcacccggccgtcgtctcggcggcggagacgctggggaagacgccggcgcaggtggcgctgcgctggggcgtccagatggggcacagcgtgctcccgaagagcaccgacgaggggaggatcagggcgaatctcgacgtcttcggctggtccttgccggaggacctgctcgccaagttctctgagatcgagcaggaacggctgattcgtgcgggcttctttgttgatcccgacggcgtgttcaaatccatcgaggagttttgggatggcgagatctgaacaactgtcctgactgggaggagctgagtgacggaatttggccactggcaaggcgtactgtgcctgtggaagaataaatttatgcgtatgaactctgaaaggcagcgtagttttcagcaactctacatacatataagaggagcagcagagaggccattatttctcaggggtttctccatgcgaagaaggcgatattctcgactgttcacgaaaagcatctcaagaaatcagaatggtcctgattctctgttctttcgtcctcgtattccacttcaccgtcccaaagatcctccaagagaacttcgccatcagatcgtaagggatggaccaatcaaatatgtcgaagttctctccgatccttgttctgtcggcactcttaggaagcacactctgccccatttgaatcccccagcgcagagcgacctgggcaggcgttttctgcaacctctcggcaacagacatgacaacggggttgctaaggacgtttggcccactgtatccaggtgatccgggtgagcctaagggcgaatatgcctgcagcaacggaaccagaggctcagccagccaatgggaagtgagagcagatgcttatatatgttctctaaaacttacagaaagatgaacacccgttgactggcacagcttgcgtagcttgtcttgctgccaaactggatggcactcgacctggttgaccgctggaggcacacgcgcaacagcgagcagatcctgcagcttcttgcaggaaaaattgctcacaccaatcgcgcgagctttgcctgcgtggtatagcttctccatcgctccccatgtagcagggatgtccgtagggataaggttttccgggataaacatggttcctttctggatacggattggaccatgaatctgtaaagtaaggtcattatcagatagatcttagcaggtaaacagttgtcagactattatctggtaggtaccaagatcaagaacaggaatttacaaggtacagatctacgtagtcgagccgcaaatcttcgagggccgagcaaagatcctcctgcacatcttcaggtgcatggttacctggcctgcaaaattcagagtttctgatcttagagcagaaaccaatgatccgcatcattgcttcagataagcttgagaagagaagccttaccatagcttagaggtgacaaacagatcttcacgcttgaccacgccatcctcaaatagtttctgtaaagccagtccaacctataaaagagaatagacttcaatctaacaactgattgtttatgaacttggcaatgagttcataggaatttcataacttaactcgtgtatctacaaatataaaacgctatatgccttaaatgtttttgcaggactagtagataaatgtgagtag

SEQ ID NO: 63147 - DNA, 2685 bp, Zea Mays
atgcaacgctggttcccgggcccggcctataaactccacatgtcctccctgcaggctgctcctctcatcgtccgacgcgactgctttccatttgccactgtcggtgtcgacggacgcagatattctgtggctcaaacctttggaggcacgggcacgggcacggggcaccgaagtgttggtatacgcggcagccgggatagcgagcgtatggccacctacttcgtcctcaacaccggcgcgaagatcccgtcggtcgggctcggcacctggcaggccgacaacgggctcgtcggcgacgccgtctatgccgccgtgaaggcaggttacaggcacattgactgtgctcaagcatacaacaacgagaaagaggtcgggtttggtctcaggagagtgctggacgagggcatagtcaagcgtgaagatctcttcatcacctccaagctttgggacattaaccatgcggcggaggacgtcccggttgcactgaacggcacactgaaggacttgcaaactgactacgtggatctctacctcatgcattggccggtgaggatgaagaaaggcgccggcttcggcccgcacgccgtcgtcccgtcagacatccccgcgacgtgggccgcgatggaggagctgtacgacgccgggaaggcgcgcgccatcggcgtcagcaacttctcgagcaagaagctggcggacctgctggccgtggcgcgcgtgcgccccgccgtcgaccaggtggagtgccacccggtgtggcggcagggcaggctccgcgcgttctgcgcctcccaagggatacacctctccgcctactcgccgctgggctcgccgggcacggcgacggtgaaggcgggcgcggtgctggagcacccggccgtcgtctcggcggcggagacgctggggaagacgccggcgcaggtggcgctgcgctggggcgtccagatggggcacagcgtgctcccgaagagcaccgacgaggggaggatcagggcgaatctcgacgtcttcggctggtccttgccggaggacctgctcgccaagttctctgagatcgagcaggaacggctgattcgtgcgggcttctttgttgatcccgacggcgtgttcaaatccatcgaggagttttgggatggcgagatctgaacaactgtcctgactgggaggagctgagtgacggaatttggccactggcaaggcgtactgtgcctgtggaagaataaatttatgcgtatgaactctgaaaggcagcgtagttttcaggtagtttgtgctcggcactccaataattcctcgatgctcaagtggtctatctatcctctaaactctaaaggccatgccgctcaagcggtcttttaagccagcatatgcacaatgggaaaataggtgctaagactctctccagcaagatccggtaaaagcaactctacatacatataagaggagcagcagagaggccattatttctcaggggtttctccatgcgaagaaggcgatattctcgactgttcacgaaaagcatctcaagaaatcagaatggtcctgattctctgttctttcgtcctcgtattccacttcaccgtcccaaagatcctccaagagaacttcgccatcagatcgtaagggatggaccaatcaaatatgtcgaagttctctccgatccttgttctgtcggcactcttaggaagcacactctgccccatttgaatcccccagcgcagagcgacctgggcaggcgttttctgcaacctctcggcaacagacatgacaacggggttgctaaggacgtttggcccactgtatccaggtgatccgggtgagcctaagggcgaatatgcctgcagcaacggaaccagaggctcagccagccaatgggaagtgagagcagatgcttatatatgttctctaaaacttacagaaagatgaacacccgttgactggcacagcttgcgtagcttgtcttgctgccaaactggatggcactcgacctggttgaccgctggaggcacacgcgcaacagcgagcagatcctgcagcttcttgcaggaaaaattgctcacaccaatcgcgcgagctttgcctgcgtggtatagcttctccatcgctccccatgtagcagggatgtccgtagggataaggttttccgggataaacatggttcctttctggatacggattggaccatgaatctgtaaagtaaggtcattatcagatagatcttagcaggtaaacagttgtcagactattatctggtaggtaccaagatcaagaacaggaatttacaaggtacagatctacgtagtcgagccgcaaatcttcgagggccgagcaaagatcctcctgcacatcttcaggtgcatggttacctggcctgcaaaattcagagtttctgatcttagagcagaaaccaatgatccgcatcattgcttcagataagcttgagaagagaagccttaccatagcttagaggtgacaaacagatcttcacgcttgaccacgccatcctcaaatagtttctgtaaagccagtccaacctataaaagagaatagacttcaatctaacaactgattgtttatgaacttggcaatgagttcataggaatttcataacttaactcgtgtatctacaaatataaaacgctatatgccttaaatgtttttgcaggactagtagataaatgtgagtag

SEQ ID NO: 63148 - DNA, 1219 bp, Zea Mays
tagagattagagaaacgtgtggaaaaaaaagatcggtacagaagaaggcctgggccgaataacccatactaggccggccgggcgccggattcctcattccttccattttacccctccgtccgtctctcacactgtctctctccaccctctcgctctccgacaaggcgacgacgggtaggccaccgccgccggcgccgtcccactacgacaactgctgaggccttcatcgctttcttcgccggcgacgagcacccaccaactaaggtcatggaagagatgatagatctaacgggggatggaggtgttcttaagacagtagtgcggaaagcaaaagatgatgctatagcgccatccgagagcctgcccttggttgatgttcattacgaaggtacacttgctgagactggtgaagttttcgataccacccatgaagataactctattttctcatttgaaattggacaaggcgctgtcatcaaagcatgggatatagccttaagaactatgaaggttggcgaggttgcaaaaattacatgcaaatcagaatatgcatatggagctgcaggctcaccaccagagatacctcctaatgcaacccttatttttgaggtggagctagtagcttgcaggccgaggaaaggttcaagcttaggtagtgtatctgatgagaaagccagacttgaaagcaacgggagctagctgctgctaccaaagaagaggagaaaaagaagagggaggaagcgaaggccgcggcagcagcccgggtgcaagcaaagcttgatgccaagaaggggaaggggaagggaaagggaaaatagatcgtgacgttgctgctgactattgttgtaaccaagaaaataattgtgggagcgtcctcaaactgctccgtcacttgctggttactgtgcttgatgttgtagcgtggactaatgtatcgaaaagacctaagtataaataatgtctggtatctacgtagatcactaaccgtatcgtatgcatcacagattggcgtggctgctgatatgagatagcatgtctgatttgggatgacatgttggtcagttcgtgttcgacaagctgcatgttttgtacatgaatgtcaaatactcaaatattggaactgcggagtttgttaaaatagtctacatatctatggacgagtcctatctttcatttataatgtatttagtttgaggaataaagtgatccatctttttcg

SEQ ID NO: 63149 - DNA, 1198 bp, Zea Mays
tagagattagagaaacgtgtggaaaaaaaagatcggtacagaagaaggcctgggccgaataacccatactaggccggccgggcgccggattcctcattccttccattttacccctccgtccgtctctcacactgtctctctccaccctctcgctctccgacaaggcgacgacgggtaggccaccgccgccggcgccgtcccactacgacaactgctgaggccttcatcgctttcttcgccggcgacgagcacccaccaactaaggtcatggaagagatgatagatctaacgggggatggaggtgttcttaagacagtagtgcggaaagcaaaagatgatgctatagcgccatccgagagcctgcccttggttgatgttcattacgaaggtacacttgctgagactggtgaagttttcgataccacccatgaagataactctattttctcatttgaaattggacaaggcgctgtcatcaaagcatgggatatagccttaagaactatgaaggttggcgaggttgcaaaaattacatgcaaatcagaatatgcatatggagctgcaggctcaccaccagagatacctcctaatgcaacccttatttttgaggtggagctagtagcttgcaggccgaggaaaggttcaagcttagagaacttaagaagcaacgggagctagctgctgctaccaaagaagaggagaaaaagaagagggaggaagcgaaggccgcggcagcagcccgggtgcaagcaaagcttgatgccaagaaggggaaggggaagggaaagggaaaatagatcgtgacgttgctgctgactattgttgtaaccaagaaaataattgtgggagcgtcctcaaactgctccgtcacttgctggttactgtgcttgatgttgtagcgtggactaatgtatcgaaaagacctaagtataaataatgtctggtatctacgtagatcactaaccgtatcgtatgcatcacagattggcgtggctgctgatatgagatagcatgtctgatttgggatgacatgttggtcagttcgtgttcgacaagctgcatgttttgtacatgaatgtcaaatactcaaatattggaactgcggagtttgttaaaatagtctacatatctatggacgagtcctatctttcatttataatgtatttagtttgaggaataaagtgatccatctttttcg

SEQ ID NO: 63150 - DNA, 1228 bp, Zea Mays
tagagattagagaaacgtgtggaaaaaaaagatcggtacagaagaaggcctgggccgaataacccatactaggccggccgggcgccggattcctcattccttccattttacccctccgtccgtctctcacactgtctctctccaccctctcgctctccgacaaggcgacgacgggtaggccaccgccgccggcgccgtcccactacgacaactgctgaggccttcatcgctttcttcgccggcgacgagcacccaccaactaaggtcatggaagagatgatagatctaacgggggatggaggtgttcttaagacagtagtgcggaaagcaaaagatgatgctatagcgccatccgagagcctgcccttggttgatgttcattacgaaggtacacttgctgagactggtgaagttttcgataccacccatgaagataactctattttctcatttgaaattggacaaggcgctgtcatcaaagcatgggatatagccttaagaactatgaaggttggcgaggttgcaaaaattacatgcaaatcagaatatgcatatggagctgcaggctcaccaccagagatacctcctatgcaacccttatttttgaggtggagctagtagcttgcaggccgaggaaaggttcaagcttaggtagtgtatctgatgagaaagccagacttgaagaacttaagaagcaacgggagctagctgctgctaccaaagaagaggagaaaaagaagagggaggaagcgaaggccgcggcagcagcccgggtgcaagcaaagcttgatgccaagaaggggaaggggaagggaaagggaaaatagatcgtgacgttgctgctgactattgttgtaaccaagaaaataattgtgggagcgtcctcaaactgctccgtcacttgctggttactgtgcttgatgttgtagcgtggactaatgtatcgaaaagacctaagtataaataatgtctggtatctacgtagatcactaaccgtatcgtatgcatcacagattggcgtggctgctgatatgagatagcatgtctgatttgggatgacatgttggtcagttcgtgttcgacaagctgcatgttttgtacatgaatgtcaaatactcaaatattggaactgcggagtttgttaaaatagtctacatatctatggacgagtcctatctttcatttataatgtatttagtttgaggaataaagtgatccatctttttcg

SEQ ID NO: 63151 - DNA, 1637 bp, Zea Mays
gttctaaccactacatatgcaaagcgaaggcaagtagtcaagtacccaaactgcttacctcacattattttctacaaggcaacctaaagttagatggaaagaacagcaagaatctttagaagaaagaaaagatgctattcagcacaaaatggtaatatttgcctggtggcgaaagaccaaaacaaattgttttttagtcaaacttgagattgtagcttgtgtgctaattaatttttggccgcttttgaccgccaaaaaaataaccaaaaatatgctttaattttaaatagtcccactccgaccactaaaaatagctaattttctatggccacaacagaccactgaaaataagaaatcccacatgacgacctagacatgtcggctgcggcggcgccatgggcatgggacaacggagagatcacgtcgaggtcgaactcgaagcaacggaaatgtgttcctaatgttgcgggttcaaacaggaggggctcttaactatttgttattgttacgaaatttactcaattatgttttagacacataaaaaatcaattgaatattaaattaaacacatatttaacatattagatattaaactaataacaaatattgcaatttatcttgccaaaggaacaagaaatgtataaattgaaaagaagtataatccctttttatagctcgtttgatcgttcatcatcctttagctaatgacctgataccctatgaagtgttgtggtgcgtgtggttaagaggggtgcagacaaggtgtccataaccaataagataaacatgcagagaaatcatcaaacctccactcaatctgcatgtcatttggggcctccccttgtctaaaggcttgttggcaggggtggcaaatcagacaagcttgttgggagtccatccatttgagtaatgatgttaatctggacccattgtctaacttagagagcctaagagcccagatcaatcgacccattttcatggagatcatcatcctttgttgggccatctaattgaccaggaacaacaagatcttagatcttcaaacaagaggtggccttagttcagacttcagagctgcaaattcatcttccttttttgaactggaagtgttgtcttaccgcgccaaagggagctactaaccaaggtttcaggaatggataaactatatttctagaagtgggtgcaaaccatccgcgagtttctaaaaaaacaataattcgataacggatggacattttccaagatctcacgtcccgtgctacattccaatttccaagccaggaggcagctgcatagccttggagacggtctgtttcggcctgtttcggtgccttggagacggcctccttcagatgacacctttatgcgggctttccaagtccgctatgtcccggtcgtttccgttgcaaaatagctataattagaggcacatatataccccaacctgcttgtttattattggtaatcttattgttatatatacagtttgaggacagagaaatcccatcttcttacgatctggatcaaaaaaactactatgcataacctgccatccaatatatatgtaacgacactgtgtgtgactctcttttttcagagatcaggttcagtctcatctatcagaatttactactggt

SEQ ID NO: 63152 - DNA, 1124 bp, Zea Mays
gaaggatccaaacagggccaaagcttaggaccaaaatcccctccgtgattgccgctcgtcgatggctacaaggccagtcgactgcgtttcccccgcctatcgatccggatacaccaccactcgacgcagaaaaagccgaggaccgccatagccatagaactcgaaccagggggagggcaccgcggtcatcccctccactcgacgctcgtcggccacctcgggcgaagccatgcgcccccaccaagcatccaagacagagtgttgtcgctgtcggtcagagacgacgaagggactcagctgtgagcggaagattgggcgccgccgcgggaccccgcctaggttgccgttcgggcctcggatctgggcctgggagcttcaccctgcggtgcgtgactcagccgtggcctcgttgtgggtagagctcttggaattgctcaccatggatacgtcgtcgccgcggatccacctgttgccgcggccctgcttctctgctgccccattactggaacaacaagatcttagatcttcaaacaagaggtggccttagttcagacttcagagctgcaaattcatcttccttttttgaactggaagtgttgtcttaccgcgccaaagggagctactaaccaaggtttcaggaatggataaactatatttctagaagtgggtgcaaaccatccgcgagtttctaaaaaaacaataattcgataacggatggacattttccaagatctcacgtcccgtgctacattccaatttccaagccaggaggcagctgcatagccttggagacggtctgtttcggcctgtttcggtgccttggagacggcctccttcagatgacacctttatgcgggctttccaagtccgctatgtcccggtcgtttccgttgcaaaatagctataattagaggcacatatataccccaacctgcttgtttattattggtaatcttattgttatatatacagtttgaggacagagaaatcccatcttcttacgatctggatcaaaaaaactactatgcataacctgccatccaatatatatgtaacgacactgtgtgtgactctcttttttcagagatcaggttcagtctcatctatcagaatttactactggt

SEQ ID NO: 63153 - DNA, 3265 bp, Zea Mays
  misc_feature (1)..(2): n is a, c, g, or t
nngttgaggagattgaagcagggtcgtaccaacatctaggagaggaaacagggtgattaagagaagagaaagcacgggagattgagaagagaggaagcgagggagaagagaaaaacaaaggacctcagagccacacccgcgacgccatgctggtgtcgagcccgcgctgcgccgccctcgtggtaccacgcacgccgcctgcttgtaccgcgattgcaccgcctacttgtgctcaatgtcgcgccaccaagaacaagaggaaagtgcccctctctcctctttcctaatctttcccttccttactcttctcgcacatcaaaggaaataggcgtgaaaaagggccagccccacacccagatttttggggcttaaggcacccactaggcgatcaaagtcgacgcctttgacacctaatgcgcctaggcaatgcctagaatgccaaggcggacgccctaagcgtccaggtcatggcgtcaccgacacccaaaaattttcggcgcccggacgcctagacgatgcctttgaaaccattatttcactataacaaagaaatgaaactgcccaaaaaaaatacaatctcttaaaacaaagatgccactgcagtgttatctactatattaaaaatggttaacttggtccatggacccaaccttaaacaaaaagggtaaaaagagcctatcacaagactcaattttggagctagaattaataacatattataatgcaatgcagaccaacacgaataattatcttcaagtatatcagaaaacaagaattctagcccctaggtttgatcatacttgagtaacttatttcatctgacagaaatccaacatatcaacacaccagacagttgtatgactacaacattattgtacgacatgctcaatatttttaaggccctaaaacaagaagaattgtttcagcattgttaagtaaactgcaagcaaacaaagatgtgtcttcacaattctttttgggcccaacaatgccctaccctcagtggatcaataacttcaaaatctgagagaactactcttttcttttccaaaaggaagtaggtcaactatgtttccaaaacatatacccagagcatagaaaaagcccccgcccatccgcgtcgctccctaggggcggctcgggcgaaagcactgccgccccacccgcctcccccccccggcctcactccgcctcgccgccgaccgagcatgcaccgggaagctcgcgctgatgcaaggacggcggcggcggggccctcctctatgcagttggcttccccatgggttgctcccgttcatggcggtcggatcgtcgttgtgggtcgtcggaggccaaatcccgcgaacccatggctggatcgggcatgtccttggccaaatctggtgtgcctccatggaggaggtccccgtcaagctccatggcagcctctcggcctcgacgggagcgacgcgactgctaggctccccacggcgacaacggccacccactcaaggtgctgtgagttgtgggcggtgtggcctttggggctgcggtcgccggatctggctcctcggtggtggtgtgtggcaccggcaagtggacagcagcggccccagcggcgtatgcggtggtgcgacacattttgtctcggggtcctggccaggagttgcgttcggggttttcttgggcgaaagccttggcgacgacaacgaccctaggcgtcgcttcccctgttgaggacattgtgtcccccatcattgtcttttgtgggcgaaagcctggtccatctcggaccggcgacggtggcgtcctcgacgtcactcctttcctgaaggcgtcgctactgaagttcgtctcggctacgtcgtcgccatcggtggttgcttttgtctttcaggcccggtttgcgtgtggaggtggggtcttgcatcggggagtcaaagctgctacgtcaggggatgtggctcggcaacgatgacgtggggcaagcccccctcctttgtgggctggtttgctttgaagttgaggctgttggcggaggcggggcggaggatcaaggttttggaagtcttgctggtgaagaatcagagttgtctcgagtgggacgtctcgtggcttggcaacgacagcgtgttgcagtcttccttctcctatgccggtgtttgtagccgtcgttgtggtttctgttggccatgtgctgcccgtcttgaggagttagctgctcgtcacttgtgttgagcttggcaatgatgactcgggatgggtattgtgtgtggggggttgctgttgtctaggttgtttgtgcgccctgtattgtgttgcccagtctaggtttctcctttttaatataatcggcaagctttgtctggttcatttcaaaaatatacctagttcctcaaccttttccaaagtgatgttatattgtatgacaagatcacaaaaacagcttttggttcctatttgacaccaaaaccctgccaaaaattgataatcaatttggcaacctgtgaattggccaaacatttgccagaaaataaactattattgtaggtgtgggacatttgcaagaaaataaaccacaactgcaggtgcatggggcatttgaatgaaaacaaactggatcacatctatggatctacctaaaacacacagctaagtagtataacagatccatacaaacgtacatggtgtctgcagaaaatgccggcagcaatttgattcatcagcatctcatatgaatcagcatcgaaataagaaatctggttggttacactacaattcaaccatagactgctaatcgatatcacaagttcacaacacaggatgcccatagtgtacaccatggaaaccaaactcagatgcggtgatgactatgcacaagtggtacagatcagcatcaagacacagaatccgcttggttacagcatagttcattaataagggctgtggatcaacatcgcaacacagaattctgatgtaacaccatagagaccaagcaatcagaaccagaggcagacacacaaattatatagaatcggcatcaaaatgcagaatcagctcgtgacaccacaatttatcaatatgggttgcagatcgacatcacagcacagaattccaacagtatacaccatgcaaatcaaacaacctgaacctgaaacgactttgcgcacccatcaagcatacaatctatatcccaagagcaattgtgcagtcagtatagagcaggcaaaattcgaactcactatagggtgtcaggcggtccgatgatggtgacctgccactcgaa

SEQ ID NO: 63154 - DNA, 2788 bp, Zea Mays
tgggggaaggtcattattgcattgaagtagcctccatcactgcaaaagtaaaatgttgaccctcttaatttcatgaaaatatacatgaaaaatgaagtgtggcagtaaatttaaatttccattcactgagcagacacattccatatgaactactcagtttcactcatggttttaaaggtggtaaggcggaactaggcgctcagccactgcctggacgcctaggcgagttaggtgactccatacaactaactaatatagatagcagccataaattctgcacacaatagttgatctgaaatagccacaaagtagtctctaattgcataatagcaagtcacaaaatataaaacagcacaatagcaaatctgaaatagccacatagtttctaatggcataattaatggtaactagctgctaatgcagcaaatatgctaatgcattctagcaatagctactagctagttgtctagttctcatttctaaactccctcatctctcaaaaatcatcatcaaacactcctaggatattgattgcctcctcttcaccatcatcgccaccatcaggttcatcttcagaatctgtgatttctgcatcatttttcttcctcttcatcttcctctttagcctctgacgcattctatgcagcagcagaatttcttcaatacacattatgggctcttcttggaaagtttcggacacgaagtgcttctgatgctcaaatggcattatccacaagttcccacgtaaggtcacacccacgctcaccttcagggcctccatgcaatgagtcaacctactcattgtcccagttgaagtcctcattaaccaaaggatcaaagtttttccccttctgatgtagttttggaacctagctttcatcttccggttgtaaaaatgaagacgatagaattcaacctctcatgcaacaatcggtttcttttctttgtatgtacctacaaaatcaaaaaacacctagtcactaattgttgaaatatttgttacaaaagtaggcagatgaagacttgaagaggcacattgtcgcttacaaattcaaaggtactccaattgcgttcacaaccagatgatgacgtacaaagactcaccaaacgcatagcaaattgctataaaactcaatagcatgaccaccatacgaacgccaccactcaactagaataacaacataacaaatgcagcaatatattaggagctaggactgaaaataaagcctgctacttgctgaaattaaaatgcaatagcagtcgtgcacttacgaggggtcatagtttggccatcttatttgaaaaaactgctcctctaagatactcaaaatcataatccattgcttgagaattaatcttgtctcttgtttcatcatcatctaccattcttccaagcacatcaagaaagcaacctcttagctgcccaatagtagcatcatcattatttcttatgagaggatgcagctttcctgggttcaaatacattgtagccccgcaagtgggtgacccatttgtttctcccaacatcgttcaattatagtcatgttgctcttgagtaaactcttcttgttttggagaagaaagctttgattgatcttttcatttgcatgtttcatcaatgcttagacctccagtatcgctgttctctcatctccatctaccaccctaagtacaataagtagtggccacgaagctctaaagcaaatcttctactgaattctaaaattgtgtggagaagacaatgttatacacatccaatctagctctagtccttaccaatctgttctcggtccaaacaacacttgtaaaaataaagacttcaaagcatccttgtgcttgtataagctcttcaatgtgagaaacgaagaagcaaaatgagtggcagcgggccacacaagatcaaccccacccatgtttgtatatggaagttatcacacgccttgcacacgcaattggtttcttgaattccttcaagtttcctatgccctccaagcaatgtgcagcacatggactctaaaataatgtaggaatcctctccattagaagcttgtctgttgccttgtaattggcactattatcagtaacaacttgaaccatcgtgtctctcccaatatcatcaattggacttcacttgatgcatcaatggactctaaaaagtaaatgccctctaagttgttcactaaaaagttaatcagatgatatcccctcctatcagaccatccattggacatgactgtccagccatagtgtttccatgcacgctgatgttcctccctcattgtctttgttgacttcacaacctcttgaatcaatggttcaccaagttggtaaggtgttggaggctttataccctgaaccaaattgtgttgtggcctcaattataatctgaaattgtctggctgctgttgcattgaaaggtacaccacactcataaaagaataaagtccactacatgtccacatcttccttgccttttgcactagccaagattgtgggctgataagagcctaaaaattcatccaccacctcttctagtgttttctgcaacacctcaactacagacttggttgccttttgttgcgctttaactatttggcttcaattgtaaggtggattgtctttttttggctgttgtacctgaactgggcttagggtgcaccttggaggcttgagactccactacaatagaagcattattctccccatcggctacagccacctccaccacttcatcaccttcttcttctttatctaagaagattggtcttttctcttgtttgtatccaaa

SEQ ID NO: 63155 - DNA, 2076 bp, Zea Mays
gcacaacctaccggcttcgcggtttcccttttgttccgtttcgtgcacttaagccgtccgcacgccgtcttccccatctcgcgcagcgctactgccggctgtccggagtcccgaccaccgtcctcggctccccgccgtgaatccatcatcccgtaatggagacctgcccctcggtgaagaacatcctcttgctggactcggagggaaagcgcgtcgccgtaaagtactacagcgatgactggcctactctatccgcgaagctggccttcgagaagtcggtatttaccaaaacccagaaagcgaatgctggaacggaaggtaatttacatatgctttctcttatgcggaagtagttgtgtgagccacggcgagcgttgctgtgctcgattgaggtagtacagagtagttgattagcattatcatctcataatgaactcacgtgtgtcagtgtgtgatgtattgttataatccgttctatatatgctgatgttgggcaagaatgcttctttatagggtagaatcacttcttcgatattaaattacaccattcttgttttgattcttttgctgtgctacatgttaatttattggtgcctatgccattttattcattgcttatttgacatggcttatatacaaattatctactctactccctccattccaaattgcaagatgttttagcttttctagacatcttttgctatgtacttagatatacattatatttaaatacattatatttatatacattatatgtttttcatgtccagctgtttatcatctattaacctcagtcataacactgtttgtacgagctcccactcatgccacaaatctgtaaatgagccagggctagttttccatctgactgaccttgatttctccttaaacatgcagatatgactgtttgagtttttgttcttctcttcaagtatttcatatttttctttgtttctctttaacagttgagattgtaatgtttgacggtcaaattgtggtatacaagttcatccaagacctgcacttttttgttactggaggagaagaagagaatgagcttattttagcatcagttcttcagggattctctgatgctgtcgaacgacttctcaaaaacatggttgacaaaaggacagcactcgagaatttggatatgatcctattgtgccttgatgaaattgttgatggagggattgtacttgaaacagaaggaagagagatagctgaaaaggtgtctggacatggattggagggtgcttcatcagctgagcagactttagtcaacgccctaacgcaagcaagagagcattttgcgaagtctcttctcatgtgatgctatgctttatatattagggcgacgatggagtatctattactgtgtctggataacacagtttttttttttggttagcagtggaccaaaaaaaaaaaaggtctgaaatctttgaatgtgtagaatggcatgttgtgtccaaaattttcatttgtaagccttcaaagttgtgtagcatgtttttttcttctaattttgactggtttcgttatcggtcgttttgtttaatctcttcctgttgtaaacggtaaaatagcatgcttgatggcatgttgtaacttaacaaattagggctacactttgtttaagatggtaatgtctccctgaaaccaaaacattattggaatctgccaaaaattcaccttacaattttgtatccatgttttttatattaatgggtgcaaaaagcaaagggtgacggtgagtgtttactcgccggcggtgacatggtgagacagatcgtctctccgcttgattgcattgtcgacatgtcgagacaggtcgtctctctgcttgattgcattgtcatctgcggcgtcactgaactgctgcttgtagccaaggtcatggttgcctgaaaccagttcgtctctgcttggagtcccttccatgtcgatgatgatgttggttatcaagcagcagacaaagatgatccgtggcagccggtgtttgtcaggcctccacagctctccctgaatgacacgccacctccctttgagcgtcgccaatgcggtctgcac

SEQ ID NO: 63156 - DNA, 1733 bp, Zea Mays
tttaactgaggcttagcaaagaagtgttggcaagagttgcctcctgttgcggttctctgatggttccttcactacaagctttattaccacaattggtattgactttaagatacgaacgatagaattggatggcaagcgtataaagctacagatttgggatacggcgggccaagaacgcttccggactattaccaccgcgtactaccgaggagctatgggcatcttgctggtttatgatgtcaccgatgaatcttcttttaacaacatccgaaactggattcggaacattgaacaacacgcctctgataatgtcaacaagattttggttggcaacaaggccgatatggacgaaagcaagagggctgtacctactgcaaaaggacaagcacttgctgatgagtacgggatcaagttttttgaaacgagtgcgaagacaaacctgaatgtggagcaagtgttttttctccatcgcacgtgacatcaagcagaggcttgcggagactgattcaaagccagaggtacaaataactgtgcataggtatgcttgtcgttccattattcatcgtgttcactgttctgaacaatgtaggacaaggcaatcaaaattaacaagccagaccagggttccgaggcaccagctgcccagcgatctgcttgctgcggctcataagcagatgcacgatggccatagcctttggttatttgacattatttatttcccgcttggctgttataggaaggatttgaagaagccacttatgatataccgatgtggttgtactcgtggttgcttccattctttgaagcaaccacctcttgctgttgacgtagctattgctattgctgggagctattgcactcttgcattggatccgttggaaaaactctcccctccctacagtgtgtaatgaatgaaatccatgtcgttgggtttgcatggaataacgtgtcgctcttgtgtgtgtgttttaagtgtcgccgttccttgataatcgaatttgttgggaccaagaatatatctacctggaatgtctgtatccacagaaagtctggatcttcgatttaggttaaaaggaaacgtatctggaaatagaccgctgcatgttgtaatgtttgaaaaaagagtaaataaaacttgtacagttgtatatactataattgtaggcagcttgtcaaagaggagggcagtccagtatcagcgatttccgttcgcagtgcgctgtgttgccgagcacggcgtcattccggcacttggcgcagttccccgacggcgccaggctcaagtccaaacagattccgctggcacagccagcgccgccaacgttggcttcctcaaccgacgtggcgtccccagagcggagctcacattcggactcggctgccagcgaagtcctgcggtgccgacgcatgtggccgcccagcgcctggccgaccgcgaactcgagcccgcagatggggcagccgtgcagcctcggccccgccgcgctctcgcgcggctcatccagcctcgttcggcgtagtagccccgggtcgccgacgccgtaggggtaagggtagggcttggggcgcctgtggctggcgcggtggccgcccagcgcctggaacgtcgggaacctcctcctgcacgtcttgcactcgaacacgcgcccgcgcgcgccgagccccgccgccgccgtcctcgcgccgccctgttgccgctgcgagaggagcatggggacggcgccggtctccat

SEQ ID NO: 63157 - DNA, 1965 bp, Zea Mays
ggttaatcacctgcaccgcaagtaacccaacactgtcttccaatgcaagtgactgccccgacccatcatgcgccaggcgaatcaaaccactacctgatttgtttaccccccgaaatttgccgtctcctcgtctcgctcctctccctgcgcagcccccagatccggcaccgcccgctcctcgatccccgcaccccacgcccgcaggccgggaccggcggggtcgcgcgccgggtaggaggaggagaagaggaagggtggtatggcggcgccgccggcgagggccagggccgactacgactaccttatcaagctgctcctcattggagacagcggtgttggcaagagttgcctcctgttgcggttctctgatggttccttcactacaagctttattaccacaattggtattgactttaagatacgaacgatagaattggatggcaagcgtataaagctacagatttgggatacggcgggccaagaacgcttccggactattaccaccgcgtactaccgaggagctatgggcatcttgctggtttatgatgtcaccgatgaatcttcttttaacaacatccgaaactggattcggaacattgaacaacacgcctctgataatgtcaacaagattttggttggcaacaaggccgatatggacgaaagcaagagggctgtacctactgcaaaaggacaagcacttgctgatgagtacgggatcaagttttttgaaacgagtgcgaagacaaacctgaatgtggagcaagtgttttttctccatcgcacgtgacatcaagcagaggcttgcggagactgattcaaagccagaggcaatcaaaattaacaagccagaccagggttccgaggcaccagctgcccagcgatctgcttgctgcggctcataagcagatgcacgatggccatagcctttggttatttgacattatttatttcccgcttggctgttataggaaggatttgaagaagccacttatgatataccgatgtggttgtactcgtggttgcttccattctttgaagcaaccacctcttgctgttgacgtagctattgctattgctgggagctattgcactcttgcattggatccgttggaaaaactctcccctccctacagtgtgtaatgaatgaaatccatgtcgttgggtttgcatggaataacgtgtcgctcttgtgtgtgtgttttaagtgtcgccgttccttgataatcgaatttgttgggaccaagaatatatctacctggaatgtctgtatccacagaaagtctggatcttcgatttaggttaaaaggaaacgtatctggaaatagaccgctgcatgttgtaatgtttgaaaaaagagtaaataaaacttgtacagttgtatatactataattgtaggcagcttgtcaaagaggagggcagtccagtatcagcgatttccgttcgcagtgcgctgtgttgccgagcacggcgtcattccggcacttggcgcagttccccgacggcgccaggctcaagtccaaacagattccgctggcacagccagcgccgccaacgttggcttcctcaaccgacgtggcgtccccagagcggagctcacattcggactcggctgccagcgaagtcctgcggtgccgacgcatgtggccgcccagcgcctggccgaccgcgaactcgagcccgcagatggggcagccgtgcagcctcggccccgccgcgctctcgcgcggctcatccagcctcgttcggcgtagtagccccgggtcgccgacgccgtaggggtaagggtagggcttggggcgcctgtggctggcgcggtggccgcccagcgcctggaacgtcgggaacctcctcctgcacgtcttgcactcgaacacgcgcccgcgcgcgccgagccccgccgccgccgtcctcgcgccgccctgttgccgctgcgagaggagcatggggacggcgccggtctccat

SEQ ID NO: 63158 - DNA, 2017 bp, Zea Mays
caggctttaagctcaccggtcggtggctgggcgccttgccgccttgggttaatcacctgcaccgcaagtaacccaacactgtcttccaatgcaagtgactgccccgacccatcatgcgccaggcgaatcaaaccactacctgatttgtttaccccccgaaatttgccgtctcctcgtctcgctcctctccctgcgcagcccccagatccggcaccgcccgctcctcgatccccgcaccccacgcccgcaggccgggaccggcggggtcgcgcgccgggtaggaggaggagaagaggaagggtggtatggcggcgccgccggcgagggccagggccgactacgactaccttatcaagctgctcctcattggagacagcggtgttggcaagagttgcctcctgttgcggttctctgatggttccttcactacaagctttattaccacaattggtattgactttaagatacgaacgatagaattggatggcaagcgtataaagctacagatttgggatacggcgggccaagaacgcttccggactattaccaccgcgtactaccgaggagctatgggcatcttgctggtttatgatgtcaccgatgaatcttcttttaacaacatccgaaactggattcggaacattgaacaacacgcctctgataatgtcaacaagattttggttggcaacaaggccgatatggacgaaagcaagagggctgtacctactgcaaaaggacaagcacttgctgatgagtacgggatcaagttttttgaaacgagtgcgaagacaaacctgaatgtggagcaagtgttttttctccatcgcacgtgacatcaagcagaggcttgcggagactgattcaaagccagaggacaaggcaatcaaaattaacaagccagaccagggttccgaggcaccagctgcccagcgatctgcttgctgcggctcataagcagatgcacgatggccatagcctttggttatttgacattatttatttcccgcttggctgttataggaaggatttgaagaagccacttatgatataccgatgtggttgtactcgtggttgcttccattctttgaagcaaccacctcttgctgttgacgtagctattgctattgctgggagctattgcactcttgcattggatccgttggaaaaactctcccctccctacagtgtgtaatgaatgaaatccatgtcgttgggtttgcatggaataacgtgtcgctcttgtgtgtgtgttttaagtgtcgccgttccttgataatcgaatttgttgggaccaagaatatatctacctggaatgtctgtatccacagaaagtctggatcttcgatttaggttaaaaggaaacgtatctggaaatagaccgctgcatgttgtaatgtttgaaaaaagagtaaataaaacttgtacagttgtatatactataattgtaggcagcttgtcaaagaggagggcagtccagtatcagcgatttccgttcgcagtgcgctgtgttgccgagcacggcgtcattccggcacttggcgcagttccccgacggcgccaggctcaagtccaaacagattccgctggcacagccagcgccgccaacgttggcttcctcaaccgacgtggcgtccccagagcggagctcacattcggactcggctgccagcgaagtcctgcggtgccgacgcatgtggccgcccagcgcctggccgaccgcgaactcgagcccgcagatggggcagccgtgcagcctcggccccgccgcgctctcgcgcggctcatccagcctcgttcggcgtagtagccccgggtcgccgacgccgtaggggtaagggtagggcttggggcgcctgtggctggcgcggtggccgcccagcgcctggaacgtcgggaacctcctcctgcacgtcttgcactcgaacacgcgcccgcgcgcgccgagccccgccgccgccgtcctcgcgccgccctgttgccgctgcgagaggagcatggggacggcgccggtctccat

SEQ ID NO: 63159 - DNA, 1889 bp, Zea Mays
caggctttaagctcaccggtcggtggctgggcgccttgccgccttgggttaatcacctgcaccgcaagtaacccaacactgtcttccaatgcaagtgactgccccgacccatcatgcgccaggcgaatcaaaccactacctgatttgtttaccccccgaaatttgccgtctcctcgtctcgctcctctccctgcgcagcccccagatccggcaccgcccgctcctcgatccccgcaccccacgcccgcaggtgttggcaagagttgcctcctgttgcggttctctgatggttccttcactacaagctttattaccacaattggtattgactttaagatacgaacgatagaattggatggcaagcgtataaagctacagatttgggatacggcgggccaagaacgcttccggactattaccaccgcgtactaccgaggagctatgggcatcttgctggtttatgatgtcaccgatgaatcttcttttaacaacatccgaaactggattcggaacattgaacaacacgcctctgataatgtcaacaagattttggttggcaacaaggccgatatggacgaaagcaagagggctgtacctactgcaaaaggacaagcacttgctgatgagtacgggatcaagttttttgaaacgagtgcgaagacaaacctgaatgtggagcaagtgttttttctccatcgcacgtgacatcaagcagaggcttgcggagactgattcaaagccagaggacaaggcaatcaaaattaacaagccagaccagggttccgaggcaccagctgcccagcgatctgcttgctgcggctcataagcagatgcacgatggccatagcctttggttatttgacattatttatttcccgcttggctgttataggaaggatttgaagaagccacttatgatataccgatgtggttgtactcgtggttgcttccattctttgaagcaaccacctcttgctgttgacgtagctattgctattgctgggagctattgcactcttgcattggatccgttggaaaaactctcccctccctacagtgtgtaatgaatgaaatccatgtcgttgggtttgcatggaataacgtgtcgctcttgtgtgtgtgttttaagtgtcgccgttccttgataatcgaatttgttgggaccaagaatatatctacctggaatgtctgtatccacagaaagtctggatcttcgatttaggttaaaaggaaacgtatctggaaatagaccgctgcatgttgtaatgtttgaaaaaagagtaaataaaacttgtacagttgtatatactataattgtaggcagcttgtcaaagaggagggcagtccagtatcagcgatttccgttcgcagtgcgctgtgttgccgagcacggcgtcattccggcacttggcgcagttccccgacggcgccaggctcaagtccaaacagattccgctggcacagccagcgccgccaacgttggcttcctcaaccgacgtggcgtccccagagcggagctcacattcggactcggctgccagcgaagtcctgcggtgccgacgcatgtggccgcccagcgcctggccgaccgcgaactcgagcccgcagatggggcagccgtgcagcctcggccccgccgcgctctcgcgcggctcatccagcctcgttcggcgtagtagccccgggtcgccgacgccgtaggggtaagggtagggcttggggcgcctgtggctggcgcggtggccgcccagcgcctggaacgtcgggaacctcctcctgcacgtcttgcactcgaacacgcgcccgcgcgcgccgagccccgccgccgccgtcctcgcgccgccctgttgccgctgcgagaggagcatggggacggcgccggtctccat

SEQ ID NO: 63160 - DNA, 1965 bp, Zea Mays
atagcatccggtgtcaggctttaagctcaccggtcggtggctgggcgccttgccgccttgggttaatcacctgcaccgcaagtaacccaacactgtcttccaatgcaagtgactgccccgacccatcatgcgccaggcgaatcaaaccactacctgatttgtttaccccccgaaatttgccgtctcctcgtctcgctcctctccctgcgcagcccccagatccggcaccgcccgctcctcgatccccgcaccccacgcccgcaggccgggaccggcggggtcgcgcgccgggtaggaggaggagaagaggaagggtggtatggcggcgccgccggcgagggccagggccgactacgactaccttatcaagctgctcctcattggagacagcggtgttggcaagagttgcctcctgttgcggttctctgatggttccttcactacaagctttattaccacaattggtattgactttaagatacgaacgatagaattggatggcaagcgtataaagctacagatttgggatacggcgggccaagaacgcttccggactattaccaccgacatccgaaactggattcggaacattgaacaacacgcctctgataatgtcaacaagattttggttggcaacaaggccgatatggacgaaagcaagagggctgtacctactgcaaaaggacaagcacttgctgatgagtacgggatcaagttttttgaaacgagtgcgaagacaaacctgaatgtggagcaagtgttttttctccatcgcacgtgacatcaagcagaggcttgcggagactgattcaaagccagaggacaaggcaatcaaaattaacaagccagaccagggttccgaggcaccagctgcccagcgatctgcttgctgcggctcataagcagatgcacgatggccatagcctttggttatttgacattatttatttcccgcttggctgttataggaaggatttgaagaagccacttatgatataccgatgtggttgtactcgtggttgcttccattctttgaagcaaccacctcttgctgttgacgtagctattgctattgctgggagctattgcactcttgcattggatccgttggaaaaactctcccctccctacagtgtgtaatgaatgaaatccatgtcgttgggtttgcatggaataacgtgtcgctcttgtgtgtgtgttttaagtgtcgccgttccttgataatcgaatttgttgggaccaagaatatatctacctggaatgtctgtatccacagaaagtctggatcttcgatttaggttaaaaggaaacgtatctggaaatagaccgctgcatgttgtaatgtttgaaaaaagagtaaataaaacttgtacagttgtatatactataattgtaggcagcttgtcaaagaggagggcagtccagtatcagcgatttccgttcgcagtgcgctgtgttgccgagcacggcgtcattccggcacttggcgcagttccccgacggcgccaggctcaagtccaaacagattccgctggcacagccagcgccgccaacgttggcttcctcaaccgacgtggcgtccccagagcggagctcacattcggactcggctgccagcgaagtcctgcggtgccgacgcatgtggccgcccagcgcctggccgaccgcgaactcgagcccgcagatggggcagccgtgcagcctcggccccgccgcgctctcgcgcggctcatccagcctcgttcggcgtagtagccccgggtcgccgacgccgtaggggtaagggtagggcttggggcgcctgtggctggcgcggtggccgcccagcgcctggaacgtcgggaacctcctcctgcacgtcttgcactcgaacacgcgcccgcgcgcgccgagccccgccgccgccgtcctcgcgccgccctgttgccgctgcgagaggagcatggggacggcgccggtctccat

SEQ ID NO: 63161 - DNA, 459 bp, Zea Mays
cgatgatccgttttcgtatggggtgttggcaagagttgcctcctgttgcggttctctgatggttccttcactacaagctttattaccacaattggtattgactttaagatacgaacgatagaattggatggcaagcgtataaagctacagatttgggatacggcgggccaagaacgcttccggactattaccaccgcgtactaccgaggagctatgggcatcttgctggtttatgatgtcaccgatgaatcttcttttaacaacatccgaaactggattcggaacattgaacaacacgcctctgataatgtcaacaagattttggttggcaacaaggccgatatggacgaaagcaagagggctgtacctactgcaaaaggacaagcacttgctgatgagtacgggatcaagttttttgaaacgttttggatccctggacctttgtttgggtttcaataa

SEQ ID NO: 63162 - DNA, 484 bp, Zea Mays
gtacgctctacacccgctcgcgttcgtgggatcggagttggattcgggtgttggcaagagttgcctcctgttgcggttctctgatggttccttcactacaagctttattaccacaattggtattgactttaagatacgaacgatagaattggatggcaagcgtataaagctacagatttgggatacggcgggccaagaacgcttccggactattaccaccgcgtactaccgaggagctatgggcatcttgctggtttatgatgtcaccgatgaatcttcttttaacaacatccgaaactggattcggaacattgaacaacacgcctctgataatgtcaacaagattttggttggcaacaaggccgatatggacgaaagcaagagggctgtacctactgcaaaaggacaagcacttgctgatgagtacgggatcaagttttttgaaacgttttggatccctggacctttgtttgggtttcaataa

SEQ ID NO: 63163 - DNA, 703 bp, Zea Mays
tcatgcgccaggcgaatcaaaccactacctgatttgtttaccccccgaaatttgccgtctcctcgtctcgctcctctccctgcgcagcccccagatccggcaccgcccgctcctcgatccccgcaccccacgcccgcaggccgggaccggcggggtcgcgcgccgggtaggaggaggagaagaggaagggtggtatggcggcgccgccggcgagggccagggccgactacgactaccttatcaagctgctcctcattggagacagcggtgttggcaagagttgcctcctgttgcggttctctgatggttccttcactacaagctttattaccacaattgtattgactttaagatacgaacgatagaattggatggcaagcgtataaagctacagatttgggatacggcgggccaagaacgcttccggactattaccaccgcgtactaccgaggagctatgggcatcttgctggtttatgatgtcaccgatgaatcttcttttaacaacatccgaaactggattcggaacattgaacaacacgcctctgataatgtcaacaagattttggttggcaacaaggccgatatggacgaaagcaagagggctgtacctactgcaaaaggacaagcacttgctgatgagtacgggatcaagttttttgaaacgttttggatccctggacctttgtttgggtttcaataa

SEQ ID NO: 63164 - DNA, 866 bp, Zea Mays
cagaaaattgcaactgtggccagcaccagtgcaccacatagcatccggtgtcaggctttaagctcaccggtcggtggctgggcgccttgccgccttgggttaatcacctgcaccgcaagtaacccaacactgtcttccaatgcaagtgactgccccgacccatcatgcgccaggcgaatcaaaccactacctgatttgtttaccccccgaaatttgccgtctcctcgtctcgctcctctccctgcgcagcccccagatccggcaccgcccgctcctcgatccccgcaccccacgcccgcaggccgggaccggcggggtcgcgcgccgggtaggaggaggagaagaggaagggtggtatggcggcgccgccggcgagggccagggccgactacgactaccttatcaagctgctcctcattggagacagcggtgttggcaagagttgcctcctgttgcggttctctgatggttccttcactacaagctttattaccacaattggtattgactttaagatacgaacgatagaattggatggcaagcgtataaagctacagatttgggatacggcgggccaagaacgcttccggactattaccaccgcgtactaccgaggagctatgggcatcttgctggtttatgatgtcaccgatgaatcttcttttaacaacatccgaaactggattcggaacattgaacaacacgcctctgataatgtcaacaagattttggttggcaacaaggccgatatggacgaaagcaagagggctgtacctactgcaaaaggacaagcacttgctgatgagtacgggatcaagttttttgaaacgttttggatccctggacctttgtttgggtttcaataa

SEQ ID NO: 63165 - DNA, 1126 bp, Zea Mays
gattggtccttgccttctcacacggatcgctgagccccatccaacagctcgtatcaaccgaaaccaatgccacgcaacgctccagattgcagtaccgccctccacacaacgaaaacacaaacgcacacaagcacacgacgcaagggtgacgactgacgagagggagagagagagaggcgaggaaggagggagagagcacgggggattgatcgaagatggatgccggagcaaaggtggtgaagaaggccgcggcggggcgtcgcggcgggggcggccccaagaagaagccggtctctcgctccgtgaaggccggcctccagttccccgtaggccgtatcggccgctacctcaagcagggtcgctactcccagcgtgtcggcaccggcgcccccgtctacctcgctgccgtcctcgagtacctcgccgccgagctcctcgagttggcggggaacgcagcgcgggacaacaagaagaaccggatcatcccgcggcacgtactgctggcgatccgcaacgacgaggagctcgggaagctactggccggcgtcaccatcgcacacggcggggttctgcccaacatcaaccctgtgctgctccccaagaaaaccgctgtcgctgctgccaaggaaggcaaagagaagaagtcacccaagaaggccgccgccgccaagtcgcccaaaaaggtggccgcctcgtaggtttaaagtttaggcaaacaatgtggtgcatgttttgcaaaatgcctgagttgggttgttcgctgctgctggattaaagccgttcggactactgctgtctgtagaaaaaacagaagccggtggattaaagccgcaacgaacatgcttgtcatttctgttagttgatcactagtactatatagtccatttgggatgattacacaacattatgtggtgttaatgccaactgggtatgggtttggctgtattggtgtcgacatttctcttcgatgaacaatggcagtacaattggcctgctgttcaataaagcccatctccttttctactcctcggttgtagataatggaaatatggtagccggatatcattcatctatatatcttctgtttaaatttgttattagagtaattcatcaaacttggagaagg

SEQ ID NO: 63166 - DNA, 1304 bp, Zea Mays
ctctatgctattaagataaagaatcacactgcataggcgcaagcactataaataccccagcagacttcaccggaactcatcccaactactactactactcactagcggtagctcacaatggcaggcacaaagctagtatcactggggctcattgttctcatgagcatggggttagcaaatgctgtgagggtggctagattctctactgctgatgggagtggacaaggagggggagggggtggcggttacgtgaatggtgcgggatcaggggtcgggtctggcaccggagtaggtgacagtagtccggagggtgtccatgcaagtgctggagggggtggcgcaggcggtggaactagccagtatggtggatctgcatatggtgtagggttagggtcaggttcggcgagtagcacgtacagtggtagtgatggagggtcttccagtgctggtggtgctggcgggggcggtggcggcggaaaagctggaggttcttgggactccagcgctcaagggtctggtagtggcgtcggttctggttctgcctattctaacaggtatccgtacgggccaagatatgcaggtgcaactgctaatggcaacggtggcggcacggggaacagccagaatggcggtgctggcggcggtaaaggttctggatctgggttcggcgatgccattccctgatttctgtatcgagtgaatctaaagctggagcccatcgccctttcttgttttggagtcacaggattactgtttttgttttgttttttttcttttctagctgtgttgtgcttttgttagaatttgaattaataaagggcccggctgttcaagtaacagtagcagtctagtgtaagcctgtaaaggtgcagcttatgcgaagatgtaagcctgccagtttatgaaagaaatcatactcctttgtcatttggtcactatatatatctgaagattttttttagacagaaagttgtttggagttattaagttcatcagatgcatactgccctacaccatgcacatcacatggatgtgatctatcagtgaaattactaaattagcttatgtcacatataatacaggtcacttacattggtagctctaacttggccaatccagccttgaacatgagtagcaagaagttcgtgatgagtgatgacatcaaaaaggaaatggaagtagataagaagcatgtcatacttggtgtggaactcacagaggttgcattcgccttttacaaattgggcaaccgtctcacactcttccttcaagtaggatgctccacagacaaatgtaaattataa

SEQ ID NO: 63167 - DNA, 1247 bp, Zea Mays
gtcgattctagcttccttatgatctatgttagatttgatgattgcaataagatatcatgaggcgcgccgaggagaacagggacctcctctccgcctcctccttcgacaggcagctgctgcggaaggaggtggtgaggagggtcaaggccgcggtggcgggacgtgagtgaagtgagctttgtcgagcctatatgtggaggtcggtcgtgaagctgggactaggacaagggcgagctgaaggctagaagctgtaaatgcacccttcaagagtcttcataggccaagtctctacgtaggtgttgacaaaaaggaaaattcatgacaatgcgtttatatgagattgtccaatatcgaaaccaagaatacatgggggacaactgtattcgatttttgtttctctttcgtggagtattactgaaatatatgcttccaatgttgaagtttccaaattaaatgttatctctgtacaaagtgtgcaggctcggttataggaattttataaagcaaatgacaaatatacatgtacgaacttcaaatatttcctgtagaaggaaacagtgggcgatgaaagcaaggaatttgggaggtacatgcgacagagagaagagcaagagaagcaggaagcggagttgttcactcgggctcttgtaaccaaacatgataagcagatcgagaagcgcataaggagacaacttcatgggctaggaggcttaactgacggttttggccttgggatgaacatgctgttgggaggagacaaggaagatgatggcggttcaagaaagtcgcatggcaaaagcggaaactgaaagaagcacgtgaagaacagcaagaagaggatgaggcattagccctagacccacactgttgtagcacttcaatatactgatagagcctagaagatggttcaagcaagccacacgaaaagttgaagccggagaaaataccaagaaaccaagtagagaaaaaaagttttggttcctataggcgtattatttctgaaacacaaaacttgatctgagcgactgatcgtgagctaatgtaacagtatgaattatatggcttgaacatggtaggtgtaaaatgttttgttcatcggtagagtattccagatgtgatcggcttaacagtatgaattatatagaactatgtgagccaatgtaacagtatgaattatataagttatcaagatattatatgccctcgttgcaacgcacgggcactgacttattatgataatatttgtt

SEQ ID NO: 63168 - DNA, 1931 bp, Zea Mays
attatgctggctcatttgttggatgttttgacaagtcgattctagcttccttatgatctatgttagatttggtaatgcataccagttagtaaagcatttatgatgtacattgttatacatagagctttacatcgcaaaaattatcagtttccctcagttacgatatgcatttagtatttatcgtattttgaaaattaataacctattatactatgataggcttgacttcatgtttatctaaataacttagtgcgatgatgcttgaaaacgtatcttccattttgccagatcaatgaataaaaggattattcatatcaatgtccatgcaccttctcagaaaatccttttgtgatgttggtgttggtttcctggacctgtactagtacatatgctaagtcatccacaaatctgacccagaattgtaccgttctttttatagccatgtttggtacttgtttgagtgctccatagttcgcaagtttgttttgttatgatgtattttgacatttgaatctcatacatgcttaggaactactgatttgaatttatgggctaacagttccagcatttcaaatagaaagtatgctatatcaaataagttgatgatacttttggtactggagaatgaagctagactgcatttgatattagaagtctgtttgtctgattgtagttgattataaagaagctagagctgatattagaagtctgatattagaagtatgtttgtctgattgcagttgattataaagaagctagagcttccagtcaagtttgatattagaagtcttcttttgcttttacattttgtttttttatgatcttgatcttagaagcagggttttggtaccagcttaactaattttctgaagttttatgttcttactttaattataactagatgattgcaataagatatcatgaggcgcgccgaggagaacagggacctcctctccgcctcctccttcgacaggcagctgctgcggaaggaggtggtgaggagggtcaaggccgcggtggcgggacgtgagtgaagtgagctttgtcgagcctatatgtggaggtcggtcgtgaagctgggactaggacaagggcgagctgaaggctagaagctgtaaatgcacccttcaagagtcttcataggccaagtctctactgtgcaggctcggttataggaattttataaagcaaatgacaaatatacatgtacgaacttcaaatatttcctgtagaaggaaacagtgggcgatgaaagcaaggaatttgggaggtacatgcgacagagagaagagcaagagaagcaggaagcggagttgttcactcgggctcttgtaaccaaacatgataagcagatcgagaagcgcataaggagacaacttcatgggctaggaggcttaactgacggttttggccttgggatgaacatgctgttgggaggagacaaggaagatgatggcggttcaagaaagtcgcatggcaaaagcggaaactgaaagaagcacgtgaagaacagcaagaagaggatgaggcattagccctagacccacactgttgtagcacttcaatatactgatagagcctagaagatggttcaagcaagccacacgaaaagttgaagccggagaaaataccaagaaaccaagtagagaaaaaaagttttggttcctataggcgtattatttctgaaacacaaaacttgatctgagcgactgatcgtgagctaatgtaacagtatgaattatatggcttgaacatggtaggtgtaaaatgttttgttcatcggtagagtattccagatgtgatcggcttaacagtatgaattatatagaactatgtgagccaatgtaacagtatgaattatataagttatcaagatattatatgccctcgttgcaacgcacgggcactgacttattatgataatatttgtt

SEQ ID NO: 63169 - DNA, 1878 bp, Zea Mays
caattatgctggctcatttgttggatgttttgacaagtcgattctagcttccttatgatctatgttagatttgatcaatgaataaaaggattattcatatcaatgtccatgcaccttctcagaaaatccttttgtgatgttggtgttggtttcctggacctgtactagtacatatgctaagtcatccacaaatctgacccagaattgtaccgttctttttatagccatgtttggtacttgtttgagtgctccatagttcgcaagtttgttttgttatgatgtattttgacatttgaatctcatacatgcttaggaactactgatttgaatttatgggctaacagttccagcatttcaaatagaaagtatgctatatcaaataagttgatgatacttttggtactggagaatgaagctagactgcatttgatattagaagtctgtttgtctgattgtagttgattataaagaagctagagctgatattagaagtctgatattagaagtatgtttgtctgattgcagttgattataaagaagctagagcttccagtcaagtttgatattagaagtcttcttttgcttttacattttgtttttttatgatcttgatcttagaagcagggttttggtaccagcttaactaattttctgaagttttatgttcttactttaattataactagatgattgcaataagatatcatgaggcgcgccgaggagaacagggacctcctctccgcctcctccttcgacaggcagctgctgcggaaggaggtggtgaggagggtcaaggccgcggtggcgggacgtgagtgaagtgagctttgtcgagcctatatgtggaggtcggtcgtgaagctgggactaggacaagggcgagctgaaggctagaagctgtaaatgcacccttcaagagtcttcataggccaagtctctactgtgcaggctcggttataggaattttataaagcaaatgacaaatatacatgtacgaacttcaaatatttcctggtactaacctctctgctctgagatgacatgttcttttgttgttatgaaatcaaatatttcttcatgatctcttataatctgtcaaatgatgtttgcccagtggcaatagaaaacccttatattaaagagataatcgatgatgatgcgaacagacctaaagattagaaggaaacagtgggcgatgaaagcaaggaatttgggaggtacatgcgacagagagaagagcaagagaagcaggaagcggagttgttcactcgggctcttgtaaccaaacatgataagcagatcgagaagcgcataaggagacaacttcatgggctaggaggcttaactgacggttttggccttgggatgaacatgctgttgggaggagacaaggaagatgatggcggttcaagaaagtcgcatggcaaaagcggaaactgaaagaagcacgtgaagaacagcaagaagaggatgaggcattagccctagacccacactgttgtagcacttcaatatactgatagagcctagaagatggttcaagcaagccacacgaaaagttgaagccggagaaaataccaagaaaccaagtagagaaaaaaagttttggttcctataggcgtattatttctgaaacacaaaacttgatctgagcgactgatcgtgagctaatgtaacagtatgaattatatggcttgaacatggtaggtgtaaaatgttttgttcatcggtagagtattccagatgtgatcggcttaacagtatgaattatatagaactatgtgagccaatgtaacagtatgaattatataagttatcaagatattatatgccctcgttgcaacgcacgggcactgacttattatgataatatttgtt

SEQ ID NO: 63170 - DNA, 3732 bp, Zea Mays
gtacgaggcccatctcccacgacaaatgaaaaccctaatctccagcaccccggcggcctccagcgctcccgctccttgctcgcctccacccgcggcaaccaccgccctgcggcccccgccgcttgccagcctccaccgcgccgcgagtcgcgttgttcctgcaccagctggtcctggagcacgggaggacgagcatgtcctggttcggccccaaccccaaggtgaccatcgtcgacccggacctggccaaggacgtgctgtccaacaagttcggccacttcgagaagctcaaggtcccggtgctgtccaagatgctgggctccggcgtggccagccacgagggcgagaagtgggtcaagcaccggaggatcctcaaccctgcgttccatcttgagaagctcaagcgcatgctgccggcgttttctacgtgctgcgaggagctggtgagcaggtgggcggcggagtcccttggctccgacggctcatgcgagctggacgtctggccggagctgcagaacctgacgggagacgtcatttctcgcaccgcgttcagcagcagctacagcgaagggagaaggatcttccagctacaggccgagcaagcttcgcttgtcatgaccaacattcggaagatcatgatccccgactacatgaagatgcgcaggaacaacagggaggtggagtcaatcctgcgagagataatcgggaagaggatccaggcgatggaacgaggcgagggcaccaaagacgacctggtgggtctactgttggagacaaacatgagagacgacatggggatgacgatcgaagacgtgatcgaggagtgcaaggtgttctacttcgccgggatggagaccatgtcggtgctgctacgtggacgatggtggtgctcagcatgcacccggagtggcaggaccgcgcgagggaggaggtgacggctctgttcggcagggacggcaagcccgagtacgacggtctaagccgcctcaaagtcgtgaccatggtgctctacgaggtgctccggctgtacccgtcggccacctccgtcgtccggcaaacgtacaaggagatggaggtcggaggcgtcacctaccccgccggcgtgatcctggagctgcccgtgctgctcatccaccacgacccggacatctggggaggcgcgcgagttcaggcctgacaggttctccgagggcgtgtctagggcctccaaggaccccggcgcgttcctcccgttcggctagggcccgcgcatctgcatcggccagaacttcgcgctgttggaggccaagatggcgctctgcatgatcctccagtggttcgagttcgggctcgcgccatcctacgctcatgcgccgcataccgtgataaccttgcatcctatgcacggtgcgcagcttaagctcagagcaatatgatctcgacacgatgggtgtcccatcgttgatgccattgttacgtataaccttacaattcagataggcattcggcccctgttaatgtctgaaataagtatcttcgcgttggcattttgtaatgtgcttttcacgtaccattggtgctttattgccttttgtatataaacatgtggatatatgtaactcatacattacacaaacaaacacaaacacaccagagccagagctatagggtggagctataaaccgtggctctacttttgtacacaaaactggctccacatgttcttccaatcctgcaactgcgtttttcgcatccccgtttgattgcaagaacgggactgctaagcaagctaagatttcaatggcctattccttcatacataggccattgaaccggaagattttgtcggtattcggtaactataggatcatgtggttgttggtcaagttggaccaattatgctggctcatttgttggatgttttgacaagtcgattctagcttccttatgatctatgttagatttggtaatgcataccagttagtaaagcatttatgatgtacattgttatacatagagctttacatcgcaaaaattatcagtttccctcagttacgatatgcatttagtatttatcgtattttgaaaattaataacctattatactatgataggcttgacttcatgtttatctaaataacttagtgcgatgatgcttgaaaacgtatcttccattttgccagatcaatgaataaaaggattattcatatcaatgtccatgcaccttctcagaaaatccttttgtgatgttggtgttggtttcctggacctgtactagtacatatgctaagtcatccacaaatctgacccagaattgtaccgttctttttatagccatgtttggtacttgtttgagtgctccatagttcgcaagtttgttttgttatgatgtattttgacatttgaatctcatacatgcttaggaactactgatttgaatttatgggctaacagttccagcatttcaaatagaaagtatgctatatcaaataagttgatgatacttttggtactggagaatgaagctagactgcatttgatattagaagtctgtttgtctgattgtagttgattataaagaagctagagctgatattagaagtctgatattagaagtatgtttgtctgattgcagttgattataaagaagctagagcttccagtcaagtttgatattagaagtcttcttttgcttttacattttgtttttttatgatcttgatcttagaagcagggttttggtaccagcttaactaattttctgaagttttatgttcttactttaattataactagatgattgcaataagatatcatgaggcgcgccgaggagaacagggacctcctctccgcctcctccttcgacaggcagctgctgcggaaggaggtggtgaggagggtcaaggccgcggtggcgggacgtgagtgaagtgagctttgtcgagcctatatgtggaggtcggtcgtgaagctgggactaggacaagggcgagctgaaggctagaagctgtaaatgcacccttcaagagtcttcataggccaagtctctactagaaggaaacagtgggcgatgaaagcaaggaatttgggaggtacatgcgacagagagaagagcaagagaagcaggaagcggagttgttcactcgggctcttgtaaccaaacatgataagcagatcgagaagcgcataaggagacaacttcatgggctaggaggcttaactgacggttttggccttgggatgaacatgctgttgggaggagacaaggaagatgatggcggttcaagaaagtcgcatggcaaaagcggaaactgaaagaagcacgtgaagaacagcaagaagaggatgaggcattagccctagacccacactgttgtagcacttcaatatactgatagagcctagaagatggttcaagcaagccacacgaaaagttgaagccggagaaaataccaagaaaccaagtagagaaaaaaagttttggttcctataggcgtattatttctgaaacacaaaacttgatctgagcgactgatcgtgagctaatgtaacagtatgaattatatggcttgaacatggtaggtgtaaaatgttttgttcatcggtagagtattccagatgtgatcggcttaacagtatgaattatatagaactatgtgagccaatgtaacagtatgaattatataagttatcaagatattatatgccctcgttgcaacgcacgggcactgacttattatgataatatttgtt

SEQ ID NO: 63171 - DNA, 3756 bp, Zea Mays
gtacgaggcccatctcccacgacaaatgaaaaccctaatctccagcaccccggcggcctccagcgctcccgctccttgctcgcctccacccgcggcaaccaccgccctgcggcccccgccgcttgccagcctccaccgcgccgcgagtcgcgttgttcctgcaccagctggtcctggagcacgggaggacgagcatgtcctggttcggccccaaccccaaggtgaccatcgtcgacccggacctggccaaggacgtgctgtccaacaagttcggccacttcgagaagctcaaggtcccggtgctgtccaagatgctgggctccggcgtggccagccacgagggcgagaagtgggtcaagcaccggaggatcctcaaccctgcgttccatcttgagaagctcaagcgcatgctgccggcgttttctacgtgctgcgaggagctggtgagcaggtgggcggcggagtcccttggctccgacggctcatgcgagctggacgtctggccggagctgcagaacctgacgggagacgtcatttctcgcaccgcgttcagcagcagctacagcgaagggagaaggatcttccagctacaggccgagcaagcttcgcttgtcatgaccaacattcggaagatcatgatccccgactacatgtacttgcctaccgtgaacaacaggaagatgcgcaggaacaacagggaggtggagtcaatcctgcgagagataatcgggaagaggatccaggcgatggaacgaggcgagggcaccaaagacgacctggtgggtctactgttggagacaaacatgagagacgacatggggatgacgatcgaagacgtgatcgaggagtgcaaggtgttctacttcgccgggatggagaccatgtcggtgctgctacgtggacgatggtggtgctcagcatgcacccggagtggcaggaccgcgcgagggaggaggtgacggctctgttcggcagggacggcaagcccgagtacgacggtctaagccgcctcaaagtcgtgaccatggtgctctacgaggtgctccggctgtacccgtcggccacctccgtcgtccggcaaacgtacaaggagatggaggtcggaggcgtcacctaccccgccggcgtgatcctggagctgcccgtgctgctcatccaccacgacccggacatctggggaggcgcgcgagttcaggcctgacaggttctccgagggcgtgtctagggcctccaaggaccccggcgcgttcctcccgttcggctagggcccgcgcatctgcatcggccagaacttcgcgctgttggaggccaagatggcgctctgcatgatcctccagtggttcgagttcgggctcgcgccatcctacgctcatgcgccgcataccgtgataaccttgcatcctatgcacggtgcgcagcttaagctcagagcaatatgatctcgacacgatgggtgtcccatcgttgatgccattgttacgtataaccttacaattcagataggcattcggcccctgttaatgtctgaaataagtatcttcgcgttggcattttgtaatgtgcttttcacgtaccattggtgctttattgccttttgtatataaacatgtggatatatgtaactcatacattacacaaacaaacacaaacacaccagagccagagctatagggtggagctataaaccgtggctctacttttgtacacaaaactggctccacatgttcttccaatcctgcaactgcgtttttcgcatccccgtttgattgcaagaacgggactgctaagcaagctaagatttcaatggcctattccttcatacataggccattgaaccggaagattttgtcggtattcggtaactataggatcatgtggttgttggtcaagttggaccaattatgctggctcatttgttggatgttttgacaagtcgattctagcttccttatgatctatgttagatttggtaatgcataccagttagtaaagcatttatgatgtacattgttatacatagagctttacatcgcaaaaattatcagtttccctcagttacgatatgcatttagtatttatcgtattttgaaaattaataacctattatactatgataggcttgacttcatgtttatctaaataacttagtgcgatgatgcttgaaaacgtatcttccattttgccagatcaatgaataaaaggattattcatatcaatgtccatgcaccttctcagaaaatccttttgtgatgttggtgttggtttcctggacctgtactagtacatatgctaagtcatccacaaatctgacccagaattgtaccgttctttttatagccatgtttggtacttgtttgagtgctccatagttcgcaagtttgttttgttatgatgtattttgacatttgaatctcatacatgcttaggaactactgatttgaatttatgggctaacagttccagcatttcaaatagaaagtatgctatatcaaataagttgatgatacttttggtactggagaatgaagctagactgcatttgatattagaagtctgtttgtctgattgtagttgattataaagaagctagagctgatattagaagtctgatattagaagtatgtttgtctgattgcagttgattataaagaagctagagcttccagtcaagtttgatattagaagtcttcttttgcttttacattttgtttttttatgatcttgatcttagaagcagggttttggtaccagcttaactaattttctgaagttttatgttcttactttaattataactagatgattgcaataagatatcatgaggcgcgccgaggagaacagggacctcctctccgcctcctccttcgacaggcagctgctgcggaaggaggtggtgaggagggtcaaggccgcggtggcgggacgtgagtgaagtgagctttgtcgagcctatatgtggaggtcggtcgtgaagctgggactaggacaagggcgagctgaaggctagaagctgtaaatgcacccttcaagagtcttcataggccaagtctctactagaaggaaacagtgggcgatgaaagcaaggaatttgggaggtacatgcgacagagagaagagcaagagaagcaggaagcggagttgttcactcgggctcttgtaaccaaacatgataagcagatcgagaagcgcataaggagacaacttcatgggctaggaggcttaactgacggttttggccttgggatgaacatgctgttgggaggagacaaggaagatgatggcggttcaagaaagtcgcatggcaaaagcggaaactgaaagaagcacgtgaagaacagcaagaagaggatgaggcattagccctagacccacactgttgtagcacttcaatatactgatagagcctagaagatggttcaagcaagccacacgaaaagttgaagccggagaaaataccaagaaaccaagtagagaaaaaaagttttggttcctataggcgtattatttctgaaacacaaaacttgatctgagcgactgatcgtgagctaatgtaacagtatgaattatatggcttgaacatggtaggtgtaaaatgttttgttcatcggtagagtattccagatgtgatcggcttaacagtatgaattatatagaactatgtgagccaatgtaacagtatgaattatataagttatcaagatattatatgccctcgttgcaacgcacgggcactgacttattatgataatatttgtt

SEQ ID NO: 63172 - DNA, 3414 bp, Zea Mays
gtacgaggcccatctcccacgacaaatgaaaaccctaatctccagcaccccggcggcctccagcgctcccgctccttgctcgcctccacccgcggcaaccaccgccctgcggcccccgccgcttgccagcctccaccgcgccgcgagtcgcgttgttcctgcaccagctggtcctggagcacgggaggacgagcatgtcctggttcggccccaaccccaaggtgaccatcgtcgacccggacctggccaaggacgtgctgtccaacaagttcggccacttcgagaagctcaaggtcccggtgctgtccaagatgctgggctccggcgtggccagccacgagggcgagaagtgggtcaagcaccggaggatcctcaaccctgcgttccatcttgagaagctcaagcgcatgctgccggcgttttctacgtgctgcgaggagctggtgagcaggtgggcggcggagtcccttggctccgacggctcatgcgagctggacgtctggccggagctgcagaacctgacgggagacgtcatttctcgcaccgcgttcagcagcagctacagcgaagggagaaggatcttccagctacaggccgagcaagcttcgcttgtcatgaccaacattcggaagatcatgatccccgactacatgaagatgcgcaggaacaacagggaggtggagtcaatcctgcgagagataatcgggaagaggatccaggcgatggaacgaggcgagggcaccaaagacgacctggtgggtctactgttggagacaaacatgagagacgacatggggatgacgatcgaagacgtgatcgaggagtgcaaggtgttctacttcgccgggatggagaccatgtcggtgctgctacgtggacgatggtggtgctcagcatgcacccggagtggcaggaccgcgcgagggaggaggtgacggctctgttcggcagggacggcaagcccgagtacgacggtctaagccgcctcaaagtcgtgaccatggtgctctacgaggtgctccggctgtacccgtcggccacctccgtcgtccggcaaacgtacaaggagatggaggtcggaggcgtcacctaccccgccggcgtgatcctggagctgcccgtgctgctcatccaccacgacccggacatctggggaggcgcgcgagttcaggcctgacaggttctccgagggcgtgtctagggcctccaaggaccccggcgcgttcctcccgttcggctagggcccgcgcatctgcatcggccagaacttcgcgctgttggaggccaagatggcgctctgcatgatcctccagtggttcgagttcgggctcgcgccatcctacgctcatgcgccgcataccgtgataaccttgcatcctatgcacggtgcgcagcttaagctcagagcaatatgatctcgacacgatgggtgtcccatcgttgatgccattgttacgtataaccttacaattcagataggcattcggcccctgttaatgtctgaaataagtatcttcgcgttggcattttgtaatgtgcttttcacgtaccattggtgctttattgccttttgtatataaacatgtggatatatgtaactcatacattacacaaacaaacacaaacacaccagagccagagctatagggtggagctataaaccgtggctctacttttgtacacaaaactggctccacatgttcttccaatcctgcaactgcgtttttcgcatccccgtttggtacagcttctctggctcttcctgtgttcttgatccctttgttccctttgatttcatctccgctcactttctttctgttcgattttgacgcctgcagattgcaagaacgggactgctaagcaagctaagatttcaatggcatattccttcatacataggccattgaaccggaagattttgtcggtattcggtaactataggatcatgtggttgttggtcaagttggaccaattatgctggctcatttgttggatgttttgacaagtcgattctagcttccttatgatctatgttagatttgatgattgcaataagatatcatgaggcgcgccgaggagaacagggacctcctctccgcctcctccttcgacaggcagctgctgcggaaggaggtggtgaggagggtcaaggccgcggtggcgggacgtgagtgaagtgagctttgtcgagcctatatgtggaggtcggtcgtgaagctgggactaggacaagggcgagctgaaggctagaagctgtaaatgcacccttcaagagtcttcataggccaagtctctacgtaggtgttgacaaaaaggaaaattcatgacaatgcgtttatatgagattgtccaatatcgaaaccaagaatacatgggggacaactgtattcgatttttgtttctctttcgtggagtattactgaaatatatgcttccaatgttgaagtttccaaattaaatgttatctctgtacaaagtgtgcaggctcggttataggaattttataaagcaaatgacaaatatacatgtacgaacttcaaatatttcctggtactaacctctctgctctgagatgacatgttcttttgttgttatgaaatcaaatatttcttcatgatctcttataatctgtcaaatgatgtttgcccagtggcaatagaaaacccttatattaaagagataatcgatgatgatgcgaacagacctaaagattagaaggaaacagtgggcgatgaaagcaaggaatttgggaggtacatgcgacagagagaagagcaagagaagcaggaagcggagttgttcactcgggctcttgtaaccaaacatgataagcagatcgagaagcgcataaggagacaacttcatgggctaggaggcttaactgacggttttggccttgggatgaacatgctgttgggaggagacaaggaagatgatggcggttcaagaaagtcgcatggcaaaagcggaaactgaaagaagcacgtgaagaacagcaagaagaggatgaggcattagccctagacccacactgttgtagcacttcaatatactgatagagcctagaagatggttcaagcaagccacacgaaaagttgaagccggagaaaataccaagaaaccaagtagagaaaaaaagttttggttcctataggcgtattatttctgaaacacaaaacttgatctgagcgactgatcgtgagctaatgtaacagtatgaattatatggcttgaacatggtaggtgtaaaatgttttgttcatcggtagagtattccagatgtgatcggcttaacagtatgaattatatagaactatgtgagccaatgtaacagtatgaattatataagttatcaagatattatatgccctcgttgcaacgcacgggcactgacttattatgataatatttgtt

SEQ ID NO: 63173 - DNA, 1115 bp, Zea Mays
gacaaagacacatgcgccatatgaggcccatctgccaatttgtacgaggcccatctcccacgacaaatgaaaaccctaatctccagcaccccggcggcctccagcgctcccgctccttgctcgcctccacccgcggcaaccaccgccctgcggcccccgccgcttgccagcctccaccgcgccgcgagtcgcgttgttcctgcaccagctggtcctggagcacgggaggacgagcatgtcctggttcggccccaaccccaaggtgaccatcgtcgacccggacctggccaaggacgtgctgtccaacaagttcggccacttcgagaagctcaaggtcccggtgctgtccaagatgctgggctccggcgtggccagccacgagggcgagaagtgggtcaagcaccggaggatcctcaaccctgcgttccatcttgagaagctcaaggtactactaactactacatataattaattgcatataattaattgatccttggaattatctggcaatgtgcagcgcatgctgccggcgttttctacgtgctgcgaggagctggtgagcaggtgggcggcggagtcccttggctccgacggctcatgcgagctggacgtctggccggagctgcagaacctgacgggagacgtcatttctcgcaccgcgttcagcagcagctacagcgaagggagaaggatcttccagctacaggccgagcaagcttcgcttgtcatgaccaacattcggaagatcatgatccccgactacatgaagatgcgcaggaacaacagggaggtggagtcaatcctgcgagagataatcgggaagaggatccaggcgatggaacgaggcgagggcaccaaagacgacctggtgggtctactgttggagacaaacatgagagacgacatggggatgacgatcgaagacgtgatcgaggagtgcaaggtgttctacttcgccgggatggagaccatgtcggtgctgctacgtggacgatggtggtgctcagcatgcacccggagtggcaggaccgcgcgagggaggaggtgacggctctgttcggcagggacggcaagcccgagtacgacggtctaagccgcctcaaagtcattgcaag

SEQ ID NO: 63174 - DNA, 2385 bp, Zea Mays
gtacgaggcccatctcccacgacaaatgaaaaccctaatctccagcaccccggcggcctccagcgctcccgctccttgctcgcctccacccgcggcaaccaccgccctgcggcccccgccgcttgccagcctccaccgcgccgcgagtcgcgttgttcctgcaccagctggtcctggagcacgggaggacgagcatgtcctggttcggccccaaccccaaggtgaccatcgtcgacccggacctggccaaggacgtgctgtccaacaagttcggccacttcgagaagctcaaggtcccggtgctgtccaagatgctgggctccggcgtggccagccacgagggcgagaagtgggtcaagcaccggaggatcctcaaccctgcgttccatcttgagaagctcaagctggtgagcaggtgggcggcggagtcccttggctccgacggctcatgcgagctggacgtctggccggagctgcagaacctgacgggagacgtcatttctcgcaccgcgttcagcagcagctacagcgaagggagaaggatcttccagctacaggccgagcaagcttcgcttgtcatgaccaacattcggaagatcatgatccccgactacatgtacttgcctaccgtgaacaacaggaagatgcgcaggaacaacagggaggtggagtcaatcctgcgagagataatcgggaagaggatccaggcgatggaacgaggcgagggcaccaaagacgacctggtgggtctactgttggagacaaacatgagagacgacatggggatgacgatcgaagacgtgatcgaggagtgcaaggtgttctacttcgccgggatggagaccatgtcggtgctgctacgtggacgatggtggtgctcagcatgcacccggagtggcaggaccgcgcgagggaggaggtgacggctctgttcggcagggacggcaagcccgagtacgacggtctaagccgcctcaaagtcgtgaccatggtgctctacgaggtgctccggctgtacccgtcggccacctccgtcgtccggcaaacgtacaaggagatggaggtcggaggcgtcacctaccccgccggcgtgatcctggagctgcccgtgctgctcatccaccacgacccggacatctggggaggcgcgcgagttcaggcctgacaggttctccgagggcgtgtctagggcctccaaggaccccggcgcgttcctcccgttcggctagggcccgcgcatctgcatcggccagaacttcgcgctgttggaggccaagatggcgctctgcatgatcctccagtggttcgagttcgggctcgcgccatcctacgctcatgcgccgcataccgtgataaccttgcatcctatgcacggtgcgcagcttaagctcagagcaatatgatctcgacacgatgggtgtcccatcgttgatgccattgttacgtataaccttacaattcagataggcattcggcccctgttaatgtctgaaataagtatcttcgcgttggcattttgtaatgtgcttttcacgtaccattggtgctttattgccttttgtatataaacatgtggatatatgtaactcatacattacacaaacaaacacaaacacaccagagccagagctatagggtggagctataaaccgtggctctacttttgtacacaaaactggctccacatgttcttccaatcctgcaactgcgtttttcgcatccccgtttggtacagcttctctggctcttcctgtgttcttgatccctttgttccctttgatttcatctccgctcactttctttctgttcgattttgacgcctgcagattgcaagaacgggactgctaagcaagctaagatttcaatggcatattccttcatacataggccattgagcgacgaggcactccgcgtcagcactcccgtggtggtcacttgcaatgaccagagacgggaggtctccgttgcccagaacatcgctaacaaggaaattaaccgcactgttgcattcgacaaggtgctaggtccaaagtctcaacagcaggacgtcttcaaccatgctgttgtgccacttgtcagtgaggttttggacggttataattgcacaatatttgcatatggccagactggaactggcaaaacatacacaatggaaggaggagggggcaaagcactagtgcagtttttattatatatattcacatgctacacatgtttctgaattctgatgcagttagtttgctgcttcaactgacgccataactctactccattcctgtagaatgatgacctcccgactgatgtcggtgtcattccaagtgctgttaagcgcatatttgacatcctcgaggcacagagtgcagagtacaacatgaaggtttcttt

SEQ ID NO: 63175 - DNA, 2189 bp, Zea Mays
gtacgaggcccatctcccacgacaaatgaaaaccctaatctccagcaccccggcggcctccagcgctcccgctccttgctcgcctccacccgcggcaaccaccgccctgcggcccccgccgcttgccagcctccaccgcgccgcgagtcgcgttgttcctgcaccagctggtcctggagcacgggaggacgagcatgtcctggttcggccccaaccccaaggtgaccatcgtcgacccggacctggccaaggacgtgctgtccaacaagttcggccacttcgagaagctcaaggtcccggtgctgtccaagatgctgggctccggcgtggccagccacgagggcgagaagtgggtcaagcaccggaggatcctcaaccctgcgttccatcttgagaagctcaagaacctgacgggagacgtcatttctcgcaccgcgttcagcagcagctacagcgaagggagaaggatcttccagctacaggccgagcaagcttcgcttgtcatgaccaacattcggaagatcatgatccccgactacatgaagatgcgcaggaacaacagggaggtggagtcaatcctgcgagagataatcgggaagaggatccaggcgatggaacgaggcgagggcaccaaagacgacctggtgggtctactgttggagacaaacatgagagacgacatggggatgacgatcgaagacgtgatcgaggagtgcaaggtgttctacttcgccgggatggagaccatgtcggtgctgctacgtggacgatggtggtgctcagcatgcacccggagtggcaggaccgcgcgagggaggaggtgacggctctgttcggcagggacggcaagcccgagtacgacggtctaagccgcctcaaagtcgtgaccatggtgctctacgaggtgctccggctgtacccgtcggccacctccgtcgtccggcaaacgtacaaggagatggaggtcggaggcgtcacctaccccgccggcgtgatcctggagctgcccgtgctgctcatccaccacgacccggacatctggggaggcgcgcgagttcaggcctgacaggttctccgagggcgtgtctagggcctccaaggaccccggcgcgttcctcccgttcggctagggcccgcgcatctgcatcggccagaacttcgcgctgttggaggccaagatggcgctctgcatgatcctccagtggttcgagttcgggctcgcgccatcctacgctcatgcgccgcataccgtgataaccttgcatcctatgcacggtgcgcagcttaagctcagagcaatatgatctcgacacgatgggtgtcccatcgttgatgccattgttacgtataaccttacaattcagataggcattcggcccctgttaatgtctgaaataagtatcttcgcgttggcattttgtaatgtgcttttcacgtaccattggtgctttattgccttttgtatataaacatgtggatatatgtaactcatacattacacaaacaaacacaaacacaccagagccagagctatagggtggagctataaaccgtggctctacttttgtacacaaaactggctccacatgttcttccaatcctgcaactgcgtttttcgcatccccgtttgattgcaagaacgggactgctaagcaagctaagatttcaatggcatattccttcatacataggccattgagcgacgaggcactccgcgtcagcactcccgtggtggtcacttgcaatgaccagagacgggaggtctccgttgcccagaacatcgctaacaaggaaattaaccgcactgttgcattcgacaaggtgctaggtccaaagtctcaacagcaggacgtcttcaaccatgctgttgtgccacttgtcagtgaggttttggacggttataattgcacaatatttgcatatggccagactggaactggcaaaacatacacaatggaaggaggagggggcaaagcactagtgcagtttttattatatatattcacatgctacacatgtttctgaattctgatgcagttagtttgctgcttcaactgacgccataactctactccattcctgtagaatgatgacctcccgactgatgtcggtgtcattccaagtgctgttaagcgcatatttgacatcctcgaggcacagagtgcagagtacaacatgaaggtttcttt

SEQ ID NO: 63176 - DNA, 2117 bp, Zea Mays
gtacgaggcccatctcccacgacaaatgaaaaccctaatctccagcaccccggcggcctccagcgctcccgctccttgctcgcctccacccgcggcaaccaccgccctgcggcccccgccgcttgccagcctccaccgcgccgcgagtcgcgttgttcctgcaccagctggtcctggagcacgggaggacgagcatgtcctggttcggccccaaccccaaggtgaccatcgtcgacccggacctggccaaggacgtgctgtccaacaagttcggccacttcgagaagctcaaggtcccggtgctgtccaagatgctgggctccggcgtggccagccacgagggcgagaagtgggtcaagcaccggaggatcctcaaccctgcgttccatcttgagaagctcaagcgcatgctgccggcgttttctacgtgctgcgaggagctggtgagcaggtgggcggcggagtcccttggctccgacggctcatgcgagctggacgtctggccggagctgcagaacctgacgggagacgtcatttctcgcaccgcgttcagcagcagctacagcgaagggagaaggatcttccagctacaggccgagcaagcttcgcttgtcatgaccaacattcggaagatcatgatccccgactacatgtacttgcctaccgtgaacaacaggaagatgcgcaggaacaacagggaggtggagtcaatcctgcgagagataatcgggaagaggatccaggcgatggaacgaggcgagggcaccaaagacgacctggtgggtctactgttggagacaaacatgagagacgacatggggatgacgatcgaagacgtgatcgaggagtgcaaggtgttctacttcgccgggatggagaccatgtcggtgctgctacgtggacgatggtggtgctcagcatgcacccggagtggcaggaccgcgcgagggaggaggtgacggctctgttcggcagggacggcaagcccgagtacgacggtctaagccgcctcaaagtcgtgaccatggtgctctacgaggtgctccggctgtacccgtcggccacctccgtcgtccggcaaacgtacaaggagatggaggtcggaggcgtcacctaccccgccggcgtgatcctggagctgcccgtgctgctcatccaccacgacccggacatctggggaggcgcgcgagttcaggcctgacaggttctccgagggcgtgtctagggcctccaaggaccccggcgcgttcctcccgttcggctagggcccgcgcatctgcatcggccagaacttcgcgctgttggaggccaagatggcgctctgcatgatcctccagtggttcgagttcgggctcgcgccatcctacgctcatgcgccgcataccgtgataaccttgcatcctatgcacggtgcgcagcttaagctcagagcaatatgatctcgacacgatgggtgtcccatcgttgatgccattgttacgtataaccttacaattcagataggcattcggcccctgttaatgtctgaaataagtatcttcgcgttggcattttgtaatgtgcttttcacgtaccattggtgctttattgccttttgtatataaacatgtggatatatgtaactcatacattacacaaacaaacacaaacacaccagagccagagctatagggtggagctataaaccgtggctctacttttgtacacaaaactggctccacatgttcttccaatcctgcaactgcgtttttcgcatccccgtttgattgcaagaacgggactgctaagcaagctaagatttcaatggcatattccttcatacataggccattgagcgacgaggcactccgcgtcagcactcccgtggtggtcacttgcaatgaccagagacgggaggtctccgttgcccagaacatcgctaacaaggaaattaaccgcactgttgcattcgacaaggtgctaggtccaaagtctcaacagcaggacgtcttcaaccatgctgttgtgccacttaatgatgacctcccgactgatgtcggtgtcattccaagtgctgttaagcgcatatttgacatcctcgaggcacagagtgcagagtacaacatgaaggtttcttt

SEQ ID NO: 63177 - DNA, 2036 bp, Zea Mays
gtacgaggcccatctcccacgacaaatgaaaaccctaatctccagcaccccggcggcctccagcgctcccgctccttgctcgcctccacccgcggcaaccaccgccctgcggcccccgccgcttgccagcctccaccgcgccgcgagtcgcgttgttcctgcaccagctggtcctggagcacgggaggacgagcatgtcctggttcggccccaaccccaaggtgaccatcgtcgacccggacctggccaaggacgtgctgtccaacaagttcggccacttcgagaagctcaaggtcccggtgctgtccaagatgctgggctccggcgtggccagccacgagggcgagaagtgggtcaagcaccggaggatcctcaaccctgcgttccatcttgagaagctcaagcgcatgctgccggcgttttctacgtgctgcgaggagctggtgagcaggtgggcggcggagtcccttggctccgacggctcatgcgagctggacgtctggccggagctgcagaacctgacgggagacgtcatttctcgcaccgcgttcagcagcagctacagcgaagggagaaggatcttccagctacaggccgagcaagcttcgcttgtcatgaccaacattcggaagatcatgatccccgactacatgaagatgcgcaggaacaacagggaggtggagtcaatcctgcgagagataatcgggaagaggatccaggcgatggaacgaggcgagggcaccaaagacgacctggtgggtctactgttggagacaaacatgagagacgacatggggatgacgatcgaagacgtgatcgaggagtgcaaggtgttctacttcgccgggatggagaccatgtcggtgctgctacgtggacgatggtggtgctcagcatgcacccggagtggcaggaccgcgcgagggaggaggtgacggctctgttcggcagggacggcaagcccgagtacgacggtctaagccgcctcaaagtcgtgaccatggtgctctacgaggtgctccggctgtacccgtcggccacctccgtcgtccggcaaacgtacaaggagatggaggtcggaggcgtcacctaccccgccggcgtgatcctggagctgcccgtgctgctcatccaccacgacccggacatctggggaggcgcgcgagttcaggcctgacaggttctccgagggcgtgtctagggcctccaaggaccccggcgcgttcctcccgttcggctagggcccgcgcatctgcatcggccagaacttcgcgctgttggaggccaagatggcgctctgcatgatcctccagtggttcgagttcgggctcgcgccatcctacgctcatgcgccgcataccgtgataaccttgcatcctatgcacggtgcgcagcttaagctcagagcaatatgatctcgacacgatgggtgtcccatcgttgatgccattgttacgtataaccttacaattcagataggcattcggcccctgttaatgtctgaaataagtatcttcgcgttggcattttgtaatgtgcttttcacgtaccattggtgctttattgccttttgtatataaacatgtggatatatgtaactcatacattacacaaacaaacacaaacacaccagagccagagctatagggtggagctataaaccgtggctctacttttgtacacaaaactggctccacatgttcttccaatcctgcaactgcgtttttcgcatccccgtttgattgcaagaacgggactgctaagcaagctaagatttcaatggcatattccttcatacataggccattgagcgacgaggcactccgcgtcagcactcccgtggtggtcacttgcaatgaccagagacgggaggtctccgttgcccagaacatcgctaacaaggaaattaaccgcactgttgcattcgacaagaatgatgacctcccgactgatgtcggtgtcattccaagtgctgttaagcgcatatttgacatcctcgaggcacagagtgcagagtacaacatgaaggtttcttt

SEQ ID NO: 63178 - DNA, 1577 bp, Zea Mays
gtacgaggcccatctcccacgacaaatgaaaaccctaatctccagcaccccggcggcctccagcgctcccgctccttgctcgcctccacccgcggcaaccaccgccctgcggcccccgccgcttgccagcctccaccgcgccgcgagtcgcgttgttcctgcaccagctggtcctggagcacgggaggacgagcatgtcctggttcggccccaaccccaaggtgaccatcgtcgacccggacctggccaaggacgtgctgtccaacaagttcggccacttcgagaagctcaaggtcccggtgctgtccaagatgctgggctccggcgtggccagccacgagggcgagaagtgggtcaagcaccggaggatcctcaaccctgcgttccatcttgagaagctcaagcgcatgctgccggcgttttctacgtgctgcgaggagctggtgagcaggtgggcggcggagtcccttggctccgacggctcatgcgagctggacgtctggccggagctgcagaacctgacgggagacgtcatttctcgcaccgcgttcagcagcagctacagcgaagggagaaggatcttccagctacaggccgagcaagcttcgcttgtcatgaccaacattcggaagatcatgatccccgactacatgtacttgcctaccgtgaacaacaggaagatgcgcaggaacaacagggaggtggagtcaatcctgcgagagataatcgggaagaggatccaggcgatggaacgaggcgagggcaccaaagacgacctggtgggtctactgttggagacaaacatgagagacgacatggggatgacgatcgaagacgtgatcgaggagtgcaaggtgttctacttcgccgggatggagaccatgtcggtgctgctacgtggacgatggtggtgctcagcatgcacccggagtggcaggaccgcgcgagggaggaggtgacggctctgttcggcagggacggcaagcccgagtacgacggtctaagccgcctcaaagtcattgcaagaacgggactgctaagcaagctaagatttcaatggcatattccttcatacataggccattgagcgacgaggcactccgcgtcagcactcccgtggtggtcacttgcaatgaccagagacgggaggtctccgttgcccagaacatcgctaacaaggaaattaaccgcactgttgcattcgacaaggtgctaggtccaaagtctcaacagcaggacgtcttcaaccatgctgttgtgccacttgtcagtgaggttttggacggttataattgcacaatatttgcatatggccagactggaactggcaaaacatacacaatggaaggaggagggggcaaagcactagtgcagtttttattatatatattcacatgctacacatgtttctgaattctgatgcagttagtttgctgcttcaactgacgccataactctactccattcctgtagaatgatgacctcccgactgatgtcggtgtcattccaagtgctgttaagcgcatatttgacatcctcgaggcacagagtgcagagtacaacatgaaggtttcttt

SEQ ID NO: 63179 - DNA, 2060 bp, Zea Mays
gtacgaggcccatctcccacgacaaatgaaaaccctaatctccagcaccccggcggcctccagcgctcccgctccttgctcgcctccacccgcggcaaccaccgccctgcggcccccgccgcttgccagcctccaccgcgccgcgagtcgcgttgttcctgcaccagctggtcctggagcacgggaggacgagcatgtcctggttcggccccaaccccaaggtgaccatcgtcgacccggacctggccaaggacgtgctgtccaacaagttcggccacttcgagaagctcaaggtcccggtgctgtccaagatgctgggctccggcgtggccagccacgagggcgagaagtgggtcaagcaccggaggatcctcaaccctgcgttccatcttgagaagctcaagcgcatgctgccggcgttttctacgtgctgcgaggagctggtgagcaggtgggcggcggagtcccttggctccgacggctcatgcgagctggacgtctggccggagctgcagaacctgacgggagacgtcatttctcgcaccgcgttcagcagcagctacagcgaagggagaaggatcttccagctacaggccgagcaagcttcgcttgtcatgaccaacattcggaagatcatgatccccgactacatgtacttgcctaccgtgaacaacaggaagatgcgcaggaacaacagggaggtggagtcaatcctgcgagagataatcgggaagaggatccaggcgatggaacgaggcgagggcaccaaagacgacctggtgggtctactgttggagacaaacatgagagacgacatggggatgacgatcgaagacgtgatcgaggagtgcaaggtgttctacttcgccgggatggagaccatgtcggtgctgctacgtggacgatggtggtgctcagcatgcacccggagtggcaggaccgcgcgagggaggaggtgacggctctgttcggcagggacggcaagcccgagtacgacggtctaagccgcctcaaagtcgtgaccatggtgctctacgaggtgctccggctgtacccgtcggccacctccgtcgtccggcaaacgtacaaggagatggaggtcggaggcgtcacctaccccgccggcgtgatcctggagctgcccgtgctgctcatccaccacgacccggacatctggggaggcgcgcgagttcaggcctgacaggttctccgagggcgtgtctagggcctccaaggaccccggcgcgttcctcccgttcggctagggcccgcgcatctgcatcggccagaacttcgcgctgttggaggccaagatggcgctctgcatgatcctccagtggttcgagttcgggctcgcgccatcctacgctcatgcgccgcataccgtgataaccttgcatcctatgcacggtgcgcagcttaagctcagagcaatatgatctcgacacgatgggtgtcccatcgttgatgccattgttacgtataaccttacaattcagataggcattcggcccctgttaatgtctgaaataagtatcttcgcgttggcattttgtaatgtgcttttcacgtaccattggtgctttattgccttttgtatataaacatgtggatatatgtaactcatacattacacaaacaaacacaaacacaccagagccagagctatagggtggagctataaaccgtggctctacttttgtacacaaaactggctccacatgttcttccaatcctgcaactgcgtttttcgcatccccgtttgattgcaagaacgggactgctaagcaagctaagatttcaatggcatattccttcatacataggccattgagcgacgaggcactccgcgtcagcactcccgtggtggtcacttgcaatgaccagagacgggaggtctccgttgcccagaacatcgctaacaaggaaattaaccgcactgttgcattcgacaagaatgatgacctcccgactgatgtcggtgtcattccaagtgctgttaagcgcatatttgacatcctcgaggcacagagtgcagagtacaacatgaaggtttcttt

SEQ ID NO: 63180 - DNA, 810 bp, Zea Mays
ccgtgcatatatactggacacgcgcacgctgtggaaggagctagagaaagagaacaaggagttcttcgagacgtacaacaaggaccgcgaggagcggaaggtggaggcggagacgatggcgcggatcgagaagatgctctccgaggcggcggcctccaagagctccgacgacgaaggctagctagctatagcacgcgatccgttagcttagctagctctctagagctatagatcatgcagctccgacgatcctctccatgcatgggaattgggagctagccttctcgtacgtacatgagaccattctatttaattagctgcctatatttatatcttgctacatacctagctagtacaacataacacgccgccactgcaacaaggaccatgcatgcatgatgtgtatatgtggtacgtctggttattattaggaccagaaaagttatgttttacgatgtagaaagatgcatatgcatgtattcgaccaatattacacataagaatctaccatgcctgtagctagctagggtcatgttaaagcaaaaggtaggcaggcttgtctatcattgactgtaaccttccgtgacacgtggcagctggcgcgcgaatccaccagtgatgtcctgtacctcatcgggggttgctacttggtacttgccgaggtagccggtgcttcttggcttgccgtagaaaatccttaagaccttctcgccaaatttccccatttcccgtgttttttctgtaaaaataaattgtttcatgtgaaatttctatatattcctataaaattcatgcgttctaaaggaggct

SEQ ID NO: 63181 - DNA, 1643 bp, Zea Mays
aaaaaagcaaaagagctccgccctaaacagcgctcctcgcagagagcggaggcgccaccccaaagccgggctttcatcagaaaagaaggagccaaagcctgggcatggagcaatgatacggagggggacacccggacagcgacggtcaggggcacggttggccgccgagacgcgaacaagcagcagatcatgccggccggccggccggggcccccgtaaagcacgagcgcgcggcacgccacgccacgccacagccagtcagccacagccacttcggttcgtcgtccaggacaagaataagcgagagcaatggcgggaaggcgagaggacgtcgacggagaggtgcagcggcgggacgaagaggaagaggaggagtacatcgacatggacctgagctcggcagcgcccggggcgcgggagttcgagttcatgtcggcgccgctggacaggtggggggagcccctggcgtcgccggcggacgagctcttctacaagggcaagctgctgccgctgcacctgccgccgcgcatccagatggtggaggagctcctggtggacggccgcggccgcggggacctcctcttccccctccaccacggcaccaccaccagcagcagcagcaccgccccggcgacgccgtacgagtcgtgcgccgcgtcgccggccgactcgcgctacgtcagcggggagctcagcgtcgaggcgtacttccaggagtacgcggccgcccgcctggcgctggcggacgccgcggagcccggggagaggaggccgacgacgacgtggtccaggaagctcaggttcgtgcggcagctcaacctgggcctccgcctcaaggcgtccaaggcgtacctcaagaccatattcgcggcggccaagccggggcagcagcacacggacgcccgcatggacgatgttggcgcgccgacgggagcgcaggaggagctggcccgtggtcacctcagggcgtggaggaagaacccgttcgcccagatcagaagcaacaggtgcgtcgcctcccagtcccatgccgcgcccgccgcaggaggagggcggtgcaaggaacgcgagcacggccacaggcggtccttctccagcgtcatcgtccggtactcctcgtcgaacaagacgtccccagtccctgcgctgccgccgccgccgtcctcgagcgagtccgactgcgcggggccggcgctcaggaggagcagcagcgccagctccgaggtggagaaccccatccaggggttcatcgcctactgcaagaagtcccagcagcttgcctccgtcaggaagagcgccagcgacgccggcttccgcttcctgtcggccgcggcgtccaagatcgccgccgagtccgacggccttgatgacctcaccgagatttgcagaggatgataggaccatcaatcctgatcattgtacaatgatgcacatgcgttctggaggtttttttttgtttgtttgaaaaaaaacactaaaacttctggtctaaaccaaccctgtgtcatgatgatattgttcaaatgaatgacatctgaagtttgagcattgtctgtttctagtacattagtgacttggtacagacgtacagttcgttactatggaattttccatggacgagtaaaatcaaaagcagagtcttg

SEQ ID NO: 63182 - DNA, 3580 bp, Zea Mays
aaatccaattccgacctcgccatcgacggaggcggcgtcgcggcgcggcgcgggatcgggcggcgcctccagaagcctctcggacggccgagaccaacaggccggaggaggaggcgatcaggacgagcccaatcgctctcagtcccagctacctccccgtttctttgggaccgaattcggttcgtcgtcaacccccattttcctcgagtcgatgaaggaattgctcgaatcgaggcctggattgacgggtgtttgaggctcggtgaccgaggagcgccgcttcagatatgaacgtggtgggaagggttgggtcggtgatctcgcagggggtgtactccgttgcaacacccttccacccatttggcggtgcggttgacattatcgcggttgagcagcctgatggttcgtaccgcaccacaccatggtacgtccgttttgggaagttccagggcgtgctcaagggtgctgagaaggtcgtcaccatcagagtcaatggcgtcgaagccaacttccacatgcagcttgacaattccggccaagcctatttcatgcgtgagcttgtgcccggcggtgaagattctggaacaggttcagacgacgaaactgtcaatgagcctgaacctccagcgcgtagtaagagtgatggggaactttacattggtcctagcgacagactgggtagccaagagctcaatgtggagcatcaagagaagcaaactagggatgagtttgagtcatatgatggttatggtaggttagaggaatcagaagatttgtcaacccaagcggatgggggaaattcggaggtggttctagttagtgtggacggacatgtgctcactgcacctatttcttcaacagaggagggtatggaggatgtgcagttatgcgaccctcagtttcatttgggacctgggcagagctctagtggggagttcacccgaagtggcgaggtctgggatgctgacattttagatggtttatacatatcacaggaaaaggtaaagattaattctggacatcagtcagaggttttaacagagaatggagaggtaccggttgaaaaggatgggtcacatcacatctcagtggacaaagatgaagtacatgtgtcaatcaatgatgatgaagctcatgctgtttctacaaatgaagttgaggttcaggatgtgtcaaggtcagggaatggtgatgtggtttatcaaaccatgaccagtgaaggtgagtcccatagtattttaggggacatagatgttggccatcaaacattgaccagggaggatgactctcctggtgtttcaggggagaatgttgtgggttatcaacccttgaccaatgaacataaagctcatgatatattagagaacaatgatgaggatcaaccacccctgaacaatgaagatgaatcttgtgatgtgccagtgcttgaaaaagacaaggattgcaactccccagctaataaggatgaggtttgtgatctcaacaatgaggatactgaggataccagtgctagttttggtaaaaacgacgctttccagagctgtttggatctgacgtcacaaatagatgacggggattcaggaaacgaactattttcacctggatctgattctcagagggatgctgagcataatttgggtaactgttctgttgctgaaacagatttggaggaaggtgaaagtaaaactgcttactgtggtcagtatggtcctttacaggagggagtgaatgtttcattatttaccttagaagttgataagactcaaaacaaagagagttctcctgctggaggttctcatgatagggacaaggaaattgcctctgaaattgaggctgccgcatctgatggtttacagtcatccatggcgaccagtggtaaagacaaactggggagcattccagagcactcagaagttgaagatgaacagaataaagaagaacattctcagtcacagaatggcttgggtgttgagatttctctttgtgggaacatgttacgaccaggaatgggccgagaatctgctgaggaagtgtttcaacagaatcttgtccatgaggaggatttcaaatcatctggatcaacaatgataaaaaatgcaaaccttattgtcaaagttgacaataattatttcccctggaataaagtttctcatgttattcttgggaaggctgtatatggctcaaagtttcccttagaacccactgatgctgttccggttgaacaacaggaaacacccaaatcaagagaggactctcttagaatgtctccctcaagccggagatggaggctttggctcaatccctttcggataacaagatcccttcaacgtagtaacagtgattcttccgaagacattttccttgactcagagtctgttttgagtccaatggatgatcaaactctggagaacaacaaaaaccagtcacctagaaagcaattcgtacggactttgattcccacaagtgaacaggtagcatctttaaatctgaaggagggccaaaacttggtgacctttagcttctccaccagagttcttgggaagcaacaggtcatgcctttggttggacgtgattggagtcactcaggtgttgctcgccttttttctgcaattaaggaaaacggttatcaactactattccttagtgctagagcaattgtccaggcatatctcacgaagaacttcctctttaatctcaaacaggatgggaaagcactacccaatgggcctgttgtaatttcacctgatggcttgtttccttcactctaccgagaagttatacggagagccccacatgaattcaagattgcttgcctggaggacattaaggcgctctttccttctgattacaatccattttatgctgggtttggtaacagagatactgatgagctcagttacaagaagatgggaatacctaaagggtgaagtggctgtcaacagttctgttgatgtgaagtcttatacgtccctacatacccttgtcaatgacatgtttccaccaacaactctggttgagcaggaagactacaacaactggaattactggaaggtgccattaccagatgttgatttgtagtgtagttttgacagaaacagccgtagataccagtagatcctgcaaaagcctagcagtagagcttcctgtaccctaatattcagccaccacgacggttttaggtccaatttgtgaaggtctcaagaattccgggatgtatggttttctgaaagccaatggcccaaggaaacgttgccactttatttccttcgacggagctttcacgtgatcatacggcttttgggtagtcatctgattgtcttcgtcgaacttgttgtacccagaggtctgagccctagaccctcgattcattagagaactcgtgatctggtcattgtccaagctactttgttctgattgcaggaaatctttaggtgccaaaagcagctgtacattttttttttcgtgatccaaaaacagctgtacatcgtatatcagcgcatagaagagaattgctaagcatatctgcatcttgaaacccttctttcttgtgctctaaaagttggatttgataattgttgag

SEQ ID NO: 63183 - DNA, 3702 bp, Zea Mays
ccaaaatccaattccgacctcgccatcgacggaggcggcgtcgcggcgcggcgcgggatcgggcggcgcctccagaagcctctcggacggccgagaccaacaggccggaggaggaggcgatcaggacgagcccaatcgctctcagtcccagctacctccccgtttctttgggaccgaattcggttcgtcgtcaacccccattttcctcgagtcgatgaaggaattgctcgaatcgaggcctggattgacgggtgtttgaggctcggtgaccgaggagcgccgcttcagatatgaacgtggtgggaagggttgggtcggtgatctcgcagggggtgtactccgttgcaacacccttccacccatttggcggtgcggttgacattatcgcggttgagcagcctgatggttcgtaccgcaccacaccatggtacgtccgttttgggaagttccagggcgtgctcaagggtgctgagaaggtcgtcaccatcagagtcaatggcgtcgaagccaacttccacatgcagcttgacaattccggccaagcctatttcatgcgtgagcttgtgcccggcggtgaagattctggaacaggttcagacgacgaaactgtcaatgagcctgaacctccagcgcgtagtaagagtgatggggaactttacattggtcctagcgacagactgggtagccaagagctcaatgtggagcatcaagagaagcaaactagggatgagtttgagtcatatgatggttatggtaggttagaggaatcagaagatttgtcaacccaagcggatgggggaaattcggaggtggttctagttagtgtggacggacatgtgctcactgcacctatttcttcaacagaggagggtatggaggatgtgcagttatgcgaccctcagtttcatttgggacctgggcagagctctagtggggagttcacccgaagtggcgaggtctgggatgctgacattttagatggtttatacatatcacaggaaaaggtaaagattaattctggacatcagtcagaggttttaacagagaatggagaggtaccggttgaaaaggatgggtcacatcacatctcagtggacaaagatgaagtacatgtgtcaatcaatgatgatgaagctcatgctgtttctacaaatgaagttgaggttcaggatgtgtcaaggtcagggaatggtgatgtggtttatcaaaccatgaccagtgaaggtgagtcccatagtattttaggggacatagatgttggccatcaaacattgaccagggaggatgactctcctggtgtttcaggggagaatgttgtgggttatcaacccttgaccaatgaacataaagctcatgatatattagagaacaatgatgaggatcaaccacccctgaacaatgaagatgaatcttgtgatgtgccagtgcttgaaaaagacaaggattgcaactccccagctaataaggatgaggtttgtgatctcaacaatgaggatactgaggataccagtgctagttttggtaaaaacgacgctttccagagctgtttggatctgacgtcacaaatagatgacggggattcaggaaacgaactattttcacctggatctgattctcagagggatgctgagcataatttgggtaactgttctgttgctgaaacagatttggaggaaggtgaaagtaaaactgcttactgtggtcagtatggtcctttacaggagggagtgaatgtttcattatttaccttagaagttgataagactcaaaacaaagagagttctcctgctggaggttctcatgatagggacaaggaaattgcctctgaaattgaggctgccgcatctgatggtttacagtcatccatggcgaccagtggtaaagacaaactggggagcattccagagcactcagaagttgaagatgaacagaataaagaagaacattctcagtcacagaatggcttgggtgttgagatttctctttgtgggaacatgttacgaccaggaatgggccgagaatctgctgaggaagtgtttcaacagaatcttgtccatgaggaggatttcaaatcatctggatcaacaatgataaaaaatgcaaaccttattgtcaaagttgacaataattatttcccctggaataaagtttctcatgttattcttgggaaggctgtatatggctcaaagtttcccttagaacccactgatgctgttccggttgaacaacaggaaacacccaaatcaagagaggactctcttagaatgtctccctcaagccggagatggaggctttggctcaatccctttcggataacaagatcccttcaacgtagtaacagtgattcttccgaagacattttccttgactcagagtctgttttgagtccaatggatgatcaaactctggagaacaacaaaaaccagtcacctagaaagcaattcgtacggactttgattcccacaagtgaacaggtagcatctttaaatctgaaggagggccaaaacttggtgacctttagcttctccaccagagttcttgggaagcaacaggttgatgcacatatttacttgtggaaatggaatgctaaaattgtgatatctgatgtggatggcaccataacaaggtctgacgtgctgggtcaggtcatgcctttggttggacgtgattggagtcactcaggtgttgctcgccttttttctgcaattaaggaaaacggttatcaactactattccttagtgctagagcaattgtccaggcatatctcacgaagaacttcctctttaatctcaaacaggatgggaaagcactacccaatgggcctgttgtaatttcacctgatggcttgtttccttcactctaccgagaagttatacggagagccccacatgaattcaagattgcttgcctggaggacattaaggcgctctttccttctgattacaatccattttatgctgggtttggtaacagagatactgatgagctcagttacaagaagatgggaatacctaaaggcaagatttttatcatcaacccaaagggtgaagtggctgtcaacagttctgttgatgtgaagtcttatacgtccctacatacccttgtcaatgacatgtttccaccaacaactctggttgagcaggaagactacaacaactggaattactggaaggtgccattaccagatgttgatttgtagtgtagttttgacagaaacagccgtagataccagtagatcctgcaaaagcctagcagtagagcttcctgtaccctaatattcagccaccacgacggttttaggtccaatttgtgaaggtctcaagaattccgggatgtatggttttctgaaagccaatggcccaaggaaacgttgccactttatttccttcgacggagctttcacgtgatcatacggcttttgggtagtcatctgattgtcttcgtcgaacttgttgtacccagaggtctgagccctagaccctcgattcattagagaactcgtgatctggtcattgtccaagctactttgttctgattgcaggaaatctttaggtgccaaaagcagctgtacattttttttttcgtgatccaaaaacagctgtacatcgtatatcagcgcatagaagagaattgctaagcatatctgcatcttgaaacccttctttcttgtgctctaaaagttggatttgataattgttgag

SEQ ID NO: 63184 - DNA, 3645 bp, Zea Mays
ctcacctatatataataaatcgctctccaacggccggcccccgctgtcgtcccaaaatccaattccgacctcgccatcgacggaggcggcgtcgcggcgcggcgcgggatcgggcggcgcctccagaagcctctcggacggccgagaccaacaggccggaggaggaggcgatcaggacgagcccaatcgctctcagtcccagctacctccccgtttctttgggaccgaattcgagtcgatgaaggaattgctcgaatcgaggcctggattgacgggtgtttgaggctcggtgaccgaggagcgccgcttcagatatgaacgtggtgggaagggttgggtcggtgatctcgcagggggtgtactccgttgcaacacccttccacccatttggcggtgcggttgacattatcgcggttgagcagcctgatggttcgtaccgcaccacaccatggtacgtccgttttgggaagttccagggcgtgctcaagggtgctgagaaggtcgtcaccatcagagtcaatggcgtcgaagccaacttccacatgcagcttgacaattccggccaagcctatttcatgcgtgagcttgtgcccggcggtgaagattctggaacaggttcagacgacgaaactgtcaatgagcctgaacctccagcgcgtagtaagagtgatggggaactttacattggtcctagcgacagactgggtagccaagagctcaatgtggagcatcaagagaagcaaactagggatgagtttgagtcatatgatggttatggtaggttagaggaatcagaagatttgtcaacccaagcggatgggggaaattcggaggtggttctagttagtgtggacggacatgtgctcactgcacctatttcttcaacagaggagggtatggaggatgtgcagttatgcgaccctcagtttcatttgggacctgggcagagctctagtggggagttcacccgaagtggcgaggtctgggatgctgacattttagatggtttatacatatcacaggaaaaggtaaagattaattctggacatcagtcagaggttttaacagagaatggagaggtaccggttgaaaaggatgggtcacatcacatctcagtggacaaagatgaagtacatgtgtcaatcaatgatgatgaagctcatgctgtttctacaaatgaagttgaggttcaggatgtgtcaaggtcagggaatggtgatgtggtttatcaaaccatgaccagtgaaggggagaatgttgtgggttatcaacccttgaccaatgaacataaagctcatgatatattagagaacaatgatgaggatcaaccacccctgaacaatgaagatgaatcttgtgatgtgccagtgcttgaaaaagacaaggattgcaactccccagctaataaggatgaggtttgtgatctcaacaatgaggatactgaggataccagtgctagttttggtaaaaacgacgctttccagagctgtttggatctgacgtcacaaatagatgacggggattcaggaaacgaactattttcacctggatctgattctcagagggatgctgagcataatttgggtaactgttctgttgctgaaacagatttggaggaaggtgaaagtaaaactgcttactgtggtcagtatggtcctttacaggagggagtgaatgtttcattatttaccttagaagttgataagactcaaaacaaagagagttctcctgctggaggttctcatgatagggacaaggaaattgcctctgaaattgaggctgccgcatctgatggtttacagtcatccatggcgaccagtggtaaagacaaactggggagcattccagagcactcagaagttgaagatgaacagaataaagaagaacattctcagtcacagaatggcttgggtgttgagatttctctttgtgggaacatgttacgaccaggaatgggccgagaatctgctgaggaagtgtttcaacagaatcttgtccatgaggaggatttcaaatcatctggatcaacaatgataaaaaatgcaaaccttattgtcaaagttgacaataattatttcccctggaataaagtttctcatgttattcttgggaaggctgtatatggctcaaagtttcccttagaacccactgatgctgttccggttgaacaacaggaaacacccaaatcaagagaggactctcttagaatgtctccctcaagccggagatggaggctttggctcaatccctttcggataacaagatcccttcaacgtagtaacagtgattcttccgaagacattttccttgactcagagtctgttttgagtccaatggatgatcaaactctggagaacaacaaaaaccagtcacctagaaagcaattcgtacggactttgattcccacaagtgaacaggtagcatctttaaatctgaaggagggccaaaacttggtgacctttagcttctccaccagagttcttgggaagcaacaggttgatgcacatatttacttgtggaaatggaatgctaaaattgtgatatctgatgtggatggcaccataacaaggtctgacgtgctgggtcaggtcatgcctttggttggacgtgattggagtcactcaggtgttgctcgccttttttctgcaattaaggaaaacggttatcaactactattccttagtgctagagcaattgtccaggcatatctcacgaagaacttcctctttaatctcaaacaggatgggaaagcactacccaatgggcctgttgtaatttcacctgatggcttgtttccttcactctaccgagaagttatacggagagccccacatgaattcaagattgcttgcctggaggacattaaggcgctctttccttctgattacaatccattttatgctgggtttggtaacagagatactgatgagctcagttacaagaagatgggaatacctaaaggcaagatttttatcatcaacccaaagggtgaagtggctgtcaacagttctgttgatgtgaagtcttatacgtccctacatacccttgtcaatgacatgtttccaccaacaactctggttgagcaggaagactacaacaactggaattactggaaggtgccattaccagatgttgatttgtagtgtagttttgacagaaacagccgtagataccagtagatcctgcaaaagcctagcagtagagcttcctgtaccctaatattcagccaccacgacggttttaggtccaatttgtgaaggtctcaagaattccgggatgtatggttttctgaaagccaatggcccaaggaaacgttgccactttatttccttcgacggagctttcacgtgatcatacggcttttgggtagtcatctgattgtcttcgtcgaacttgttgtacccagaggtctgagccctagaccctcgattcattagagaactcgtgatctggtcattgtccaagctactttgttctgattgcaggaaatctttaggtgccaaaagcagctgtacattttttttttcgtgatccaaaaacagctgtacatcgtatatcagcgcatagaagagaattgctaagcatatctgcatcttgaaacccttctttcttgtgctctaaaagttggatttgataattgttgag

SEQ ID NO: 63185 - DNA, 3757 bp, Zea Mays
ctcacctgcgccgcgccgctgcgcgtgcgaatggagggctcacctatatataataaatcgctctccaacggccggcccccgctgtcgtcccaaaatccaattccgacctcgccatcgacggaggcggcgtcgcggcgcggcgcgggatcgggcggcgcctccagaagcctctcggacggccgagaccaacaggccggaggaggaggcgatcaggacgagcccaatcgctctcagtcccagctacctccccgtttctttgggaccgaattcgagtcgatgaaggaattgctcgaatcgaggcctggattgacgggtgtttgaggctcggtgaccgaggagcgccgcttcagatatgaacgtggtgggaagggttgggtcggtgatctcgcagggggtgtactccgttgcaacacccttccacccatttggcggtgcggttgacattatcgcggttgagcagcctgatggttcgtaccgcaccacaccatggtacgtccgttttgggaagttccagggcgtgctcaagggtgctgagaaggtcgtcaccatcagagtcaatggcgtcgaagccaacttccacatgcagcttgacaattccggccaagcctatttcatgcgtgagcttgtgcccggcggtgaagattctggaacaggttcagacgacgaaactgtcaatgagcctgaacctccagcgcgtagtaagagtgatggggaactttacattggtcctagcgacagactgggtagccaagagctcaatgtggagcatcaagagaagcaaactagggatgagtttgagtcatatgatggttatggtaggttagaggaatcagaagatttgtcaacccaagcggatgggggaaattcggaggtggttctagttagtgtggacggacatgtgctcactgcacctatttcttcaacagaggagggtatggaggatgtgcagttatgcgaccctcagtttcatttgggacctgggcagagctctagtggggagttcacccgaagtggcgaggtctgggatgctgacattttagatggtttatacatatcacaggaaaaggtaaagattaattctggacatcagtcagaggttttaacagagaatggagaggtaccggttgaaaaggatgggtcacatcacatctcagtggacaaagatgaagtacatgtgtcaatcaatgatgatgaagctcatgctgtttctacaaatgaagttgaggttcaggatgtgtcaaggtcagggaatggtgatgtggtttatcaaaccatgaccagtgaaggtgagtcccatagtattttaggggacatagatgttggccatcaaacattgaccagggaggatgactctcctggtgtttcaggggagaatgttgtgggttatcaacccttgaccaatgaacataaagctcatgatatattagagaacaatgatgaggatcaaccacccctgaacaatgaagatgaatcttgtgatgtgccagtgcttgaaaaagacaaggattgcaactccccagctaataaggatgaggtttgtgatctcaacaatgaggatactgaggataccagtgctagttttggtaaaaacgacgctttccagagctgtttggatctgacgtcacaaatagatgacggggattcaggaaacgaactattttcacctggatctgattctcagagggatgctgagcataatttgggtaactgttctgttgctgaaacagatttggaggaaggtgaaagtaaaactgcttactgtggtcagtatggtcctttacaggagggagtgaatgtttcattatttaccttagaagttgataagactcaaaacaaagagagttctcctgctggaggttctcatgatagggacaaggaaattgcctctgaaattgaggctgccgcatctgatggtttacagtcatccatggcgaccagtggtaaagacaaactggggagcattccagagcactcagaagttgaagatgaacagaataaagaagaacattctcagtcacagaatggcttgggtgttgagatttctctttgtgggaacatgttacgaccaggaatgggccgagaatctgctgaggaagtgtttcaacagaatcttgtccatgaggaggatttcaaatcatctggatcaacaatgataaaaaatgcaaaccttattgtcaaagttgacaataattatttcccctggaataaagtttctcatgttattcttgggaaggctgtatatggctcaaagtttcccttagaacccactgatgctgttccggttgaacaacaggaaacacccaaatcaagagaggactctcttagaatgtctccctcaagccggagatggaggctttggctcaatccctttcggataacaagatcccttcaacgtagtaacagtgattcttccgaagacattttccttgactcagagtctgttttgagtccaatggatgatcaaactctggagaacaacaaaaaccagtcacctagaaagcaattcgtacggactttgattcccacaagtgaacaggtagcatctttaaatctgaaggagggccaaaacttggtgacctttagcttctccaccagagttcttgggaagcaacaggttgatgcacatatttacttgtggaaatggaatgctaaaattgtgatatctgatgtggatggcaccataacaaggtctgacgtgctgggtcaggtcatgcctttggttggacgtgattggagtcactcagggtacttctatttctcaaccaggaaaacggttatcaactactattccttagtgctagagcaattgtccaggcatatctcacgaagaacttcctctttaatctcaaacaggatgggaaagcactacccaatgggcctgttgtaatttcacctgatggcttgtttccttcactctaccgagaagttatacggagagccccacatgaattcaagattgcttgcctggaggacattaaggcgctctttccttctgattacaatccattttatgctgggtttggtaacagagatactgatgagctcagttacaagaagatgggaatacctaaaggcaagatttttatcatcaacccaaagggtgaagtggctgtcaacagttctgttgatgtgaagtcttatacgtccctacatacccttgtcaatgacatgtttccaccaacaactctggttgagcaggaagactacaacaactggaattactggaaggtgccattaccagatgttgatttgtagtgtagttttgacagaaacagccgtagataccagtagatcctgcaaaagcctagcagtagagcttcctgtaccctaatattcagccaccacgacggttttaggtccaatttgtgaaggtctcaagaattccgggatgtatggttttctgaaagccaatggcccaaggaaacgttgccactttatttccttcgacggagctttcacgtgatcatacggcttttgggtagtcatctgattgtcttcgtcgaacttgttgtacccagaggtctgagccctagaccctcgattcattagagaactcgtgatctggtcattgtccaagctactttgttctgattgcaggaaatctttaggtgccaaaagcagctgtacattttttttttcgtgatccaaaaacagctgtacatcgtatatcagcgcatagaagagaattgctaagcatatctgcatcttgaaacccttctttcttgtgctctaaaagttggatttgataattgttgag

SEQ ID NO: 63186 - DNA, 2116 bp, Zea Mays
cttgattgggaagagagcccaagcagtgtaaacaatttaagtcccttctcatcagtttccaccccaaggaaacgtgtgaaaagtagatgggagcctgttgtggatgaaaatgttaccaataaggtggaacaaatagcaaaaggattgatcggcagtaatgtccacagtacttcggaccctaaaaatagaatgggtagcagttgggatcataggaagtttctccagtcttctcaagcaccttcaaataaagtcaatcagaggtctgccaagaagcaaaaaatgggtagtaatttgagtcaaatacagaatggaaatgcttcaagtgacagtgagaaggaacatgatctaaccaaatattatgccagtgcaactgcactagcaaattcgcctgaggaaaagaaacgtagggagcatagatccaagcgttttgaaaagagtaaagattcatcatttaaatcaagaaatgtttctgcaaataaagatgctatgactaatttgcgtgcaagaagggcaattttgtcttttcgtactagaacctatgaaggcggcactttggctgttgaggatatggattgggatgcactgacagtcaaaggaacatgtcaggaaattgagaaaagatatctacgacttacagaagcacctgatcctgccaaaataaggccagaagatgtcctggagaaggcccttgcaatggttgaaacatcacaaaagaattatctttacaagtgtgatcaactaaaatctatccgccaagatcttacagttcagagaatccagaatgaactgactataaaggtttatgaaacacatgcccgattagctatgcaagctggtgatttacatgaatttaaccagcttatcaaaagaagccaaacaagatgcagctgttaagcatgcccttgcagttcatgcttctgttttatctggcaattatgttctatttttcaaactgtacaagaaggcgcccaatttgaactcatgcctcatggatctatatgtggagcggatgcgcttcgaagctatgaaatgcatgtctaggtcatatcgcccaactgtacctgtgggatatgttgcacagattttggggttcatgagaactgatacaggctgtgcaaccaatggggatgatggattagaagaatgcgaaaaatggttgaaagcgcatgggatagttctttcagaaggcttcgtcttctacactttacatgccagagccagagaatgcggttgcacatggtgatgcatcacttgctgttgatgactttttggcacggactgacgggcatcttaaaaggtgcagcagcgatgagccaacggtggatactccgtagtgtagtatattggtgctgctgtggcagtcgtgccgagatgtggacgcactgcacttctcccgtagaaactgcaaagggggcatgaaatggagctgcccaacgaagctcgcggagctaagagagtcggaacaactgaacaaggatgtggtcatcgggttttgccacttgcgcaaattgatccagtcatccagagttgcaccgcgatgagcttcgttgagaagacagagaagaaagcagcattacccgacatgagcagaagtttttatgtcgtggtggtttgctcacaagggcctgttccgataggagtagattgaaggtattagaagatattaaatttcttagtcttgtttggaagtaaggggattggaggaactgaagatttgaaggggccaaaatcctagaaggggattttagccttggctgatttgatgacccctccaatctctctcaatctccttatcatcaaatcagccctgcctcgattctcttctcccaaacaagccagcccttactagtaaaaattgaatagaaaaaaagatttaatcctcctcaatctccttcaaccaaacaaggtctaacttgcattaagcgtagaaagtattgtgaaaaacagctacagctttgaagcatacatcatacattatcttttccggtgctctttttttctggctgccccttcctctgtgaagattgtgaattactttttcttgcacgtaaatttattttcctatcccatagaataatgaaaattatatactaatgttcctatagttgcatctgag

SEQ ID NO: 63187 - DNA, 2251 bp, Zea Mays
gcagcttgattgggaagagagcccaagcagtgtaaacaatttaagtcccttctcatcagtttccaccccaaggaaacgtgtgaaaagtagatgggagcctgttgtggatgaaaatgttaccaataaggtggaacaaatagcaaaaggattgatcggcagtaatgtccacagtacttcggaccctaaaaatagaatgggtagcagttgggatcataggaagtttctccagtcttctcaagcaccttcaaataaagtcaatcagaggtctgccaagaagcaaaaaatgggtagtaatttgagtcaaatacagaatggaaatgcttcaagtgacagtgagaaggaacatgatctaaccaaatattatgccagtgcaactgcactagcaaattcgcctgaggaaaagaaacgtagggagcatagatccaagcgttttgaaaagagtaaagattcatcatttaaatcaagaaatgtttctgcaaataaagatgctatgactaatttgcgtgcaagaagggcaattttgtcttttcgtactagaacctatgaaggcggcactttggctgttgaggatatggattgggatgcactgacagtcaaaggaacatgtcaggaaattgagaaaagatatctacgacttacagaagcacctgatcctgccaaaataaggccagaagatgtcctggagaaggcccttgcaatggttgaaacatcacaaaagaattatctttacaagtgtgatcaactaaaatctatccgccaagatcttacagttcagagaatccagaatgaactgactataaaggtttatgaaacacatgcccgattagctatgcaagctggtgatttacatgaatttaaccagtgccagtcacaactgaagaggctatatgcacaaggaatcaagggttgctattttgaattttctgcttacaatttgctgtgtgtcatgctacactctaataataaacgagacttgctgtcatcaatggcaagcttatcaaaagaagccaaacaagatgcagctgttaagcatgcccttgcagttcatgcttctgttttatctggcaattatgttctatttttcaaactgtacaagaaggcgcccaatttgaactcatgcctcatggatctatatgtggagcggatgcgcttcgaagctatgaaatgcatgtctaggtcatatcgcccaactgtacctgtgggatatgttgcacagattttggggttcatgagaactgatacaggctgtgcaaccaatggggatgatggattagaagaatgcgaaaaatggttgaaagcgcatgggatagttctttcagaaggcttcgtcttctacactttacatgccagagccagagaatgcggttgcacatggtgatgcatcacttgctgttgatgactttttggcacggactgacgggcatcttaaaaggtgcagcagcgatgagccaacggtggatactccgtagtgtagtatattggtgctgctgtggcagtcgtgccgagatgtggacgcactgcacttctcccgtagaaactgcaaagggggcatgaaatggagctgcccaacgaagctcgcggagctaagagagtcggaacaactgaacaaggatgtggtcatcgggttttgccacttgcgcaaattgatccagtcatccagagttgcaccgcgatgagcttcgttgagaagacagagaagaaagcagcattacccgacatgagcagaagtttttatgtcgtggtggtttgctcacaagggcctgttccgataggagtagattgaaggtattagaagatattaaatttcttagtcttgtttggaagtaaggggattggaggaactgaagatttgaaggggccaaaatcctagaaggggattttagccttggctgatttgatgacccctccaatctctctcaatctccttatcatcaaatcagccctgcctcgattctcttctcccaaacaagccagcccttactagtaaaaattgaatagaaaaaaagatttaatcctcctcaatctccttcaaccaaacaaggtctaacttgcattaagcgtagaaagtattgtgaaaaacagctacagctttgaagcatacatcatacattatcttttccggtgctctttttttctggctgccccttcctctgtgaagattgtgaattactttttcttgcacgtaaatttattttcctatcccatagaataatgaaaattatatactaatgttcctatagttgcatctgag

SEQ ID NO: 63188 - DNA, 4095 bp, Zea Mays
gccgcgtcgtcggcttctccgctcttcacctgctccctctcgacgaactacgaagccatccccgcctccgcaaaccgccccgagcctccgacgtattccctggccagtaggccacttcccttctggccttcctactctctccacgctccacagctgtgagcctgtgaccctccgcttcgacgcggacgccgcaggccgttgacgatacaacgcaccccgccgaaaggggctgggactccttttccgtttccttcgcacatctcctcgctttccgccgagagaacttttttcagtcaatcataataataataataaaaaattcgccgttcggccccgaatttcccctctgtttctgcttcatctgacgcatctgatccattcccccttctcgacgcggatcgaatcacgagcgtgtggcggcggctgtggtggttagggacttagggttggagctcctggaggatggcgagccacggcgccggggtggctgctggatctgacgccccgcacgctgaggttgtcagtatgggtcaaacaaatctatctccatatcctctttcttccagtcatcattcatggtcctctgcaactgggtcagcaacggtttcatggaacaatacagtggacaaacttagccaagatacagtttactatgatccacaaagggatgtatcagattcaggagggaatcaaaatgtagaaagtagcgtgcctcatgttgcccagtcgagtagggggatggcagatgtagcccattctcacatgtcttactctagttcagatcaacatgtctataaccctgtagaatatgccaactattattatagctacccacaagcaacaaatgattcttctgtccagcaaggagcaaaccaacatccagaccgtgccaggatatggaagcagcagctactattatcagaacaacacatggaatggtggaagcacagggaatacttttgctcaatcataccagaactactcatcatctgatacaaatgcacaacaaagttctacttcagtgcctgccaattctttaccatatcagcagcagtataaccagtggccatactattacaatcaatctgtgccaagtgcttctagcaatccagttgctgggaacagtactacagataacttaactggtaacatgccttctggctattcatatcctagtagccagccacctccaccaggaacaacatcatggaaaagtaattcagttgcttctgttgcacctcctatgcaggttccaggtgttccaggacagcaaagtcaatatggcaaccaggcagaaggccattataaccagggacctggtgtgcaatggtctcaaaatcattatgcctaccagacacagccataccctcagaagactaattccaatcatccacaactaagcaaccatgaagatcaacaggagactgtatattctaacagtccaagcacaaatctttcgtcgaaccatgtttctgaaaattttaaaccaaacttgcaggattctgtgacaatggacacttccagcgaaggcaaaatacaggttcctataaatcctcaaattgccccaggtttctctatggtgataccaaagaatgagaagaaacattctggacttgatttatcaaagaaacctgcctatagattacccttttcactccgtaactatgctacgaggaacctcaatcgttgcaagaatgatgcccagagggaggcctgccgaagcataatgaatgagatcacaaaaaaagcttttgctgagggaacccttcttactaagaactgggacactgaaccactatttcctttgcctgaaagtactgtgggcatgactggaacaagcagtgtaaacaatttaagtcccttctcatcagtttccaccccaaggaaacgtgtgaaaagtagatgggagcctgttgtggatgaaaatgttaccaataaggtggaacaaatagcaaaaggattgatcggcagtaatgtccacagtacttcggaccctaaaaatagaatgggtagcagttgggatcataggaagtttctccagtcttctcaagcaccttcaaataaagtcaatcagaggtctgccaagaagcaaaaaatgggtagtaatttgagtcaaatacagaatggaaatgcttcaagtgacagtgagaaggaacatgatctaaccaaatattatgccagtgcaactgcactagcaaattcgcctgaggaaaagaaacgtagggagcatagatccaagcgttttgaaaagagtaaagattcatcatttaaatcaagaaatgtttctgcaaataaagatgctatgactaatttgcgtgcaagaagggcaattttgtcttttcgtactagaacctatgaaggcggcactttggctgttgaggatatggattgggatgcactgacagtcaaaggaacatgtcaggaaattgagaaaagatatctacgacttacagaagcacctgatcctgccaaaataaggccagaagatgtcctggagaaggcccttgcaatggttgaaacatcacaaaagaattatctttacaagtgtgatcaactaaaatctatccgccaagatcttacagttcagagaatccagaatgaactgactataaaggtttatgaaacacatgcccgattagctatgcaagctggtgatttacatgaatttaaccagtgccagtcacaactgaagaggctatatgcacaaggaatcaagggttgctattttgaattttctgcttacaatttgctgtgtgtcatgctacactctaataataaacgagacttgctgtcatcaatggcaagcttatcaaaagaagccaaacaagatgcagctgttaagcatgcccttgcagttcatgcttctgttttatctggcaattatgttctatttttcaaactgtacaagaaggcgcccaatttgaactcatgcctcatggatctatatgtggagcggatgcgcttcgaagctatgaaatgcatgtctaggtcatatcgcccaactgtacctgtgggatatgttgcacagattttggggttcatgagaactgatacaggctgtgcaaccaatggggatgatggattagaagaatgcgaaaaatggttgaaagcgcatgggatagttctttcagaaggtaacagtggggaattacaaatagacatgaaggcttcgtcttctacactttacatgccagagccagagaatgcggttgcacatggtgatgcatcacttgctgttgatgactttttggcacggactgacgggcatcttaaaaggtgcagcagcgatgagccaacggtggatactccgtagtgtagtatattggtgctgctgtggcagtcgtgccgagatgtggacgcactgcacttctcccgtagaaactgcaaagggggcatgaaatggagctgcccaacgaagctcgcggagctaagagagtcggaacaactgaacaaggatgtggtcatcgggttttgccacttgcgcaaattgatccagtcatccagagttgcaccgcgatgagcttcgttgagaagacagagaagaaagcagcattacccgacatgagcagaagtttttatgtcgtggtggtttgctcacaagggcctgttccgataggagtagattgaaggtattagaagatattaaatttcttagtcttgtttggaagtaaggggattggaggaactgaagatttgaaggggccaaaatcctagaaggggattttagccttggctgatttgatgacccctccaatctctctcaatctccttatcatcaaatcagccctgcctcgattctcttctcccaaacaagccagcccttactagtaaaaattgaatagaaaaaaagatttaatcctcctcaatctccttcaaccaaacaaggtctaacttgcattaagcgtagaaagtattgtgaaaaacagctacagctttgaagcatacatcatacattatcttttccggtgctctttttttctggctgccccttcctctgtgaagattgtgaattactttttcttgcacgtaaatttattttcctatcccatagaataatgaaaattatatactaatgttcctatagttgcatctgag

SEQ ID NO: 63189 - DNA, 4113 bp, Zea Mays
gccgcgtcgtcggcttctccgctcttcacctgctccctctcgacgaactacgaagccatccccgcctccgcaaaccgccccgagcctccgacgtattccctggccagtaggccacttcccttctggccttcctactctctccacgctccacagctgtgagcctgtgaccctccgcttcgacgcggacgccgcaggccgttgacgatacaacgcaccccgccgaaaggggctgggactccttttccgtttccttcgcacatctcctcgctttccgccgagagaacttttttcagtcaatcataataataataataaaaaattcgccgttcggccccgaatttcccctctgtttctgcttcatctgacgcatctgatccattcccccttctcgacgcggatcgaatcacgagcgtgtggcggcggctgtggtggttagggacttagggttggagctcctggaggatggcgagccacggcgccggggtggctgctggatctgacgccccgcacgctgaggttgtcagtatgggtcaaacaaatctatctccatatcctctttcttccagtcatcattcatggtcctctgcaactgggtcagcaacggtttcatggaacaatacagtggacaaacttagccaagatacagtttactatgatccacaaagggatgtatcagattcaggagggaatcaaaatgtagaaagtagcgtgcctcatgttgcccagtcgagtagggggatggcagatgtagcccattctcacatgtcttactctagttcagatcaacatgtctataaccctgtagaatatgccaactattattatagctacccacaagcaacaaatgattcttctgtccagcaaggagcaaaccaacatccaggtgcagcttatcagcctcttacttcatttcaaaattcagggtcttacattgatcctacaagtaacacatattacaatgctgggggtcatcagaccgtgccaggatatggaagcagcagctactattatcagaacaacacatggaatggtggaagcacagggaatacttttgctcaatcataccagaactactcatcatctgatacaaatgcacaacaaagttctacttcagtgcctgccaattctttaccatatcagcagcagtataaccagtggccatactattacaatcaatctgtgccaagtgcttctagcaatccagttgctgggaacagtactacagataacttaactggtaacatgccttctggctattcatatcctagtagccagccacctccaccaggaacaacatcatggaaaagtaattcagttgcttctgttgcacctcctatgcaggttccaggtgttccaggacagcaaagtcaatatggcaaccaggcagaaggccattataaccagggacctggtgtgcaatggtctcaaaatcattatgcctaccagacacagccataccctcagaagactaattccaatcatccacaactaagcaaccatgaagatcaacaggagactgtatattctaacagtccaagcacaaatctttcgtcgaaccatgtttctgaaaattttaaaccaaacttgcaggattctgtgacaatggacacttccagcgaaggcaaaatacaggttcctataaatcctcaaattgccccaggtttctctatggtgataccaaagaatgagaagaaacattctggacttgatttatcaaagaaacctgcctatgttagtgtctccatgcctacgaatgatgctaaagcaactcaagttggtcttgatgctagattacccttttcactccgtaactatgctacgaggaacctcaatcgttgcaagaatgatgcccagagggaggcctgccgaagcataatgaatgagatcacaaaaaaagcttttgctgagggaacccttcttactaagaactgggacactgaaccactatttcctttgcctgaaagtactgtgggcatgactggaacaagcagtgtaaacaatttaagtcccttctcatcagtttccaccccaaggaaacgtgtgaaaagtagatgggagcctgttgtggatgaaaatgttaccaataaggtggaacaaatagcaaaaggattgatcggcagtaatgtccacagtacttcggaccctaaaaatagaatgggtagcagttgggatcataggaagtttctccagtcttctcaagcaccttcaaataaagtcaatcagaggtctgccaagaagcaaaaaatgggtagtaatttgagtcaaatacagaatggaaatgcttcaagtgacagtgagaaggaacatgatctaaccaaatattatgccagtgcaactgcactagcaaattcgcctgaggaaaagaaacgtagggagcatagatccaagcgttttgaaaagagtaaagattcatcatttaaatcaagaaatgtttctgcaaataaagatgctatgactaatttgcgtgcaagaagggcaattttgtcttttcgtactagaacctatgaaggcggcactttggctgttgaggatatggattgggatgcactgacagtcaaaggaacatgtcaggaaattgagaaaagatatctacgacttacagaagcacctgatcctgccaaaataaggccagaagatgtcctggagaaggcccttgcaatggttgaaacatcacaaaagaattatctttacaagtgtgatcaactaaaatctatccgccaagatcttacagttcagagaatccagaatgaactgactataaaggtttatgaaacacatgcccgattagctatgcaagctggtgatttacatgaatttaaccagcttatcaaaagaagccaaacaagatgcagctgttaagcatgcccttgcagttcatgcttctgttttatctggcaattatgttctatttttcaaactgtacaagaaggcgcccaatttgaactcatgcctcatggatctatatgtggagcggatgcgcttcgaagctatgaaatgcatgtctaggtcatatcgcccaactgtacctgtgggatatgttgcacagattttggggttcatgagaactgatacaggctgtgcaaccaatggggatgatggattagaagaatgcgaaaaatggttgaaagcgcatgggatagttctttcagaaggtaacagtggggaattacaaatagacatgaaggcttcgtcttctacactttacatgccagagccagagaatgcggttgcacatggtgatgcatcacttgctgttgatgactttttggcacggactgacgggcatcttaaaaggtgcagcagcgatgagccaacggtggatactccgtagtgtagtatattggtgctgctgtggcagtcgtgccgagatgtggacgcactgcacttctcccgtagaaactgcaaagggggcatgaaatggagctgcccaacgaagctcgcggagctaagagagtcggaacaactgaacaaggatgtggtcatcgggttttgccacttgcgcaaattgatccagtcatccagagttgcaccgcgatgagcttcgttgagaagacagagaagaaagcagcattacccgacatgagcagaagtttttatgtcgtggtggtttgctcacaagggcctgttccgataggagtagattgaaggtattagaagatattaaatttcttagtcttgtttggaagtaaggggattggaggaactgaagatttgaaggggccaaaatcctagaaggggattttagccttggctgatttgatgacccctccaatctctctcaatctccttatcatcaaatcagccctgcctcgattctcttctcccaaacaagccagcccttactagtaaaaattgaatagaaaaaaagatttaatcctcctcaatctccttcaaccaaacaaggtctaacttgcattaagcgtagaaagtattgtgaaaaacagctacagctttgaagcatacatcatacattatcttttccggtgctctttttttctggctgccccttcctctgtgaagattgtgaattactttttcttgcacgtaaatttattttcctatcccatagaataatgaaaattatatactaatgttcctatagttgcatctgag

SEQ ID NO: 63190 - DNA, 4261 bp, Zea Mays
gaaccctcacgcactacgccgccgcgtcgtcggcttctccgctcttcacctgctccctctcgacgaactacgaagccatccccgcctccgcaaaccgccccgagcctccgacgtattccctggccagtaggccacttcccttctggccttcctactctctccacgctccacagctgtgagcctgtgaccctccgcttcgacgcggacgccgcaggccgttgacgatacaacgcaccccgccgaaaggggctgggactccttttccgtttccttcgcacatctcctcgctttccgccgagagaacttttttcagtcaatcataataataataataaaaaattcgccgttcggccccgaatttcccctctgtttctgcttcatctgacgcatctgatccattcccccttctcgacgcggatcgaatcacgagcgtgtggcggcggctgtggtggttagggacttagggttggagctcctggaggatggcgagccacggcgccggggtggctgctggatctgacgccccgcacgctgaggttgtcagtatgggtcaaacaaatctatctccatatcctctttcttccagtcatcattcatggtcctctgcaactgggtcagcaacggtttcatggaacaatacagtggacaaacttagccaagatacagtttactatgatccacaaagggatgtatcagattcaggagggaatcaaaatgtagaaagtagcgtgcctcatgttgcccagtcgagtagggggatggcagatgtagcccattctcacatgtcttactctagttcagatcaacatgtctataaccctgtagaatatgccaactattattatagctacccacaagcaacaaatgattcttctgtccagcaaggagcaaaccaacatccaggtgcagcttatcagcctcttacttcatttcaaaattcagggtcttacattgatcctacaagtaacacatattacaatgctgggggtcatcagaccgtgccaggatatggaagcagcagctactattatcagaacaacacatggaatggtggaagcacagggaatacttttgctcaatcataccagaactactcatcatctgatacaaatgcacaacaaagttctacttcagtgcctgccaattctttaccatatcagcagcagtataaccagtggccatactattacaatcaatctgtgccaagtgcttctagcaatccagttgctgggaacagtactacagataacttaactggtaacatgccttctggctattcatatcctagtagccagccacctccaccaggaacaacatcatggaaaagtaattcagttgcttctgttgcacctcctatgcaggttccaggtgttccaggacagcaaagtcaatatggcaaccaggcagaaggccattataaccagggacctggtgtgcaatggtctcaaaatcattatgcctaccagacacagccataccctcagaagactaattccaatcatccacaactaagcaaccatgaagatcaacaggagactgtatattctaacagtccaagcacaaatctttcgtcgaaccatgtttctgaaaattttaaaccaaacttgcaggattctgtgacaatggacacttccagcgaaggcaaaatacaggttcctataaatcctcaaattgccccaggtttctctatggtgataccaaagaatgagaagaaacattctggacttgatttatcaaagaaacctgcctatgttagtgtctccatgcctacgaatgatgctaaagcaactcaagttggtcttgatgctagattacccttttcactccgtaactatgctacgaggaacctcaatcgttgcaagaatgatgcccagagggaggcctgccgaagcataatgaatgagatcacaaaaaaagcttttgctgagggaacccttcttactaagaactgggacactgaaccactatttcctttgcctgaaagtactgtgggcatgactggaacaagtgtaaacaatttaagtcccttctcatcagtttccaccccaaggaaacgtgtgaaaagtagatgggagcctgttgtggatgaaaatgttaccaataaggtggaacaaatagcaaaaggattgatcggcagtaatgtccacagtacttcggaccctaaaaatagaatgggtagcagttgggatcataggaagtttctccagtcttctcaagcaccttcaaataaagtcaatcagaggtctgccaagaagcaaaaaatgggtagtaatttgagtcaaatacagaatggaaatgcttcaagtgacagtgagaaggaacatgatctaaccaaatattatgccagtgcaactgcactagcaaattcgcctgaggaaaagaaacgtagggagcatagatccaagcgttttgaaaagagtaaagattcatcatttaaatcaagaaatgtttctgcaaataaagatgctatgactaatttgcgtgcaagaagggcaattttgtcttttcgtactagaacctatgaaggcggcactttggctgttgaggatatggattgggatgcactgacagtcaaaggaacatgtcaggaaattgagaaaagatatctacgacttacagaagcacctgatcctgccaaaataaggccagaagatgtcctggagaaggcccttgcaatggttgaaacatcacaaaagaattatctttacaagtgtgatcaactaaaatctatccgccaagatcttacagttcagagaatccagaatgaactgactataaaggtttatgaaacacatgcccgattagctatgcaagctggtgatttacatgaatttaaccagtgccagtcacaactgaagaggctatatgcacaaggaatcaagggttgctattttgaattttctgcttacaatttgctgtgtgtcatgctacactctaataataaacgagacttgctgtcatcaatggcaagcttatcaaaagaagccaaacaagatgcagctgttaagcatgcccttgcagttcatgcttctgttttatctggcaattatgttctatttttcaaactgtacaagaaggcgcccaatttgaactcatgcctcatggatctatatgtggagcggatgcgcttcgaagctatgaaatgcatgtctaggtcatatcgcccaactgtacctgtgggatatgttgcacagattttggggttcatgagaactgatacaggctgtgcaaccaatggggatgatggattagaagaatgcgaaaaatggttgaaagcgcatgggatagttctttcagaaggtaacagtggggaattacaaatagacatgaaggcttcgtcttctacactttacatgccagagccagagaatgcggttgcacatggtgatgcatcacttgctgttgatgactttttggcacggactgacgggcatcttaaaaggtgcagcagcgatgagccaacggtggatactccgtagtgtagtatattggtgctgctgtggcagtcgtgccgagatgtggacgcactgcacttctcccgtagaaactgcaaagggggcatgaaatggagctgcccaacgaagctcgcggagctaagagagtcggaacaactgaacaaggatgtggtcatcgggttttgccacttgcgcaaattgatccagtcatccagagttgcaccgcgatgagcttcgttgagaagacagagaagaaagcagcattacccgacatgagcagaagtttttatgtcgtggtggtttgctcacaagggcctgttccgataggagtagattgaaggtattagaagatattaaatttcttagtcttgtttggaagtaaggggattggaggaactgaagatttgaaggggccaaaatcctagaaggggattttagccttggctgatttgatgacccctccaatctctctcaatctccttatcatcaaatcagccctgcctcgattctcttctcccaaacaagccagcccttactagtaaaaattgaatagaaaaaaagatttaatcctcctcaatctccttcaaccaaacaaggtctaacttgcattaagcgtagaaagtattgtgaaaaacagctacagctttgaagcatacatcatacattatcttttccggtgctctttttttctggctgccccttcctctgtgaagattgtgaattactttttcttgcacgtaaatttattttcctatcccatagaataatgaaaattatatactaatgttcctatagttgcatctgag

SEQ ID NO: 63191 - DNA, 4144 bp, Zea Mays
gtgggaaccctcacgcactacgccgccgcgtcgtcggcttctccgctcttcacctgctccctctcgacgaactacgaagccatccccgcctccgcaaaccgccccgagcctccgacgtattccctggccagtaggccacttcccttctggccttcctactctctccacgctccacagctgtgagcctgtgaccctccgcttcgacgcggacgccgcaggccgttgacgatacaacgcaccccgccgaaaggggctgggactccttttccgtttccttcgcacatctcctcgctttccgccgagagaacttttttcagtcaatcataataataataataaaaaattcgccgttcggccccgaatttcccctctgtttctgcttcatctgacgcatctgatccattcccccttctcgacgcggatcgaatcacgagcgtgtggcggcggctgtggtggttagggacttagggttggagctcctggaggatggcgagccacggcgccggggtggctgctggatctgacgccccgcacgctgaggttgtcagtatgggtcaaacaaatctatctccatatcctctttcttccagtcatcattcatggtcctctgcaactgggtcagcaacggtttcatggaacaatacagtggacaaacttagccaagatacagtttactatgatccacaaagggatgtatcagattcaggagggaatcaaaatgtagaaagtagcgtgcctcatgttgcccagtcgagtagggggatggcagatgtagcccattctcacatgtcttactctagttcagatcaacatgtctataaccctgtagaatatgccaactattattatagctacccacaagcaacaaatgattcttctgtccagcaaggagcaaaccaacatccagaccgtgccaggatatggaagcagcagctactattatcagaacaacacatggaatggtggaagcacagggaatacttttgctcaatcataccagaactactcatcatctgatacaaatgcacaacaaagttctacttcagtgcctgccaattctttaccatatcagcagcagtataaccagtggccatactattacaatcaatctgtgccaagtgcttctagcaatccagttgctgggaacagtactacagataacttaactggtaacatgccttctggctattcatatcctagtagccagccacctccaccaggaacaacatcatggaaaagtaattcagttgcttctgttgcacctcctatgcaggttccaggtgttccaggacagcaaagtcaatatggcaaccaggcagaaggccattataaccagggacctggtgtgcaatggtctcaaaatcattatgcctaccagacacagccataccctcagaagactaattccaatcatccacaactaagcaaccatgaagatcaacaggagactgtatattctaacagtccaagcacaaatctttcgtcgaaccatgtttctgaaaattttaaaccaaacttgcaggattctgtgacaatggacacttccagcgaaggcaaaatacaggttcctataaatcctcaaattgccccaggtttctctatggtgataccaaagaatgagaagaaacattctggacttgatttatcaaagaaacctgcctatgttagtgtctccatgcctacgaatgatgctaaagcaactcaagttggtcttgatgctagattacccttttcactccgtaactatgctacgaggaacctcaatcgttgcaagaatgatgcccagagggaggcctgccgaagcataatgaatgagatcacaaaaaaagcttttgctgagggaacccttcttactaagaactgggacactgaaccactatttcctttgcctgaaagtactgtgggcatgactggaacaagcagtgtaaacaatttaagtcccttctcatcagtttccaccccaaggaaacgtgtgaaaagtagatgggagcctgttgtggatgaaaatgttaccaataaggtggaacaaatagcaaaaggattgatcggcagtaatgtccacagtacttcggaccctaaaaatagaatgggtagcagttgggatcataggaagtttctccagtcttctcaagcaccttcaaataaagtcaatcagaggtctgccaagaagcaaaaaatgggtagtaatttgagtcaaatacagaatggaaatgcttcaagtgacagtgagaaggaacatgatctaaccaaatattatgccagtgcaactgcactagcaaattcgcctgaggaaaagaaacgtagggagcatagatccaagcgttttgaaaagagtaaagattcatcatttaaatcaagaaatgtttctgcaaataaagatgctatgactaatttgcgtgcaagaagggcaattttgtcttttcgtactagaacctatgaaggcggcactttggctgttgaggatatggattgggatgcactgacagtcaaaggaacatgtcaggaaattgagaaaagatatctacgacttacagaagcacctgatcctgccaaaataaggccagaagatgtcctggagaaggcccttgcaatggttgaaacatcacaaaagaattatctttacaagtgtgatcaactaaaatctatccgccaagatcttacagttcagagaatccagaatgaactgactataaaggtttatgaaacacatgcccgattagctatgcaagctggtgatttacatgaatttaaccagtgccagtcacaactgaagaggctatatgcacaaggaatcaagggttgctattttgaattttctgcttacaatttgctgtgtgtcatgctacactctaataataaacgagacttgctgtcatcaatggcaagcttatcaaaagaagccaaacaagatgcagctgttaagcatgcccttgcagttcatgcttctgttttatctggcaattatgttctatttttcaaactgtacaagaaggcgcccaatttgaactcatgcctcatggatctatatgtggagcggatgcgcttcgaagctatgaaatgcatgtctaggtcatatcgcccaactgtacctgtgggatatgttgcacagattttggggttcatgagaactgatacaggctgtgcaaccaatggggatgatggattagaagaatgcgaaaaatggttgaaagcgcatgggatagttctttcagaaggcttcgtcttctacactttacatgccagagccagagaatgcggttgcacatggtgatgcatcacttgctgttgatgactttttggcacggactgacgggcatcttaaaaggtgcagcagcgatgagccaacggtggatactccgtagtgtagtatattggtgctgctgtggcagtcgtgccgagatgtggacgcactgcacttctcccgtagaaactgcaaagggggcatgaaatggagctgcccaacgaagctcgcggagctaagagagtcggaacaactgaacaaggatgtggtcatcgggttttgccacttgcgcaaattgatccagtcatccagagttgcaccgcgatgagcttcgttgagaagacagagaagaaagcagcattacccgacatgagcagaagtttttatgtcgtggtggtttgctcacaagggcctgttccgataggagtagattgaaggtattagaagatattaaatttcttagtcttgtttggaagtaaggggattggaggaactgaagatttgaaggggccaaaatcctagaaggggattttagccttggctgatttgatgacccctccaatctctctcaatctccttatcatcaaatcagccctgcctcgattctcttctcccaaacaagccagcccttactagtaaaaattgaatagaaaaaaagatttaatcctcctcaatctccttcaaccaaacaaggtctaacttgcattaagcgtagaaagtattgtgaaaaacagctacagctttgaagcatacatcatacattatcttttccggtgctctttttttctggctgccccttcctctgtgaagattgtgaattactttttcttgcacgtaaatttattttcctatcccatagaataatgaaaattatatactaatgttcctatagttgcatctgag

SEQ ID NO: 63192 - DNA, 4108 bp, Zea Mays
gtttgtgggaaccctcacgcactacgccgccgcgtcgtcggcttctccgctcttcacctgctccctctcgacgaactacgaagccatccccgcctccgcaaaccgccccgagcctccgacgtattccctggccagtaggccacttcccttctggccttcctactctctccacgctccacagctgtgagcctgtgaccctccgcttcgacgcggacgccgcaggccgttgacgatacaacgcaccccgccgaaaggggctgggactccttttccgtttccttcgcacatctcctcgctttccgccgagagaacttttttcagtcaatcataataataataataaaaaattcgccgttcggccccgaatttcccctctgtttctgcttcatctgacgcatctgatccattcccccttctcgacgcggatcgaatcacgagcgtgtggcggcggctgtggtggttagggacttagggttggagctcctggaggatggcgagccacggcgccggggtggctgctggatctgacgccccgcacgctgaggttgtcagtatgggtcaaacaaatctatctccatatcctctttcttccagtcatcattcatggtcctctgcaactgggtcagcaacggtttcatggaacaatacagtggacaaacttagccaagatacagtttactatgatccacaaagggatgtatcagattcaggagggaatcaaaatgtagaaagtagcgtgcctcatgttgcccagtcgagtagggggatggcagatgtagcccattctcacatgtcttactctagttcagatcaacatgtctataaccctgtagaatatgccaactattattatagctacccacaagcaacaaatgattcttctgtccagcaaggagcaaaccaacatccagaccgtgccaggatatggaagcagcagctactattatcagaacaacacatggaatggtggaagcacagggaatacttttgctcaatcataccagaactactcatcatctgatacaaatgcacaacaaagttctacttcagtgcctgccaattctttaccatatcagcagcagtataaccagtggccatactattacaatcaatctgtgccaagtgcttctagcaatccagttgctgggaacagtactacagataacttaactggtaacatgccttctggctattcatatcctagtagccagccacctccaccaggaacaacatcatggaaaagtaattcagttgcttctgttgcacctcctatgcaggttccaggtgttccaggacagcaaagtcaatatggcaaccaggcagaaggccattataaccagggacctggtgtgcaatggtctcaaaatcattatgcctaccagacacagccataccctcagaagactaattccaatcatccacaactaagcaaccatgaagatcaacaggagactgattctgtgacaatggacacttccagcgaaggcaaaatacaggttcctataaatcctcaaattgccccaggtttctctatggtgataccaaagaatgagaagaaacattctggacttgatttatcaaagaaacctgcctatgttagtgtctccatgcctacgaatgatgctaaagcaactcaagttggtcttgatgctagattacccttttcactccgtaactatgctacgaggaacctcaatcgttgcaagaatgatgcccagagggaggcctgccgaagcataatgaatgagatcacaaaaaaagcttttgctgagggaacccttcttactaagaactgggacactgaaccactatttcctttgcctgaaagtactgtgggcatgactggaacaagcagtgtaaacaatttaagtcccttctcatcagtttccaccccaaggaaacgtgtgaaaagtagatgggagcctgttgtggatgaaaatgttaccaataaggtggaacaaatagcaaaaggattgatcggcagtaatgtccacagtacttcggaccctaaaaatagaatgggtagcagttgggatcataggaagtttctccagtcttctcaagcaccttcaaataaagtcaatcagaggtctgccaagaagcaaaaaatgggtagtaatttgagtcaaatacagaatggaaatgcttcaagtgacagtgagaaggaacatgatctaaccaaatattatgccagtgcaactgcactagcaaattcgcctgaggaaaagaaacgtagggagcatagatccaagcgttttgaaaagagtaaagattcatcatttaaatcaagaaatgtttctgcaaataaagatgctatgactaatttgcgtgcaagaagggcaattttgtcttttcgtactagaacctatgaaggcggcactttggctgttgaggatatggattgggatgcactgacagtcaaaggaacatgtcaggaaattgagaaaagatatctacgacttacagaagcacctgatcctgccaaaataaggccagaagatgtcctggagaaggcccttgcaatggttgaaacatcacaaaagaattatctttacaagtgtgatcaactaaaatctatccgccaagatcttacagttcagagaatccagaatgaactgactataaaggtttatgaaacacatgcccgattagctatgcaagctggtgatttacatgaatttaaccagtgccagtcacaactgaagaggctatatgcacaaggaatcaagggttgctattttgaattttctgcttacaatttgctgtgtgtcatgctacactctaataataaacgagacttgctgtcatcaatggcaagcttatcaaaagaagccaaacaagatgcagctgttaagcatgcccttgcagttcatgcttctgttttatctggcaattatgttctatttttcaaactgtacaagaaggcgcccaatttgaactcatgcctcatggatctatatgtggagcggatgcgcttcgaagctatgaaatgcatgtctaggtcatatcgcccaactgtacctgtgggatatgttgcacagattttggggttcatgagaactgatacaggctgtgcaaccaatggggatgatggattagaagaatgcgaaaaatggttgaaagcgcatgggatagttctttcagaaggtaacagtggggaattacaaatagacatgaaggcttcgtcttctacactttacatgccagagccagagaatgcggttgcacatggtgatgcatcacttgctgttgatgactttttggcacggactgacgggcatcttaaaaggtgcagcagcgatgagccaacggtggatactccgtagtgtagtatattggtgctgctgtggcagtcgtgccgagatgtggacgcactgcacttctcccgtagaaactgcaaagggggcatgaaatggagctgcccaacgaagctcgcggagctaagagagtcggaacaactgaacaaggatgtggtcatcgggttttgccacttgcgcaaattgatccagtcatccagagttgcaccgcgatgagcttcgttgagaagacagagaagaaagcagcattacccgacatgagcagaagtttttatgtcgtggtggtttgctcacaagggcctgttccgataggagtagattgaaggtattagaagatattaaatttcttagtcttgtttggaagtaaggggattggaggaactgaagatttgaaggggccaaaatcctagaaggggattttagccttggctgatttgatgacccctccaatctctctcaatctccttatcatcaaatcagccctgcctcgattctcttctcccaaacaagccagcccttactagtaaaaattgaatagaaaaaaagatttaatcctcctcaatctccttcaaccaaacaaggtctaacttgcattaagcgtagaaagtattgtgaaaaacagctacagctttgaagcatacatcatacattatcttttccggtgctctttttttctggctgccccttcctctgtgaagattgtgaattactttttcttgcacgtaaatttattttcctatcccatagaataatgaaaattatatactaatgttcctatagttgcatctgag

SEQ ID NO: 63193 - DNA, 1111 bp, Zea Mays
atccctgcatcgcaccctcccgggccgccttctcttctccagcgtccgatctcccactcccctccctcaccgcagctctcccacctccgccctccccccgcacgcgctcgccacctcgccctcccctccacgttgctcgcacccgcgcttatataaggaggagctcatggcggaagctccggcgagccctggcggcggcggcgggagccacgagagcgggagccccaggggaggcggaggcggtggcagcgtcagggagcaggacaggttcctgcccatcgccaacatcagtcgcatcatgaagaaggccatcccggctaacgggaagatcgccaaggacgctaaggagaccgtgcaggagtgcgtctccgagttcatctccttcatcactagcgaagcgagtgacaagtgccagagggagaagcggaagaccatcaatggcgacgatctgctgtgggccatggccacgctggggtttgaagactacattgaacccctcaaggtgtacctgcagaagtacagagaggtgcagggtgatagcaagttaactgcaaaatctagcgatggctcaattaaaaaggatgcccttggtcatgtgggagcaagtagctcagctgcacaagggatgggccaacagggagcatacaaccaaggaatgggttatatgcaaccccagtaccataacggggatatctcaaactaatggaggtatggaccttttctgcgacagctgctcttacctgaggcgattttttttgtcttagttatttactaagacaccttgcggtgaccattaaagagtaaccaatcgccctcaataggtccgtttttatctgccagaactgatgaggtcgctcactaggagtaagtcgcttccctgggaacggttgtcggctagcaccgctcttgtatgtatattaagagtaacttaatgattggtcttttggctgcgatttgattacatgtatttgtatcgggaggcataaatattgtgtaatttgtgttaaagactggtgtaattgaactatgggaagagctgctttggttgtaaccatattttgatgcccgtatattaggcaaaaatagaaggctgtgggcgtgcacaacatat

SEQ ID NO: 63194 - DNA, 1144 bp, Zea Mays
atccctgcatcgcaccctcccgggccgccttctcttctccagcgtccgatctcccactcccctccctcaccgcagctctcccacctccgccctccccccgcacgcgctcgccacctcgccctcccctccacgttgctcgcacccgcgcttatataagggtttgggttgcggtgatggtcctgcagtgcaggaggagctcatggcggaagctccggcgagccctggcggcggcggcgggagccacgagagcgggagccccaggggaggcggaggcggtggcagcgtcagggagcaggacaggttcctgcccatcgccaacatcagtcgcatcatgaagaaggccatcccggctaacgggaagatcgccaaggacgctaaggagaccgtgcaggagtgcgtctccgagttcatctccttcatcactagcgaagcgagtgacaagtgccagagggagaagcggaagaccatcaatggcgacgatctgctgtgggccatggccacgctggggtttgaagactacattgaacccctcaaggtgtacctgcagaagtacagagaggtgcagggtgatagcaagttaactgcaaaatctagcgatggctcaattaaaaaggatgcccttggtcatgtgggagcaagtagctcagctgcacaagggatgggccaacagggagcatacaaccaaggaatgggttatatgcaaccccagtaccataacggggatatctcaaactaatggaggtatggaccttttctgcgacagctgctcttacctgaggcgattttttttgtcttagttatttactaagacaccttgcggtgaccattaaagagtaaccaatcgccctcaataggtccgtttttatctgccagaactgatgaggtcgctcactaggagtaagtcgcttccctgggaacggttgtcggctagcaccgctcttgtatgtatattaagagtaacttaatgattggtcttttggctgcgatttgattacatgtatttgtatcgggaggcataaatattgtgtaatttgtgttaaagactggtgtaattgaactatgggaagagctgctttggttgtaaccatattttgatgcccgtatattaggcaaaaatagaaggctgtgggcgtgcacaacatat

SEQ ID NO: 63195 - DNA, 1009 bp, Zea Mays
atccctgcatcgcaccctcccgggccgccttctcttctccagcgtccgatctcccactcccctccctcaccgcagctctcccacctccgccctccccccgcacgcgctcgccacctcgccctcccctccacgttgctcgcacccgcgcttatataagtgcaggaggagctcatggcggaagctccggcgagccctggcggcggcggcgggagccacgagagcgggagccccaggggaggcggaggcggtggcagcgtcagggagcaggacaggttcctgcccatcgccaacatcagtcgcatcatgaagaaggccatcccggctaacgggaagatcgccaaggacgctaaggagaccgtgcaggagtgcgtctccgagttcatctccttcatcactagcgaagcgagtgacaagtgccagagggagaagcggaagaccatcaatggcgacgatctgctgtgggccatggccacgctggggtttgaagactacattgaacccctcaaggtgtacctgcagaagtacagagaggtgcagggtgatagcaagttaactgcaaaatctagcgatggctcaattaaaaaggatgcccttggtcatgtgggagcaagtagctcagctgcacaagggggagcatacaaccaaggaatgggttatatgcaaccccagtaccataacggggatatctcaaactaatggaggtatggaccttttctgcgacagctgctcttacctgagaactgatgaggtcgctcactaggagtaagtcgcttccctgggaacggttgtcggctagcaccgctcttgtatgtatattaagagtaacttaatgattggtcttttggctgcgatttgattacatgtatttgtatcgggaggcataaatattgtgtaatttgtgttaaagactggtgtaattgaactatgggaagagctgctttggttgtaaccatattttgatgcccgtatattaggcaaaaatagaaggctgtgggcgtgcacaacatat

SEQ ID NO: 63196 - DNA, 567 bp, Zea Mays
gaccgaagcacccgccagcacgaatcgtgacgcagatcaagcaaaccctaactgccaaccctactatattttttttttcttgcccctctcgatcccgccgccgacgccgacgccgcagccgcagccttagccttgccttcgaactcgaagcccgttgcatccggctaccgcagcgtcgccaaccgtcacagccggtctcctccctccgctaccatggggaagacacgcggtatgggagctgggcgcaagctcaagacccaccgcaggaaccagaggtgggctgacaaggcatacaagaaaagccacttgggcaatgagtggaagaaaccttttgctggatcatctcacgccaagggcatcgttctggagaagattggtattgaggccaagcagccgaactctgccatccgtaagtgtgcccgtgttcagctggtgaagaatgggaaaaagattgctgcctttgtgccaaatgatggttgcctaaactacatcgaggagaatgatgaggtgttgattgctgggtttggtcgtaagggccatgctgtgggagatatccctggatgacgc

SEQ ID NO: 63197 - DNA, 2906 bp, Zea Mays
aagtgggtcactcgtcacgcccatctcattcattccgtcgcaggctcgcagtcgcagcgccgttgcggacgcagccacgcaggcgcaggaggccgaggttgcatagaggtgctggtatcttactctgcttctggttatgctatctgcctatgacttcagcttcccaaacttctccctgcttcttgcccctggttggtaaaaatctgtaacaactgctgccctgactgcaaaagacgcaactatgcgtctttcttcttctcttcaagatttgccgaccttcaccagaattgatgctttggaaaggggttctagcgtaggcagtgatctgagctcagggcgcccaaaacctgtccgcatgcttcaaagagatggtgccgtcgcaagcttttcaaaagaaagaacacccccctcatcgccgacaaatagaaagaaatgcatgagagcagccgggtgtgctattgcattgatcttactggtgttctttgcgtatggttcatggagatattttcatgtgttcctctctgaaggaagatctgaatactatgttgttcttgattgtggcagcactggtacgagagtttatgtctatgaatggcatattaatcataatgacgcaaatgcatttcctattgttttgaaacctttagggaatgctcccaagaagaaatctggtaaattaacccgactatatcagcgaatggagacagaacctggattgagcaagctcgttcacaatgaatctggattgaagaaggcaatagagccccttcttcagatggctgagaaattgatccctagacatgcacacaagcacactccactttttctatatgctactgctggtgttcgcaagctacctagtgcagattcagagtggctcctggataagtcctgggatatcctgaacaattcatcatttttatgtagtagagatagagttaagatcattagtggcatggatgaagcttattatggatggatagctcttaaccacaacatggatatgcttggcacctcatcatctaaaatgacatatggttcacttgatttagggggatcatcattacaggttacatttgagaatgataaatcagtgcaggatgagacaagcattcgtctgagtattggttcagttgaacatcacctcagtgcttattctcttactggttatgggttaaatgatgcatttgataaatctgtagcacatctagtgaaaagactgggaggagttgctagcaatggcaaggttcaagtcaaacatccctgtctacagactggattcaaggaagattatatttgttcttactgccatccattgaaacaagatggaagtcccagtgtcggcgagaagaacagtggcaaagagaagcagggaatagctgttgaactggtcggagcacctcagtggaatgaatgtagtgctcttgcaaaagtaacagtcaatctttctgagtggtccagtgcaagtccagggcttgattgtaacatccatccttgtgctcttgcctctaactttccccgaccatatgggcagtttttcgctatctctggcttctatgtggtttttaaattttttaatttgactgctgatgcgactctaggtgatgttcaaaaaagaggtcaggaattttgtgaaaaaccatggaaagttgcaaagagtagtgttcctccacagccttttgtagaacaatattgcttcagagctccttatatttcatcactactgagagagggattgcagattaaagatagtcaggtgataattggctctggcagtattacttggactcatggagttgctttgctggaggctggtcaagcattgtcttcacgactagatattcaaggataccgaatactgcacagggagataaatccaaatattctcatagtactgtttctgatttcaattgtgttggtcatatgtgccatactatgcgtcagcaattcgataccaagatcattccgcaagtcttatctgccaattcataggcataattctggaggcagttctgttcttggtatgggattgcctttcaaacatttattatggaatcccattagttcaggtgatggtagaacaaagacaccactgagccctactgttgctgggtcagatcctcatccatttgcaggactaggaggcagcagtgtcgagcttatggagtcctcgaggcaatccttgggtgcctatcacagctattctgttgggagcttaggtcagatgcagttttctagcggggtgaggaaccctagccgaggtcagactacacttcaaagtcggaggtcgcaatcaagagaggatctcagttcttcacttgctgatattcattttccaaaagtgtagcactgcatcaaggaatgactagaatgagatccttacatgccataacaaactctgtaaataatagctccagagttcgaactgcttgatttcttctctaatcagaagtcaattttgtctgtccgcttacacttcaatgaggtttaggattcatataaatgaacttatgacttgtgcctatcctggacatgatacatccattcatcccattgtatgtgctcaagaacataccatagcagtgaagttctggtagtgtactggaagatatatttatgccgttcaccagactggttgaccatggctacagcctacaactttatagatcgattgtgctgcaatcagggatgttatttttttgtatctgagacataataaaggtgcatgtggtctcatgtactgttgtaccctctaggctctagtggctctgtgaggttactcttctttcctggaataccttttgataggctactctgtggtatcaactgaaatcatgaaacactgacatcagttctactggattatctagttgcgtactgtgtatacacatctattgagttttttt

SEQ ID NO: 63198 - DNA, 2456 bp, Zea Mays
ccttccttctgttctgctgtgggggttcccgctccgcgtccgcagggttttacggatgcgtacggctttgctgtgcggccacaacacctgcaacgttacaaggagtacgctggcatctacaaggaggaagaggaggagagatccgatagatggaagaattttctggagaggcagcctgagtcatctggacaggatgctggtgataatgctacgggtgatggttctgaatcactgcatgagaagaccgtagcagggccacagaagattcaaatatggacgccaattagatcgtccctgagcaacattgagcagataatgagcctgcgcatcgggaagaagcaatcttctgctggcaagcagcaagcaaaggacggaacccatcacgtgaaaggtgaagagagcaagttgtcggaggattcagatgacgaattctatgatgtagataaggttgatctgagccaagaagcgcaatcgagtgatactaggaatgctgatgttggaagcaggaaccaagaagaaaattacatttcaagggaagagttggagtgcctggtccatggtggactgccgatggttttgaggggagagctatggcaagcttttgttggtactggagctcgtaggatagaagggtattatgatagtcttgcagcagagggtgaattagataacaaaagttctccaacttctgaaggtgttcaagaaaagtggattgggcaaatagataaggacttgcccagaacttttcctggtcatcctgctttagatgaggatggaagaaatgctttgagacgcttgcttatagcttatgcgaaacacaatccatcagttggttactgccaggcaatgaacttctttgctggtctcttgcttctattgatgccagaggagaatgcattttggacattggttgggattatggaggactattttgatggctacttttctgaagaaatgattgagtcacaggtggatcaacttgttttagaggagttagttcgagagaagttccctaaattagcaaatcacctggattaccttggacttcaagttgcatgggttactgggccatggttcttatccatcttcacaaatgtgcttccctgggaaagtgttctccgtgtctgggatgtgcttttgttcgatggaaacagagtaatgctgttccggaccgctcttgcgctactggagttctatggtcctgcacttgttactacaaaagatgccggtgatgcagttacccttttgcaatctttagctggttccacatttgacagcagccagcttgtcttgacagctcgtatgggatatcaatccgtaaatgaaacaatattgcaagagctaagtaataaacaccgcccatctgttatgtctgccatggaagaaagagcgaaagaccagttgagtgatgtgggagatggggatgccaatcaagaaagtgatcctgtaaacatggatgacgagtatgttggtgtgacagtgaaatctgagattgattctttgcctgatccaaaggaccaggttgcctggctgaagttggagttgtgccaactcctagaggagagaagatcagcagttctcagagctgatgaactagaaacagcactcatggaaatggttaagcaagacaatagacgccaattaagtgcaaaggttgagcagtttgaacaagaaatatctgaattcagagaggctttgtcagataagcaggagcaggagcaagcaatgtttcaggtcctgatgcgtgtcgaacaagaactgaaaattgcagaggaagctcgcatctcagccgagcaggatgctgctgctcagagatacgcagcaaatgttctacaggaaaagtacgaggaagctatggcttcacttgcccaaatggagaaccgagctgtaatggcagaaacaatgttagaggctacactgcagtaccaatctagccagcagaaagcactgtccccttgcccttctccaaggccatcaatgctcgatgcatcccctagtcaggcaagtcagaattcatcgcaggtgtttcagccaagaaggaaaaacttgcttggcccattttcgctgagttggcgtgataagaacaaggaaaagccgaacaatgttgaagactctgcgaacacaaagtttaccaatagtgatgaaatggtagatgagaagcagatggaaaccctggatctagataacgaacagagagcagaatcaactaaagaagatggcaagatgagagcagaaacccctcagaaagacgacgatctggtaagggtccaattaaccacggaccatttgaatggacaccatgaacagatgcaagaaataaaactggattggtaagcacaatggcacccagtccaagtaccttcggcaacacttctcagtgtatttgtgacctgatcacggtgccagttggtgcagcattgagggtggcctaatgttctttatatcccccccccccc

SEQ ID NO: 63199 - DNA, 2587 bp, Zea Mays
cccaggtacggacactctcctactccgcccggcgcccatccccgcgcacgcccagcagtccagccggaggccagatcaaagcgccaccgccacgccgcacttagctaatcccgccgctgccccggggtcgctaggaggagatgaagcccaaaagcctcccgttcatcgccttcgagcacaagcgggatgcgtacggctttgctgtgcggccacaacacctgcaacgttacaaggagtacgctggcatctacaaggaggaagaggaggagagatccgatagatggaagaattttctggagaggcagcctgagtcatctggacaggatgctggtgataatgctacgggtgatggttctgaatcactgcatgagaagaccgtagcagggccacagaagattcaaatatggacgccaattagatcgtccctgagcaacattgagcagataatgagcctgcgcatcgggaagaagcaatcttctgctggcaagcagcaagcaaaggacggaacccatcacgtgaaaggtgaagagagcaagttgtcggaggattcagatgacgaattctatgatgtagataaggttgatctgagccaagaagcgcaatcgagtgatactaggaatgctgatgttggaagcaggaaccaagaagaaaattacatttcaagggaagagttggagtgcctggtccatggtggactgccgatggttttgaggggagagctatggcaagcttttgttggtactggagctcgtaggatagaagggtattatgatagtcttgcagcagagggtgaattagataacaaaagttctccaacttctgaaggtgttcaagaaaagtggattgggcaaatagataaggacttgcccagaacttttcctggtcatcctgctttagatgaggatggaagaaatgctttgagacgcttgcttatagcttatgcgaaacacaatccatcagttggttactgccaggcaatgaacttctttgctggtctcttgcttctattgatgccagaggagaatgcattttggacattggttgggattatggaggactattttgatggctacttttctgaagaaatgattgagtcacaggtggatcaacttgttttagaggagttagttcgagagaagttccctaaattagcaaatcacctggattaccttggacttcaagttgcatgggttactgggccatggttcttatccatcttcacaaatgtgcttccctgggaaagtgttctccgtgtctgggatgtgcttttgttcgatggaaacagagtaatgctgttccggaccgctcttgcgctactggagttctatggtcctgcacttgttactacaaaagatgccggtgatgcagttacccttttgcaatctttagctggttccacatttgacagcagccagcttgtcttgacagctcgtatgggatatcaatccgtaaatgaaacaatattgcaagagctaagtaataaacaccgcccatctgttatgtctgccatggaagaaagagcgaaagaccagttgagtgatgtgggagatggggatgccaatcaagaaagtgatcctgtaaacatggatgacgagtatgttggtgtgacagtgaaatctgagattgattctttgcctgatccaaaggaccaggttgcctggctgaagttggagttgtgccaactcctagaggagagaagatcagcagttctcagagctgatgaactagaaacagcactcatggaaatggttaagcaagacaatagacgccaattaagtgcaaaggttgagcagtttgaacaagaaatatctgaattcagagaggctttgtcagataagcaggagcaggagcaagcaatgtttcaggtcctgatgcgtgtcgaacaagaactgaaaattgcagaggaagctcgcatctcagccgagcaggatgctgctgctcagagatacgcagcaaatgttctacaggaaaagtacgaggaagctatggcttcacttgcccaaatggagaaccgagctgtaatggcagaaacaatgttagaggctacactgcagtaccaatctagccagcagaaagcactgtccccttgcccttctccaaggccatcaatgctcgatgcatcccctagtcaggcaagtcagaattcatcgcaggtgtttcagccaagaaggaaaaacttgcttggcccattttcgctgagttggcgtgataagaacaaggaaaagccgaacaatgttgaagactctgcgaacacaaagtttaccaatagtgatgaaatggtagatgagaagcagatggaaaccctggatctagataacgaacagagagcagaatcaactaaagaagatggcaagatgagagcagaaacccctcagaaagacgacgatctggtaagggtccaattaaccacggaccatttgaatggacaccatgaacagatgcaagaaataaaactggattggtaagcacaatggcacccagtccaagtaccttcggcaacacttctcagtgtatttgtgacctgatcacggtgccagttggtgcagcattgagggtggcctaatgttctttatatcccccccccccc

SEQ ID NO: 63200 - DNA, 2453 bp, Zea Mays
gtcaggactcagggtcatccccgtttctctcctcgagtccccacccccagggatgcgtacggctttgctgtgcggccacaacacctgcaacgttacaaggagtacgctggcatctacaaggaggaagaggaggagagatccgatagatggaagaattttctggagaggcagcctgagtcatctggacaggatgctggtgataatgctacgggtgatggttctgaatcactgcatgagaagaccgtagcagggccacagaagattcaaatatggacgccaattagatcgtccctgagcaacattgagcagataatgagcctgcgcatcgggaagaagcaatcttctgctggcaagcagcaagcaaaggacggaacccatcacgtgaaaggtgaagagagcaagttgtcggaggattcagatgacgaattctatgatgtagataaggttgatctgagccaagaagcgcaatcgagtgatactaggaatgctgatgttggaagcaggaaccaagaagaaaattacatttcaagggaagagttggagtgcctggtccatggtggactgccgatggttttgaggggagagctatggcaagcttttgttggtactggagctcgtaggatagaagggtattatgatagtcttgcagcagagggtgaattagataacaaaagttctccaacttctgaaggtgttcaagaaaagtggattgggcaaatagataaggacttgcccagaacttttcctggtcatcctgctttagatgaggatggaagaaatgctttgagacgcttgcttatagcttatgcgaaacacaatccatcagttggttactgccaggcaatgaacttctttgctggtctcttgcttctattgatgccagaggagaatgcattttggacattggttgggattatggaggactattttgatggctacttttctgaagaaatgattgagtcacaggtggatcaacttgttttagaggagttagttcgagagaagttccctaaattagcaaatcacctggattaccttggacttcaagttgcatgggttactgggccatggttcttatccatcttcacaaatgtgcttccctgggaaagtgttctccgtgtctgggatgtgcttttgttcgatggaaacagagtaatgctgttccggaccgctcttgcgctactggagttctatggtcctgcacttgttactacaaaagatgccggtgatgcagttacccttttgcaatctttagctggttccacatttgacagcagccagcttgtcttgacagctcgtatgggatatcaatccgtaaatgaaacaatattgcaagagctaagtaataaacaccgcccatctgttatgtctgccatggaagaaagagcgaaagaccagttgagtgatgtgggagatggggatgccaatcaagaaagtgatcctgtaaacatggatgacgagtatgttggtgtgacagtgaaatctgagattgattctttgcctgatccaaaggaccaggttgcctggctgaagttggagttgtgccaactcctagaggagagaagatcagcagttctcagagctgatgaactagaaacagcactcatggaaatggttaagcaagacaatagacgccaattaagtgcaaaggttgagcagtttgaacaagaaatatctgaattcagagaggctttgtcagataagcaggagcaggagcaagcaatgtttcaggtcctgatgcgtgtcgaacaagaactgaaaattgcagaggaagctcgcatctcagccgagcaggatgctgctgctcagagatacgcagcaaatgttctacaggaaaagtacgaggaagctatggcttcacttgcccaaatggagaaccgagctgtaatggcagaaacaatgttagaggctacactgcagtaccaatctagccagcagaaagcactgtccccttgcccttctccaaggccatcaatgctcgatgcatcccctagtcaggcaagtcagaattcatcgcaggtgtttcagccaagaaggaaaaacttgcttggcccattttcgctgagttggcgtgataagaacaaggaaaagccgaacaatgttgaagactctgcgaacacaaagtttaccaatagtgatgaaatggtagatgagaagcagatggaaaccctggatctagataacgaacagagagcagaatcaactaaagaagatggcaagatgagagcagaaacccctcagaaagacgacgatctggtaagggtccaattaaccacggaccatttgaatggacaccatgaacagatgcaagaaataaaactggattggtaagcacaatggcacccagtccaagtaccttcggcaacacttctcagtgtatttgtgacctgatcacggtgccagttggtgcagcattgagggtggcctaatgttctttatatcccccccccccc

SEQ ID NO: 63201 - DNA, 3294 bp, Zea Mays
ccctattctgccatgctgctccccaccacggaccccctcccgccatctcgggccgacgctgcaacaatttttgccgcacggcgtactctcggcacggctcggcaagggtgtggcctgcgacgaggagtaggaactaggaagaagaggggggaacgggcggccgcaccgcggcgtgacctcggccgactatgctgcaacgcgcggcgagcaacgcctactcctggtggtgggcgtcgcacatccgcaccgcccaatccaagtggcttgaaacaaccggcggcgagatggaggacagggtgaagtcaatgctcgagctcattggggccgacggcgattcgttcggcaagaaggccgaactctacttccaaagccggccagagctcatcaatcacgtggaggagatgtttagatcctaccaggcccttgccgacaggtttgatcgcatatccagtgagctgcacaaggccaaccacaccattgccactgtgtttccggaccatgtacagttctcaatgcaagagggggatggtgaggagttcccgaaggcaatcggtgggattgatctcagcaacttcaaattccctacgttggaaggcttgtccatgggctcgcagagcgcgagtaggggcaccagtccggtccccaagagggggaccaagccacaccgaagggtcaccacaaacatgaacgaggagaaggcgcaggaagagatagacaagctccagaaacaaatcctggcactacagaccgagaaagagttcttgaagactacttatgacagcgcactaggcaagtatctagacattgagaaacaggtggccgagttgcaggatgaggtctgcaatttgcaagatgctttcagcactggtgtagccattgaagacaatgaagctcgagcattgatggctgcacaagccattatatcatgtgaggatacgttggtgaacttgcaggaccagaaaaacagaatgactgaagaggcgaaggtggagctccgacgagccaatgaggcaattgaaaagctgaaaagcttcaagaatgaatgtgagctgcctcatgcaccaatgaatgtacatgatcactatgaaatagaactggtcaatgcactgcccctcgatgatgctgatgattctgctctgaacgagagcaggcttgacctccaggaaatatgtcaaacagtaaaagatataatcgaatcttatcctgaactatcagttgcagaattagcggaaaaggttgatcgacttgtggaaaaggtgatcaaccttgaacttgctactacttcacagaatgctcacatcaatagaatgaagattgagatagatggacttcatgagcgcctgcatgctttggagcaagacaatgtagctttggctgttgattctagtaacttggctgacaggttgaggatagttgaagaaatgctgcaagaagtacaacaaatttggaagtctatacgaaatgggtccgagaatatttgtaaacaaatgactgaagccacccatgaacttactgaattcattgaaacattacattctcctaagcaagaaatcagtgacttcgtggattcattgcgagactccaaaggcgatgcttctctggaagatgattcaggactaacaagtctgtatgtgcaaaatgagccatccaaatctttacgtgtcgctacaagtgaaattgagaaatatgaagaaacctcagaaggtcttgtagcccagaaacagctagttccaaaagaatccgaaggtgagggtaagattatattagaagattacgcatctgtacttcagagctacaaaaatacagagcaaaagctttcggaaattgagaagagaaatcaagattaccatcttgaggcaatgtcagaactgaaggaacttaagagtgtcaatgcaagaaaagatgaggagatccactcgcttaggcacatgctaagttctttgcagaaaaagatgagtgcctctattattgagagtttagagaagtcagaagaaacatccaagataagcgccattactactacagaagacaaagagattgctaagtcagaacaaacatccaagataagcaccagtcctactacagaagacaaagaaattgctgagatagaggaatacattaagcaatggcaagttgatgaaccgctagcttcttcggttgcagaggagaaatttagagtagaaattgacagggtgttgggggagaacttgaacttctggttgaggtttagcacattatatcatcaaatacggaatttccaaatctcttttgacatgttgaaaactgagatgcacagaatgactgatgaacaggaagatgagggcatttatggctttgctggtagttatcaggtagcaaagctagaatcagcagtactagaaaagaaattgagggacctaaatacagatcttcaagtttggattgaaaggaacgtgcgattgaaaggagagctagagaacagattttcatcactatgcagcatacaagaagacatatcaaagattacaactctagataaatgtgatgaagttcacttcaacccttttcaagctgcaaaatttcaaggagaggtgcttaatatgaaacaagagaataacaaagtcgctaaggagctagaagctgggctggaccatgtaagaggccttcaagtggagcttggaagggtgatcttgaagcttagagagaatctcaaggtatctattgcaagaagccaccgaactcaacaaaacttccggaccctgtcaacgaaaggtggtgttccccttagagcttttctgtttggctcaaagtcaaagagaccatcactcttttcgtgcatgcctggggtgcataagcaacacagtggttcaaaggctgggcgtggatgagtactagcaatttgtttttcgacatttaatcctaaagatatctcagtgtacatgacaattcatatgtgacaaatgatcttcggtcttaaatgtaaaagaccctcatctgctatatcaaatttggtttgtgatccactcactcctgctttgatacattgcctatatgatattcatttcagaactaaatttgatggaagtatatgatgtattaatgtgaaatggtttaaaatgctcaaggtactggaagaacctatgtgactctgtttgtgcccctgtttctcaatatcttcagttgacaaatgtactaaactggtgttgcattgatgatgagtactcggttacaaaattgtgctgcgactgttttgtacttttttttctcaaaggcgcaggaggactgcacatctttatatattagagggaagaaaag

SEQ ID NO: 63202 - DNA, 2033 bp, Zea Mays
cggctgttggatcccgtgccgccgcctcgcctcgcccgttctcggtacgccagcgaccccgtcactgtagctgcgtgcctgcgcggccctgcgcttgcttcgccctcgcttcgctccaaacgatagagctggggcaggctgagcgaccgcgagcttgacccgggcgcacgtcggctcgcactgtcgcacccagccatgtcggcgcctggattcgatgacccccagcttccgccgctgcggctgcgcgcctcgtgcggcggcagcggcggcgtgatcgccagcccacgctcctgctcctcctctgataccttcgtcagcatgcgttccacgccctcagcctcaggtatgccgaatctgtgcggcgggctacggtctccacctcgcacgccgtcggaggcgtcttcgtcggagatggagttcgggacggcccgcgagtacgacaccactgatccgttcttcagtgactactggctgtacgacaaccacctgttccacagcaagctagagagcgacggcagcgaaggggaggacaagttcgttgttggtcctgacgtcagcttgcagcggagtgaggtgcgggagcttggcgacggatgcggtcgcgggcacgtacgtacagaccgcaatgcggactctgatgggtgcacagatgcgaatgcttgctcgtcgccaccttgcggttgctgctataatgaggagttggtggtgagagattcttgctccgctgtttatgggaggtgtcagatcatggaggaccacgcggaggggcttgatgagtgcgttgcagaagcgttccggttcagactgaatgcgtttgttgatgctggcgaccagtcagtggcttccaagaaaggacaggacgactggctggatcttactgttctggagaaggaacttcaaatgcttactccgcacttggctgatgcagatgctcttgagaatactggacttgaagatgacttgagagggaatatcaacctagatgtctgtatggtaacaaacgagaaaaatgctgatggcaaagaatttctaaaagatacttactgcatacattctttacctgagagtgcaatcccttttgatgtttatggtgtggaagacttcaaggagtatgaggtatttgacctgaaaattttccaccggaagagcaggacaggctttgaggaaaacaaagaattcgctattgtcatggattcagttgtagctggaagatatcgtatcactgagtatcttggttctgctgcattcagcaaggttgtccgggcacacgacctccacactggagttgatgtatgccttaaaataataaaaaatgacaaggatttctttgaccagagtttggatgagataaagctcctcaagtttgtcaataaatatgatccagatgatgatcatcatatactgcgtctctatgattatttttattatcaggaacatctcttcattgtcactgaattactacgtgcaaacctttatgagtttcagaaatataatcagcagtctggtgatgaggtgtacttttcactgcccagaatacaggctatagctcaacaatgtttggaggctttggtgtacttgcatcatctaaacatagttcactgtgatctgaaaccagagaatatccttctgaagagctacagcagatgtgaaatcaaagtcattgatcttggaagcagctgcttcttgtcagacaacttaaacttatatgttcagtcacgttcttatcgatctcctgaggtcatcctgggtttgccatatgatcagaaaattgacatttggtctcttggctgcatcttagctgaactgtacactggggaagtgctctttcctaatgaatcagtaccaatcattcttgctcgtatgattgggacaattggtccaattgatatggaaatgcttgcctcaggacaggagacccagaagtacttcacagatgactatgaccttttccacaaggacgagacgagcaagctactgtggaaactgaggttcagcaagtagagatagctgagcaggagctcattacaggcaag

SEQ ID NO: 63203 - DNA, 2371 bp, Zea Mays
ttggatcccgtgccgccgcctcgcctcgcccgttctcggtacgccagcgaccccgtcactgtagctgcgtgcctgcgcggccctgcgcttgcttcgccctcgcttcgctccaaacgatagagctggggcaggctgagcgaccgcgagcttgacccgggcgcacgtcggctcgcactgtcgcacccagccatgtcggcgcctggattcgatgacccccagcttccgccgctgcggctgcgcgcctcgtgcggcggcagcggcggcgtgatcgccagcccacgctcctgctcctcctctgataccttcgtcagcatgcgttccacgccctcagcctcaggtatgccgaatctgtgcggcgggctacggtctccacctcgcacgccgtcggaggcgtcttcgtcggagatggagttcgggacggcccgcgagtacgacaccactgatccgttcttcagtgactactggctgtacgacaaccacctgttccacagcaagctagagagcgacggcagcgaaggggaggacaagttcgttgttggtcctgacgtcagcttgcagcggagtgaggtgcgggagcttggcgacggatgcggtcgcgggcacgtacgtacagaccgcaatgcggactctgatgggtgcacagatgcgaatgcttgctcgtcgccaccttgcggttgctgctataatgaggagttggtggtgagagattcttgctccgctgtttatgggaggtgtcagatcatggaggaccacgcggaggggcttgatgagtgcgttgcagaagcgttccggttcagactgaatgcgtttgttgatgctggcgaccagtcagtggcttccaagaaaggacaggacgactggctggatcttactgttctggagaaggaacttcaaatgcttactccgcacttggctgatgcagatgctcttgagaatactggacttgaagatgacttgagagggaatatcaacctagatgtctgtatggtaacaaacgagaaaaatgctgatggcaaagaatttctaaaagatacttactgcatacattctttacctgagagtgcaatcccttttgatgtttatggtgtggaagacttcaagcaggagtatgaggtatttgacctgaaaattttccaccggaagagcaggacaggctttgaggaaaacaaagaattcgctattgtcatggattcagttgtagctggaagatatcgtatcactgagtatcttggttctgctgcattcagcaaggttgtccgggcacacgacctccacactggagttgatgtatgccttaaaataataaaaaatgacaaggatttctttgaccagagtttggatgagataaagctcctcaagtttgtcaataaatatgatccagatgatgatcatcatatactgcgtctctatgattatttttattatcaggaacatctcttcattgtcactgaattactacgtgcaaacctttatgagtttcagaaatataatcagcagtctggtgatgaggtgtacttttcactgcccagaatacaggctatagctcaacaatgtttggaggctttggtgtacttgcatcatctaaacatagttcactgtgatctgaaaccagagaatatccttctgaagagctacagcagatgtgaaatcaaagtcattgatcttggaagcagctgcttcttgtcagacaacttaaacttatatgttcagtcacgttcttatcgatctcctgaggtcatcctgggtttgccatatgatcagaaaattgacatttggtctcttggctgcatcttagctgaactgtacactggggaagagacccagaagtacttcacagatgactatgaccttttccacaaggacgaggaaacgggtcagttggagtatttgatcccagagaaatcctctttgcggcgccacttgcagtgtccggacaagaaatttgttgaatttctgtcttacctgctgcaaataaatcccagaaacagaccaacggctagcgaagcattgcaacaccgatggctttcgttcaaatatagtccaacggccaatcaaactcgttactgacaagtaggcttcactttctgaagctattggcccttgaaacaacatgtttcattgtaatactcaagttgtataccaagaataataaagagagctcctcattttgtgtgtcttatttgcatcataaaaagagcacctatgtaatggagagtgactaaataaaacaattattctaaaataaagaaaaagtgcatttgttggagttttatgtgttgtgcattaaataaaataatgaggtattaattatttgaaacttgatttaacccaaaatttgaaattagggttttgaaaataaggagaagagaag

SEQ ID NO: 63204 - DNA, 2470 bp, Zea Mays
cggctgttggatcccgtgccgccgcctcgcctcgcccgttctcggtacgccagcgaccccgtcactgtagctgcgtgcctgcgcggccctgcgcttgcttcgccctcgcttcgctccaaacgatagagctggggcaggctgagcgaccgcgagcttgacccgggcgcacgtcggctcgcactgtcgcacccagccatgtcggcgcctggattcgatgacccccagcttccgccgctgcggctgcgcgcctcgtgcggcggcagcggcggcgtgatcgccagcccacgctcctgctcctcctctgataccttcgtcagcatgcgttccacgccctcagcctcaggtatgccgaatctgtgcggcgggctacggtctccacctcgcacgccgtcggaggcgtcttcgtcggagatggagttcgggacggcccgcgagtacgacaccactgatccgttcttcagtgactactggctgtacgacaaccacctgttccacagcaagctagagagcgacggcagcgaaggggaggacaagttcgttgttggtcctgacgtcagcttgcagcggagtgaggtgcgggagcttggcgacggatgcggtcgcgggcacgtacgtacagaccgcaatgcggactctgatgggtgcacagatgcgaatgcttgctcgtcgccaccttgcggttgctgctataatgaggagttggtggtgagagattcttgctccgctgtttatgggaggtgtcagatcatggaggaccacgcggaggggcttgatgagtgcgttgcagaagcgttccggttcagactgaatgcgtttgttgatgctggcgaccagtcagtggcttccaagaaaggacaggacgactggctggatcttactgttctggagaaggaacttcaaatgcttactccgcacttggctgatgcagatgctcttgagaatactggacttgaagatgacttgagagggaatatcaacctagatgtctgtatggtaacaaacgagaaaaatgctgatggcaaagaatttctaaaagatacttactgcatacattctttacctgagagtgcaatcccttttgatgtttatggtgtggaagacttcaagcaggagtatgaggtatttgacctgaaaattttccaccggaagagcaggacaggctttgaggaaaacaaagaattcgctattgtcatggattcagttgtagctggaagatatcgtatcactgagtatcttggttctgctgcattcagcaaggttgtccgggcacacgacctccacactggagttgatgtatgccttaaaataataaaaaatgacaaggatttctttgaccagagtttggatgagataaagctcctcaagtttgtcaataaatatgatccagatgatgatcatcatatactgcgtctctatgattatttttattatcaggaacatctcttcattgtcactgaattactacgtgcaaacctttatgagtttcagaaatataatcagcagtctggtgatgaggtgtacttttcactgcccagaatacaggctatagctcaacaatgtttggaggctttggtgtacttgcatcatctaaacatagttcactgtgatctgaaaccagagaatatccttctgaagagctacagcagatgtgaaatcaaagtcattgatcttggaagcagctgcttcttgtcagacaacttaaacttatatgttcagtcacgttcttatcgatctcctgaggtcatcctgggtttgccatatgatcagaaaattgacatttggtctcttggctgcatcttagctgaactgtacactggggaagtgctctttcctaatgaatcagtaccaatcattcttgctcgtatgattgggacaattggtccaattgatatggaaatgcttgcctcaggacaggagacccagaagtacttcacagatgactatgaccttttccacaaggacgaggaaacgggtcagttggagtatttgatcccagagaaatcctctttgcggcgccacttgcagtgtccggacaagaaatttgttgaatttctgtcttacctgctgcaaataaatcccagaaacagaccaacggctagcgaagcattgcaacaccgatggctttcgttcaaatatagtccaacggccaatcaaactcgttactgacaagtaggcttcactttctgaagctattggcccttgaaacaacatgtttcattgtaatactcaagttgtataccaagaataataaagagagctcctcattttgtgtgtcttatttgcatcataaaaagagcacctatgtaatggagagtgactaaataaaacaattattctaaaataaagaaaaagtgcatttgttggagttttatgtgttgtgcattaaataaaataatgaggtattaattatttgaaacttgatttaacccaaaatttgaaattagggttttgaaaataaggagaagagaag

SEQ ID NO: 63205 - DNA, 3030 bp, Zea Mays
cgttccagtggaccattgggctcaagaacagcccgacgtgggatgggagtgtcctcaaacccatccgggatccggccatcccgcacgcctcgtcctcactcctcagtcctcacccccgacacaggtctcgctggtagcttgccctcgtctgcgccacgcctcctctagcccacctcctgctcctcccccactcgcacagtgctcaatgccgcacaaaccctagtgcccccactccctgtctcgcgtggcagccatgggaaactgttgccgctcgccggccgccgcggcgcgggaagacgtcaagtcgtcgcacttcccggcctccgccggcgggaagaagaagccccaccaggcgcggaacggcggcgggggcggcgccggggagaagaagcggctgtctgtgctcggggaggaggggtgcgacgttggcgccgggatcgaagagaagtacgcgctggaccgggagctcgggcgcggcgagttcggcgtgacgtacctgtgcatggaccgtggcacgcgggagctgctggcctgcaagtcgatctccaagcggaagctgcggacgcccgtcgacgtggaggacgtgcggcgggaggtggccatcatgcggcacctgcccaagagccccaccatcgtgtccctgcgggaggcgtgcgaggacgacggcgccgtgcacctcgtcatggagctctgcgagggaggggagctgttcgaccgcatcgtcgccaggggccattacacggaacgcgcggcggccgcggtcacgcgcaccatcctcgaggtcgtgcagctctgccatcgccacggcgtcatccaccgggacctcaagcccgagaacttcctcttcgccaacaagaaggagaactcgccgctcaaggccatcgacttcggcctctccatcttcttcaagcccggcgaaaagttttcggaaattgtgggaagcccatactacatggctcctgaagtcttgaagaggaactatggacctgaaatagacatatggagcgctggtgttatcttgtatattttgttatgtggtgttcctccattttgggctgagactgaacaaggagttgcacaagctattcttcggggaaatgtagattttaagcgagaaccctggcccaatgtttcagataatgctaaagatcttgttcggcagatgcttcaacctgatccaaagctcaggctaacagcaaagcaagttcttggtaggttgtatctgtatatcgaacttattaactcagtgcttcattatatggcacattgcatcagatctgttcacttgaaaggatcaacaccagtgttacctagacaccatgtcctttttttgccaagtcagatacccaacacctatgtttggatacttggattccaagtgccatttggagggtcgcaaaaaaaatctggcaaatcggaccccctcacccgaatcggacactgataccacacagatgtccatgtaacatggatcaaacatagttttgaagtgtagttggtgcaacttcttcaggatctactctgtatccttgttggagaagttgatgcaactatagttcgggccactttttttagcttccaagcgtgtttactacttgcttaggtaatctgagggtacagtcacgtaattctatgattgtgaaagtgactagtgacaaaaaaattgatggatcaaagttgaagtaaaaagtggaagtaaatgctcttctgttgctcatacttctagacagtctctggagtcagatgtgttttcttactgcacctcatggcaactctagttagcagttaattgcagatgtattcattctcaaaaggaaaagctggtaaaagaagcttgttgtttatctaaaaaaagagatgattggtattgttttagcaattgagagaataccattctctgcacttctatacatacagatcacttggatgaatcatgtaccacaaagtctgtttgattttttgctattttatgcttcaaatattcgagctacatgcttttatttatcaggatatcggattgtaaccaagagctatttaagttttcacactgtgtacatcatagataatgttcaaagtccttatcgaattacctagcatcccattgccccctcccctctttgggggttcaggtaggtactctaaagtcccccctccccctcttctttgtttctgttatctcagagcatccctggcttcaaaatgctaagaaagctccaaacgttcctcttggagacattgtaaagtcaaggctgaaacagttttcaaggatgaacagattcaaaagaagagctctaagggttattgctgatcacttgtcggctgaagaggttcaggacataaaggagatgttcaaggtgatggatactgataatgatggtatagtttcttatgaagagttaaagagcgggatcgcaaattttggttctcatcttgcagaatcagaagtgcaaatgcttatcgaagctgtggatacaaatggtagaggagcactagattacggtgaatttttggctgtctcgctccatttacaaaggatggcaaatgacgagcaccttcggcgggccttcctatttttcgacaaggatggcaacggtttcatcgagcccgaggagcttcaggaagccctgatggaggacgggggagctgataccatggacgtggtcaatgacatattgcaagaagttgacacagacaaggatgggaaaattagctacgacgaatttgtagcgatgatgaaaactggcacggactggaggaaggcatcgcggcactattcaagagggcgcttcaatagccttagcataaagctgataaaagacggccttttccagtgtcgctggggagcatctgctgaaggattgcacacctgcacgcctgctcatctcctccggtgtagtacctgacgctcaaaatgttgtaaaaatgttttggtgttgacctcaaatataatgcaatttgctcgctggtaccgtgtgctgtcaccctatactcatttgcacctacaaatcggtgaagagtaactatgacagt

SEQ ID NO: 63206 - DNA, 1964 bp, Zea Mays
cgttccagtggaccattgggctcaagaacagcccgacgtgggatgggagtgtcctcaaacccatccgggatccggccatcccgcacgcctcgtcctcactcctcagtcctcacccccgacacaggtctcgctggtagcttgccctcgtctgcgccacgcctcctctagcccacctcctgctcctcccccactcgcacagtgctcaatgccgcacaaaccctagtgcccccactccctgtctcgcgtggcagccatgggaaactgttgccgctcgccggccgccgcggcgcgggaagacgtcaagtcgtcgcacttcccggcctccgccggcgggaagaagaagccccaccaggcgcggaacggcggcgggggcggcgccggggagaagaagcggctgtctgtgctcggggaggaggggtgcgacgttggcgccgggatcgaagagaagtacgcgctggaccgggagctcgggcgcggcgagttcggcgtgacgtacctgtgcatggaccgtggcacgcgggagctgctggcctgcaagtcgatctccaagcggaagctgcggacgcccgtcgacgtggaggacgtgcggcgggaggtggccatcatgcggcacctgcccaagagccccaccatcgtgtccctgcgggaggcgtgcgaggacgacggcgccgtgcacctcgtcatggagctctgcgagggaggggagctgttcgaccgcatcgtcgccaggggccattacacggaacgcgcggcggccgcggtcacgcgcaccatcctcgaggtcgtgcagctctgccatcgccacggcgtcatccaccgggacctcaagcccgagaacttcctcttcgccaacaagaaggagaactcgccgctcaaggccatcgacttcggcctctccatcttcttcaagcccggcgaaaagttttcggaaattgtgggaagcccatactacatggctcctgaagtcttgaagaggaactatggacctgaaatagacatatggagcgctggtgttatcttgtatattttgttatgtggtgttcctccattttggagactgaacaaggagttgcacaagctattcttcggggaaatgtagattttaagcgagaaccctggcccaatgtttcagataatgctaaagatcttgttcggcagatgcttcaacctgatccaaagctcaggctaacagcaaagcaagttcttggttattgctgatcacttgtcggctgaagaggttcaggacataaaggagatgttcaaggtgatggatactgataatgatggtatagtttcttatgaagagttaaagagcgggatcgcaaattttggttctcatcttgcagaatcagaagtgcaaatgcttatcgaagctgtggatacaaatggtagaggagcactagattacggtgaatttttggctgtctcgctccatttacaaaggatggcaaatgacgagcaccttcggcgggccttcctatttttcgacaaggatggcaacggtttcatcgagcccgaggagcttcaggaagccctgatggaggacgggggagctgataccatggacgtggtcaatgacatattgcaagaagttgacacagacaaggatgggaaaattagctacgacgaatttgtagcgatgatgaaaactggcacggactggaggaaggcatcgcggcactattcaagagggcgcttcaatagccttagcataaagctgataaaagacgggtctgtaaagctgggtagcggcagccttttccagtgtcgctggggagcatctgctgaaggattgcacacctgcacgcctgctcatctcctccggtgtagtacctgacgctcaaaatgttgtaaaaatgttttggtgttgacctcaaatataatgcaatttgctcgctggtaccgtgtgctgtcaccctatactcatttgcacctacaaatcggtgaagagtaactatgacagt

SEQ ID NO: 63207 - DNA, 3175 bp, Zea Mays
cgaaactctccctccctggaccgccttcagatccagcagtcaaacttccccgtccccggcgaccgtggggcccaccacccgaacttcttcgcagaacaccagacagaccccacgccgggcccgttccagtggaccattgggctcaagaacagcccgacgtgggatgggagtgtcctcaaacccatccgggatccggccatcccgcacgcctcgtcctcactcctcagtcctcacccccgacacaggtctcgctggtagcttgccctcgtctgcgccacgcctcctctagcccacctcctgctcctcccccactcgcacagtgctcaatgccgcacaaaccctagtgcccccactccctgtctcgcgtggcagccatgggaaactgttgccgctcgccggccgccgcggcgcgggaagacgtcaagtcgtcgcacttcccggcctccgccggcgggaagaagaagccccaccaggcgcggaacggcggcgggggcggcgccggggagaagaagcggctgtctgtgctcggggaggaggggtgcgacgttggcgccgggatcgaagagaagtacgcgctggaccgggagctcgggcgcggcgagttcggcgtgacgtacctgtgcatggaccgtggcacgcgggagctgctggcctgcaagtcgatctccaagcggaagctgcggacgcccgtcgacgtggaggacgtgcggcgggaggtggccatcatgcggcacctgcccaagagccccaccatcgtgtccctgcgggaggcgtgcgaggacgacggcgccgtgcacctcgtcatggagctctgcgagggaggggagctgttcgaccgcatcgtcgccaggggccattacacggaacgcgcggcggccgcggtcacgcgcaccatcctcgaggtcgtgcagctctgccatcgccacggcgtcatccaccgggacctcaagcccgagaacttcctcttcgccaacaagaaggagaactcgccgctcaaggccatcgacttcggcctctccatcttcttcaagcccggcgaaaagttttcggaaattgtgggaagcccatactacatggctcctgaagtcttgaagaggaactatggacctgaaatagacatatggagcgctggtgttatcttgtatattttgttatgtggtgttcctccattttgggctgagactgaacaaggagttgcacaagctattcttcggggaaatgtagattttaagcgagaaccctggcccaatgtttcagataatgctaaagatcttgttcggcagatgcttcaacctgatccaaagctcaggctaacagcaaagcaagttcttggtaggttgtatctgtatatcgaacttattaactcagtgcttcattatatggcacattgcatcagatctgttcacttgaaaggatcaacaccagtgttacctagacaccatgtcctttttttgccaagtcagatacccaacacctatgtttggatacttggattccaagtgccatttggagggtcgcaaaaaaaatctggcaaatcggaccccctcacccgaatcggacactgataccacacagatgtccatgtaacatggatcaaacatagttttgaagtgtagttggtgcaacttcttcaggatctactctgtatccttgttggagaagttgatgcaactatagttcgggccactttttttagcttccaagcgtgtttactacttgcttaggtaatctgagggtacagtcacgtaattctatgattgtgaaagtgactagtgacaaaaaaattgatggatcaaagttgaagtaaaaagtggaagtaaatgctcttctgttgctcatacttctagacagtctctggagtcagatgtgttttcttactgcacctcatggcaactctagttagcagttaattgcagatgtattcattctcaaaaggaaaagctggtaaaagaagcttgttgtttatctaaaaaaagagatgattggtattgttttagcaattgagagaataccattctctgcacttctatacatacagatcacttggatgaatcatgtaccacaaagtctgtttgattttttgctattttatgcttcaaatattcgagctacatgcttttatttatcaggatatcggattgtaaccaagagctatttaagttttcacactgtgtacatcatagataatgttcaaagtccttatcgaattacctagcatcccattgccccctcccctctttgggggttcaggtaggtactctaaagtcccccctccccctcttctttgtttctgttatctcagagcatccctggcttcaaaatgctaagaaagctccaaacgttcctcttggagacattgtaaagtcaaggctgaaacagttttcaaggatgaacagattcaaaagaagagctctaagggttattgctgatcacttgtcggctgaagaggttcaggacataaaggagatgttcaaggtgatggatactgataatgatggtatagtttcttatgaagagttaaagagcgggatcgcaaattttggttctcatcttgcagaatcagaagtgcaaatgcttatcgaagctgtggatacaaatggtagaggagcactagattacggtgaatttttggctgtctcgctccatttacaaaggatggcaaatgacgagcaccttcggcgggccttcctatttttcgacaaggatggcaacggtttcatcgagcccgaggagcttcaggaagccctgatggaggacgggggagctgataccatggacgtggtcaatgacatattgcaagaagttgacacagacaaggatgggaaaattagctacgacgaatttgtagcgatgatgaaaactggcacggactggaggaaggcatcgcggcactattcaagagggcgcttcaatagccttagcataaagctgataaaagacgggtctgtaaagctgggtagcggcagccttttccagtgtcgctggggagcatctgctgaaggattgcacacctgcacgcctgctcatctcctccggtgtagtacctgacgctcaaaatgttgtaaaaatgttttggtgttgacctcaaatataatgcaatttgctcgctggtaccgtgtgctgtcaccctatactcatttgcacctacaaatcggtgaagagtaactatgacagt

SEQ ID NO: 63208 - DNA, 2179 bp, Zea Mays
attatattgttatttgtatataataaatcttgtcagattatatccgattcctctgtccactatacggcatgtctgacctgttgagtcgatcgaaactctccctccctggaccgccttcagatccagcagtcaaacttccccgtccccggcgaccgtggggcccaccacccgaacttcttcgcagaacaccagacagaccccacgccgggcccgttccagtggaccattgggctcaagaacagcccgacgtgggatgggagtgtcctcaaacccatccgggatccggccatcccgcacgcctcgtcctcactcctcagtcctcacccccgacacaggtctcgctggtagcttgccctcgtctgcgccacgcctcctctagcccacctcctgctcctcccccactcgcacagtgctcaatgccgcacaaaccctagtgcccccactccctgtctcgcgtggcagccatgggaaactgttgccgctcgccggccgccgcggcgcgggaagacgtcaagtcgtcgcacttcccggcctccgccggcgggaagaagaagccccaccaggcgcggaacggcggcgggggcggcgccggggagaagaagcggctgtctgtgctcggggaggaggggtgcgacgttggcgccgggatcgaagagaagtacgcgctggaccgggagctcgggcgcggcgagttcggcgtgacgtacctgtgcatggaccgtggcacgcgggagctgctggcctgcaagtcgatctccaagcggaagctgcggacgcccgtcgacgtggaggacgtgcggcgggaggtggccatcatgcggcacctgcccaagagccccaccatcgtgtccctgcgggaggcgtgcgaggacgacggcgccgtgcacctcgtcatggagctctgcgagggaggggagctgttcgaccgcatcgtcgccaggggccattacacggaacgcgcggcggccgcggtcacgcgcaccatcctcgaggtcgtgcagctctgccatcgccacggcgtcatccaccgggacctcaagcccgagaacttcctcttcgccaacaagaaggagaactcgccgctcaaggccatcgacttcggcctctccatcttcttcaagcccggcgaaaagttttcggaaattgtgggaagcccatactacatggctcctgaagtcttgaagaggaactatggacctgaaatagacatatggagcgctggtgttatcttgtatattttgttatgtggtgttcctccattttgggctgagactgaacaaggagttgcacaagctattcttcggggaaatgtagattttaagcgagaaccctggcccaatgtttcagataatgctaaagatcttgttcggcagatgcttcaacctgatccaaagctcaggctaacagcaaagcaagttcttggttattgctgatcacttgtcggctgaagaggttcaggacataaaggagatgttcaaggtgatggatactgataatgatggtatagtttcttatgaagagttaaagagcgggatcgcaaattttggttctcatcttgcagaatcagaagtgcaaatgcttatcgaagctgtggatacaaatggtagaggagcactagattacggtgaatttttggctgtctcgctccatttacaaaggatggcaaatgacgagcaccttcggcgggccttcctatttttcgacaaggatggcaacggtttcatcgagcccgaggagcttcaggaagccctgatggaggacgggggagctgataccatggacgtggtcaatgacatattgcaagaagttgacacagacaaggatgggaaaattagctacgacgaatttgtagcgatgatgaaaactggcacggactggaggaaggcatcgcggcactattcaagagggcgcttcaatagccttagcataaagctgataaaagacgggtctgtaaagctgggtagcggcagccttttccagtgtcgctggggagcatctgctgaaggattgcacacctgcacgcctgctcatctcctccggtgtagtacctgacgctcaaaatgttgtaaaaatgttttggtgttgacctcaaatataatgcaatttgctcgctggtaccgtgtgctgtcaccctatactcatttgcacctacaaatcggtgaagagtaactatgacagt

SEQ ID NO: 63209 - DNA, 1004 bp, Zea Mays
ccgtatataaccgccgcctcgccagcgtcacctcgaatccaaacctgcctccgccgcctcgccagcgtcacctcgaatccaaacctgcctccgccgcctcgcgcggtgtcttcgccattcctgacaaggaagatcgtgaagaagcgcgtcaaacagttcagcatcgacgtgctgcagtggacggcaagcggatatccgtcacatcggttctgatgtacgcgatgcgcgctctacacaagatcagaaggttattgctgatcacttgtcggctgaagaggttcaggacataaaggagatgttcaaggtgatggatactgataatgatggtatagtttcttatgaagagttaaagagcgggatcgcaaattttggttctcatcttgcagaatcagaagtgcaaatgcttatcgaagctgtggatacaaatggtagaggagcactagattacggtgaatttttggctgtctcgctccatttacaaaggatggcaaatgacgagcaccttcggcgggccttcctatttttcgacaaggatggcaacggtttcatcgagcccgaggagcttcaggaagccctgatggaggacgggggagctgataccatggacgtggtcaatgacatattgcaagaagttgacacagacaaggatgggaaaattagctacgacgaatttgtagcgatgatgaaaactggcacggactggaggaaggcatcgcggcactattcaagagggcgcttcaatagccttagcataaagctgataaaagacgggtctgtaaagctgggtagcggcagccttttccagtgtcgctggggagcatctgctgaaggattgcacacctgcacgcctgctcatctcctccggtgtagtacctgacgctcaaaatgttgtaaaaatgttttggtgttgacctcaaatataatgcaatttgctcgctggtaccgtgtgctgtcaccctatactcatttgcacctacaaatcggtgaagagtaactatgacagt

SEQ ID NO: 63210 - DNA, 558 bp, Zea Mays
ccgtatataaccgccgcctcgccagcgtcacctcgaatccaaacctgcctccgccgcctcgccagcgtcacctcgaatccaaacctgcctccgccgcctcgcgcggtgtcttcgccattcctgacaaggaagatcgtgaagaagcgcgtcaaacagttcagcatcgacgtgctgcagtggacggcaagcggatatccgtcacatcggttctgatgtacgcgatgcgcgctctacacaagatcagaaggtcaaaggagagctgcataaagaagagtcatacaacgacccaaacacacaaactaccaggacttaattaccaaaaaacagaaaatttagcttaggtaccgcagggagcagggtgcaatatcatagggatatagactttgccagcaatcagttttgccaaatggcgcagcaaagtccacaacttaagaccaaaagtccacaacctatagacacaggcaggaacattttaacattctagggatatagacttcgtatagtcaattatgaaggtgaggacctctataacaacctaccatatctactatccatgag

SEQ ID NO: 63211 - DNA, 2185 bp, Zea Mays
gccgtatataaccgccgcctcgccagcgtcacctcgaatccaaacctgcctccgccgcctcgccagcgtcacctcgaatccaaacctgcctccgccgcctcgcgcggtgtcttcgccattcctgacaaggaagatcgtgaagaagcgcgtcaaacagttcagcatcgacgtgctgcagtggacggcaagcggatatccgtcacatcggttctgatgtacgcgatgcgcgctctacacaagatcagaaggtcaaaggtactctgaccatcctctcagtttgtagtctcgaatcctgctcagagcttagctgcactccgttcaaccctaatccctcccaacctaggccttgtttgaatgcaatctacttgtttgagtggattaggttggattttagttagggtggaaattaaactaaattccaccccatccaaaagagggctcatgtggatagctcagccaaacaacccgccctcgaagggttcactgtcttgtattggacaggttacaatctgtacactgacatagtcctggttttcatatcttagttctgaaatgaaacccgtggccttagttgcaaacggtatcaatgtgaatcttgctttctattgccatgtgtcgcttgagtaactttattgtgcctttaaccttgttgagtaattccttatgttgtgaaatctgaaatgtgaagacggtgtttcttaaactggtggtcactgtttgacagcaatgctctcctcctggttggtcaatcctgttttattgctgttactttttctgtttgagtagagacaataattctgaactatgttcccatgtggcaataaaagtaaaatgaagagaaagacaaaataatgtgcagttaaattttctcacggcacctagtgctttcatgagccttgatggagaagagttacgaatttttagttgtatttattcagttgtttttttctttttatatattgttgttctgaaagaaaggatatgatggctttgtaaaaggtctgagttagaaaatatgtttcttaagcaaacatgggtataaaggaagacggccctagccctttcttaagtatagcattgtggctctagcaacctcttctacagtaattgcttcatggcatcatgaagtgggttggattaaaaggcgtgggcttcattcggagcatgaatgtttgcctagacttctcccaacattcttaacccaatgttttcttaagaaaaccattttctgcatgatctcatcattattgctgatcctttcatgaaacaacttatttcactctcaaagcaactttgtcgaggtgttgtttttagtgcaactttgctgcagtagattccgctttttactctcgatgaaaggtttcctatatggctgatcgaattttgcttatccttgctgatcaatactactgcagtagattcctcttattgtttccattaaaatttcacccattaactttaccttttagcttttaatggtaatatatttgttggcattctcttgtgtccaaagagattcttcctcagtgccttcatcctgtgcagtacactatttttcaaatgtttacagtagaatgtatggctgcatgtagtgatagcttagttttgcatggtgttgaatcttttgtgatcatgcacgcatagaccaaaatatttgacttcaaagcttggaccaagctaatatgacctgtaaaaaagaaaggagggatgagtacagagtattatgtgatgaaattgtgcaaggacatagcggagcgtgctccaaagcttgacattgtggtcacaaacaagcttgctaggcttcacggcgacgactaatgtgcaatcaggccctatgtgcaagcgtgcaagaaactgccctgattgaagatttccttttcccccctatgatattttgttgtatggattgcaatgagctcagcatagagcagctacaattccgaatgatgctctgcgacgttagcttaggtaccgcagggagcagggtgcaatatcatagggatatagactttgccagcaatcagttttgccaaatggcgcagcaaagtccacaacttaagaccaaaagtccacaacctatagacacaggcaggaacattttaacattctagggatatagacttcgtatagtcaattatgaaggtgaggacctctataacaacctaccatatctactatccatgag

SEQ ID NO: 63212 - DNA, 1159 bp, Zea Mays
ggccgcgcccggtcgccagcctcggcgaaccacacgccaccgcccgcctagcttgaccacacacgagcgagcgagtagctaccgatcgacgacgctccttctgcttctccccgtcgtcgtcgtcgtcccatgcacctctgccacatattgtgagcgagcggcagcggtgtgtgccgaacaatggcagcgcaggaggccgcagcaggcggcgggagcccgcaggtggtgatgcggtggcggtacggggacgtgggcgacagcaacttcgcggtgcacgggcgcgcggtgccgctgctggtggggctgctgtgcgccgtcgtcttcttcgtcgcgctgtgcctgtacctccgctggaggtgccaccgccgccacgcgcccgacgacccggaggcggacgccagctccccgtcgtcggccgcagcgccgtcgctccccggcctcgacgccgacgccatccgagggctgcccgtgacgctgtaccgcccgcccgcgtcgccgcgcctccgaggggaggccggcgacgacgacccggcggcggcgctgtgctccatctgcatcagcgcgctgctggccggcgagaaggtgaaggtgctcccgccgtgcggccactgcttccacccggactgcgtcgacgcctggctccggtcccagcccagctgcccgctctgccggtgcctcctcgccgccgccgccgccaaggacgccgtctgagtgccaacgccaggcgcttcgatcgtcgcatgacaagcgggcccagctaccagcgtccctcgacacccgcgggcttttaaatcagcgcactagttaatgatagcggccgccaagaccgcgtcagatctactcgttgtgagtgcgtttgtaaagactaaagaagccttggtttattagggcctgatcaccaatggcgtggcgtggcgtgccgctgccctccgagtccgacgagttgtttggaggcaggcgtggggtcggtcacctgaccaaatcagccgggcggggggtttctctgtggcgcaaggctctccactcaccagtgcaagagaaaagtggtgtaagctgtacatagcttttgagtatttataaccagagagaattttaagctgggtaaagtctaaagaagagcataactggaaggccacaaacaacacaagcgaaataaaat

SEQ ID NO: 63213 - DNA, 322 bp, Zea Mays
tcatcatcagtttcactcctctggctgctccttgtgtgtgtgtgtccactaatgcgttcagcattgcaactgctgctgccaaatgctgagcattcgttgccaacatagatggtcactctgataaactgtcaccttcaatgggaggatgctcaggttttgagaccgaacctatatgtaccaccaaaacaatatcctaattgcaagcatttcgatggatgcaaagcagacttggttgtttgcgatggaggcttcggataaaatttggtggctggtggatctgcttaagaatcaaaagtcagacaaggtggacatcaccatccaa

SEQ ID NO: 63214 - DNA, 582 bp, Zea Mays
gttatattatctctctatattttgaatgggagtcattgaagcctaggcaaggtacttgtatttggatctggcataattacaatcatcctgtcatcatcagtttcactcctctggctgctccttgtgtgtgtgtgtccactaatgcgttcagcattgcaactgctgctgccaaatgctgagcattcgttgccaacatagatggtcactctgataaactgtcaccttcaatgggaggatgctcaggttttgagaccgaacctatatgtaccaccaaaacaatatcctaattgcaaggaaggtgaccttcctctcatcatcgcgattgactagcaaccaatgaccctgataggtgttatgcaagtgtagggcgacatcactaatgctcggacaacggatgtggcatttcgatggatgcaaagcagacttggttgtttgcgatggaggcttcggatagtaagatatcatatgagtgcaagagaactactcccaccattaactataacaaattttgtcaccaaaatttggtggctggtggatctgcttaagaatcaaaagtcagacaaggtggacatcaccatccaa

SEQ ID NO: 63215 - DNA, 473 bp, Zea Mays
tgtccttatcagttgcactagggcttggttatgtgaagtttttccctaccctcaacctctagccaaagtagctgcgtgtgcgttgtagttcctgtgtccacgatagttttagctcccctcctcagccactagatcgatctgcccttgttcatcacagccaactcctgtgtctggtgaccacaacagcaatccttcaacctcaccatggccagggttcgtggagattgtcttggccgtgttgtgcccgttctttgttcctcacaggtgatgaggagtattccaggagttcctttggctggagggtgtttccagttctggaggaggattagttaggcttgtgtataagctttgtagggttcctaccttcctgctattgtaatgagttatgcactttgagtatatcaggacttgtaataaatataactcttcctatgtaataaccttcagttttagaaataaaaagaatgttttgt

SEQ ID NO: 63216 - DNA, 2765 bp, Zea Mays
ctagttcttgcctctccttttgttgtctgctactagtagagtactggtactggtcgcgatttttccgctaaagaaaagcaccggatccattttcctctcgggggagcggattgggtagttgcctgcttattgactagttcttggcgtggcggctaactattgtgaattttgttttagtctgtcctgttggcttcttccttccgcttctcctttctggccgccgaaggcaaaccacgcggcttgttcttattgaatccatcaaggacgcaggaaagataggatcttcggctccgattctcggagcaacagcgcgaccgcagcgggttttggtgcttcctttctttagggttgtgtccttgcagaagttgctctgtggaatggggacctgtgggaggagagttctgggggtatggtttttcttctggttcttgttgacacttgagcagtgcacatccctgaatcgtgaaggtgctgctctgctgagatttaaggcggcgatcgaggcagacccatatggtgctttgttggactggaatcaagagagtttgagcccctgtacttggtttggtgtggaatgctccgatgatggactagtcatgtctctgagcttagcaaatcttggtctaaagggcgttttgtctccagagcttggaaagcttatgcaaatgaaatctctaattttgcacaacaactcattctatggtaccatacctagagaaataggagacctgcaggatctaaaaatgttggatctgggatataataatttcagtggatcaattccatcagagctacaacacatattatcgctagaatttctgtgcagatttcttgaaggtaacagactttctgggcgttcaccagttggagtacaccaactcactaggatatgtgaacatgaaaatcaagtacctaccactaccacaaggattgttacaatcaaaatcagaagactgttaatgagcaaacaaaaagattttaaaatggtcaatattacggggcatccaataagatttccattgaattctccggcagcaccatctccttctgatcccattccaccccctcccgcaccaccatctccttctgaacccattccacccccttctgcaccaccaagccaagagaacaagagcaaaagttctgcaacactatatgcatcgattggagcagttattgttttttttatggtggcctcgtcagcactatgtttcttttactactgccgcaagaagactagcactgttgtacctttgtctgcaaacagttcaagcaggcaattgcagaccactaccatggaagggataactttattcagacgatctgagcttgaaacagcctgtgaaggtttcagcaacataattgacacactacctggatttacactgtttaaaggaactctcccatgtggagcagaaatagctgtggcgtctacatcggtggcttatgcaggaggttggtccgctatagatgaagcacattacatgaataaggttggagctttgtcaaaggtaaaccataagaatcttttgaaccttgtgggttattgtgaagacgaaaaaccattcattcggatgatggtgttcgagtatgcttcaaatggatcactatttgagcgcttgcatgttaaagaagcggagcatctgaattggcagtcacgcctacggatagctatgggagtactgtactgcctgcagtatatgcaccagcagaacactcctgtaaccctaaagaatctaaacagttcatacatatacttgactgaggacgatgccgcaaaggtttcagacatcagcttcagcgttgacaagagagaagatgatgagtatgatgctcctgatgagtatagcacagtgtataagtttgctttgctactgcttgagaccatctccggaaggcgtccatattctgaagacgatggcctccttgttctatgggcacgcagatatctcacctgcgctagcccggtgatgggtatgattgatccaacgctaaattcagtccccgaggagcatgccagagcattatcagagctgattcggttgtgcctaagtgaggaccgaaggcagaggccgacaatggcagaggtcaccaagaggatgcaagagatcactgggatcactcaagatcaggcgattccgaggaacagcgcactttggtgggcagaacttgaaatcatgacatcatgaagcctgtcgactgtgcaactgacttgccccgactctacagctcagtccatcttctatgagaaccgtaggaaattgtacagtttacccttttttaatacaaagatacacagctcttctgtgtcgagaaaaaaaaatgtgtacagtttagtatttttaagcggggcataagttgtacagcagtacaggtatacccagggtcacaattcttccgttctttttttaaccaaatatttattttgttatttgttccggggtcaattctttcattctttttgtagccaaatatttatttcattatttgttctatggaaagcaaaacaatctgagaaagcctgcaaagtatttaggcagggcataagttgtacaggtgatgaggagtattccaggagttcctttggctggagggtgtttccagttctggaggaggattagttaggcttgtgtataagctttgtagggttcctaccttcctgctattgtaatgagttatgcactttgagtatatcaggacttgtaataaatataactcttcctatgtaataaccttcagttttagaaataaaaagaatgttttgt

SEQ ID NO: 63217 - DNA, 2940 bp, Zea Mays
actcaacaaccattgagcaatgtctagagtaatttaagtacgatttagaagaacgaactgaccaatccaacaagtgacttggcttggccaaggatcactccaattgtatatttaatgcatataattctttagagcgaaaggaattgatcaactgaaggctgaacccgccctttctccgcaatcgacttgcgtttctgcacactttcgtgtgccgcgtgcgcctccagctccatgtgacgtcggataccgcgttccgttccacttcccacctgtattttacaaccccctagttcttgcctctccttttgttgtctgctactagtagagtactggtactggtcgcgatttttccgctaaagaaaagcaccggatccattttcctctcgggggagcggattgggtagttgcctgcttattgactagttcttggcgtggcggctaactattgtgaattttgttttagtctgtcctgttggcttcttccttccgcttctcctttctggccgccgaaggcaaaccacgcggcttgttcttattgaatccatcaaggacgcaggaaagataggatcttcggctccgattctcggagcaacagcgcgaccgcagcgggttttggtgcttcctttctttagggttgtgtccttgcagaagttgctctgtggaatggggacctgtgggaggagagttctgggggtatggtttttcttctggttcttgttgacacttgagcagtgcacatccctgaatcgtgaaggtgctgctctgctgagatttaaggcggcgatcgaggcagacccatatggtgctttgttggactggaatcaagagagtttgagcccctgtacttggtttggtgtggaatgctccgatgatggactagtcatgtctctgagcttagcaaatcttggtctaaagggcgttttgtctccagagcttggaaagcttatgcaaatgaaatctctaattttgcacaacaactcattctatggtaccatacctagagaaataggagacctgcaggatctaaaaatgttggatctgggatataataatttcagtggatcaattccatcagagctacaacacatattatcgctagaatttctatttcttgaaggtaacagactttctgggcgttcaccagttggagtacaccaactcactaggatatgtgaacatgaaaatcaagtacctaccactaccacaaggattgttacaatcaaaatcagaagactgttaatgagcaaacaaaaagattttaaaatggtcaatattacggggcatccaataagatttccattgaattctccggcagcaccatctccttctgatcccattccaccccctcccgcaccaccatctccttctgaacccattccacccccttctgcaccaccaagccaagagaacaagagcaaaagttctgcaacactatatgcatcgattggagcagttattgttttttttatggtggcctcgtcagcactatgtttcttttactactgccgcaagaagactagcactgttgtacctttgtctgcaaacagttcaagcaggcaattgcagaccactaccatggaagggataactttattcagacgatctgagcttgaaacagcctgtgaaggtttcagcaacataattgacacactacctggatttacactgtttaaaggaactctcccatgtggagcagaaatagctgtggcgtctacatcggtggcttatgcaggaggttggtccgctatagatgaagcacattacatgaataaggttggagctttgtcaaaggtaaaccataagaatcttttgaaccttgtgggttattgtgaagacgaaaaaccattcattcggatgatggtgttcgagtatgcttcaaatggatcactatttgagcgcttgcatgttaaagaagcggagcatctgaattggcagtcacgcctacggatagctatgggagtactgtactgcctgcagtatatgcaccagcagaacactcctgtaaccctaaagaatctaaacagttcatacatatacttgactgaggacgatgccgcaaaggtttcagacatcagcttcagcgttgacaagagagaagatgatgagtatgatgctcctgatgagtatagcacagtgtataagtttgctttgctactgcttgagaccatctccggaaggcgtccatattctgaagacgatggcctccttgttctatgggcacgcagatatctcacctgcgctagcccggtgatgggtatgattgatccaacgctaaattcagtccccgaggagcatgccagagcattatcagagctgattcggttgtgcctaagtgaggaccgaaggcagaggccgacaatggcagaggtcaccaagaggatgcaagagatcactgggatcactcaagatcaggcgattccgaggaacagcgcactttggtgggcagaacttgaaatcatgacatcatgaagcctgtcgactgtgcaactgacttgccccgactctacagctcagtccatcttctatgagaaccgtaggaaattgtacagtttacccttttttaatacaaagatacacagctcttctgtgtcgagaaaaaaaaatgtgtacagtttagtatttttaagcggggcataagttgtacagcagtacaggtatacccagggtcacaattcttccgttctttttttaaccaaatatttattttgttatttgttccggggtcaattctttcattctttttgtagccaaatatttatttcattatttgttctatggaaagcaaaacaatctgagaaagcctgcaaagtatttaggcagggcataagttgtacagccataagtgaagtggaaaaatcactatcgaaagatccctgtgcaaatgggctctcacgtcgatcacaagtgccatcaagcattgctctgcctcgcgctgctgag

SEQ ID NO: 63218 - DNA, 2719 bp, Zea Mays
ctagttcttgcctctccttttgttgtctgctactagtagagtactggtactggtcgcgatttttccgctaaagaaaagcaccggatccattttcctctcgggggagcggattgggtagttgcctgcttattgactagttcttggcgtggcggctaactattgtgaattttgttttagtctgtcctgttggcttcttccttccgcttctcctttctggccgccgaaggcaaaccacgcggcttgttcttattgaatccatcaaggacgcaggaaagataggatcttcggctccgattctcggagcaacagcgcgaccgcagcgggttttggtgcttcctttctttagggttgtgtccttgcagaagttgctctgtggaatggggacctgtgggaggagagttctgggggtatggtttttcttctggttcttgttgacacttgagcagtgcacatccctgaatcgtgaaggtgctgctctgctgagatttaaggcggcgatcgaggcagacccatatggtgctttgttggactggaatcaagagagtttgagcccctgtacttggtttggtgtggaatgctccgatgatggactagtcatgtctctgagcttagcaaatcttggtctaaagggcgttttgtctccagagcttggaaagcttatgcaaatgaaatctctaattttgcacaacaactcattctatggtaccatacctagagaaataggagacctgcaggatctaaaaatgttggatctgggatataataatttcagtggatcaattccatcagagctacaacacatattatcgctagaatttctgtgcagatttcttgaaggtaacagactttctgggcgttcaccagttggagtacaccaactcactaggatatgtgaacatgaaaatcaagtacctaccactaccacaaggattgttacaatcaaaatcagaagactgttaatgagcaaacaaaaagattttaaaatggtcaatattacggggcatccaataagatttccattgaattctccggcagcaccatctccttctgatcccattccaccccctcccgcaccaccatctccttctgaacccattccacccccttctgcaccaccaagccaagagaacaagagcaaaagttctgcaacactatatgcatcgattggagcagttattgttttttttatggtggcctcgtcagcactatgtttcttttactactgccgcaagaagactagcactgttgtacctttgtctgcaaacagttcaagcaggcaattgcagaccactaccatggaaggaactctcccatgtggagcagaaatagctgtggcgtctacatcggtggcttatgcaggaggttggtccgctatagatgaagcacattacatgaataaggttggagctttgtcaaaggtaaaccataagaatcttttgaaccttgtgggttattgtgaagacgaaaaaccattcattcggatgatggtgttcgagtatgcttcaaatggatcactatttgagcgcttgcatgttaaagaagcggagcatctgaattggcagtcacgcctacggatagctatgggagtactgtactgcctgcagtatatgcaccagcagaacactcctgtaaccctaaagaatctaaacagttcatacatatacttgactgaggacgatgccgcaaaggtttcagacatcagcttcagcgttgacaagagagaagatgatgagtatgatgctcctgatgagtatagcacagtgtataagtttgctttgctactgcttgagaccatctccggaaggcgtccatattctgaagacgatggcctccttgttctatgggcacgcagatatctcacctgcgctagcccggtgatgggtatgattgatccaacgctaaattcagtccccgaggagcatgccagagcattatcagagctgattcggttgtgcctaagtgaggaccgaaggcagaggccgacaatggcagaggtcaccaagaggatgcaagagatcactgggatcactcaagatcaggcgattccgaggaacagcgcactttggtgggcagaacttgaaatcatgacatcatgaagcctgtcgactgtgcaactgacttgccccgactctacagctcagtccatcttctatgagaaccgtaggaaattgtacagtttacccttttttaatacaaagatacacagctcttctgtgtcgagaaaaaaaaatgtgtacagtttagtatttttaagcggggcataagttgtacagcagtacaggtatacccagggtcacaattcttccgttctttttttaaccaaatatttattttgttatttgttccggggtcaattctttcattctttttgtagccaaatatttatttcattatttgttctatggaaagcaaaacaatctgagaaagcctgcaaagtatttaggcagggcataagttgtacaggtatgcccgggcacacaattcttttgttttttaaccaagtatttacttcattatttgttcttggaaagcaaagaaatccaagaaagcctgtgaagtacaaggatatgccatttgtgctgtgaacagaaaacaactggaacctactgtagctattaactgaaacagtcgcagccacagcaagctcaaacgaccagcattgctggatccattttattgaaatggcaatcgctggtttgtcttttttttttcttatata

SEQ ID NO: 63219 - DNA, 3182 bp, Zea Mays
ctagttcttgcctctccttttgttgtctgctactagtagagtactggtactggtcgcgatttttccgctaaagaaaagcaccggatccattttcctctcgggggagcggattgggtagttgcctgcttattgactagttcttggcgtggcggctaactattgtgaattttgttttagtctgtcctgttggcttcttccttccgcttctcctttctggccgccgaaggcaaaccacgcggcttgttcttattgaatccatcaaggacgcaggaaagataggatcttcggctccgattctcggagcaacagcgcgaccgcagcgggttttggtgcttcctttctttagggttgtgtccttgcagaagttgctctgtggaatggggacctgtgggaggagagttctgggggtatggtttttcttctggttcttgttgacacttgagcagtgcacatccctgaatcgtgaaggtgctgctctgctgagatttaaggcggcgatcgaggcagacccatatggtgctttgttggactggaatcaagagagtttgagcccctgtacttggtttggtgtggaatgctccgatgatggactagtcatgtctctgagcttagcaaatcttggtctaaagggcgttttgtctccagagcttggaaagcttatgcaaatgaaatctctaattttgcacaacaactcattctatggtaccatacctagagaaataggagacctgcaggatctaaaaatgttggatctgggatataataatttcagtggatcaattccatcagagctacaacacatattatcgctagaatttctgtgcagatttcttgaaggtaacagactttctgggcgttcaccagttggagtacaccaactcactaggatatgtgaacatgaaaatcaagtacctaccactaccacaaggattgttacaatcaaaatcagaagactgttaatgagcaaacaaaaagattttaaaatggtcaatattacggggcatccaataagatttccattgaattctccggcagcaccatctccttctgatcccattccaccccctcccgcaccaccatctccttctgaacccattccacccccttctgcaccaccaagccaagagaacaagagcaaaagttctgcaacactatatgcatcgattggagcagttattgttttttttatggtggcctcgtcagcactatgtttcttttactactgccgcaagaagactagcactgttgtacctttgtctgcaaacagttcaagcaggcaattgcagaccactaccatggaaggttgcttgatgtgctaatattttgctatgcatatttgttcaatgattttttttcctgaaaacctggcacgagctctgcctctcaattaaggaaggaaagaggtttatgtacaggttcgcctgaaggcctgaaatgccccaaagtgctcacacagaaaacaggaaacacacaatcccctccctttggggattagactaaatagccaaatcgggttactaaagaccctagttcgcacatttgctcaatgctcacattgctgtagtgctttgcattcctgtagtttgcatatgctttaggtgtacgctgcaatactgcttgcttcaatgcacaaatagaacctgtgttcctcttctaacccctgtttatgcagggataactttattcagacgatctgagcttgaaacagcctgtgaaggtttcagcaacataattgacacactacctggatttacactgtttaaaggaactctcccatgtggagcagaaatagctgtggcgtctacatcggtggcttatgcaggaggttggtccgctatagatgaagcacattacatgaataaggttggagctttgtcaaaggtaaaccataagaatcttttgaaccttgtgggttattgtgaagacgaaaaaccattcattcggatgatggtgttcgagtatgcttcaaatggatcactatttgagcgcttgcatgttaaagaagcggagcatctgaattggcagtcacgcctacggatagctatgggagtactgtactgcctgcagtatatgcaccagcagaacactcctgtaaccctaaagaatctaaacagttcatacatatacttgactgaggacgatgccgcaaaggtttcagacatcagcttcagcgttgacaagagagaagatgatgagtatgatgctcctgatgagtatagcacagtgtataagtttgctttgctactgcttgagaccatctccggaaggcgtccatattctgaagacgatggcctccttgttctatgggcacgcagatatctcacctgcgctagcccggtgatgggtatgattgatccaacgctaaattcagtccccgaggagcatgccagagcattatcagagctgattcggttgtgcctaagtgaggaccgaaggcagaggccgacaatggcagaggtcaccaagaggatgcaagagatcactgggatcactcaagatcaggcgattccgaggaacagcgcactttggtgggcagaacttgaaatcatgacatcatgaagcctgtcgactgtgcaactgacttgccccgactctacagctcagtccatcttctatgagaaccgtaggaaattgtacagtttacccttttttaatacaaagatacacagctcttctgtgtcgagaaaaaaaaatgtgtacagtttagtatttttaagcggggcataagttgtacagcagtacaggtatacccagggtcacaattcttccgttctttttttaaccaaatatttattttgttatttgttccggggtcaattctttcattctttttgtagccaaatatttatttcattatttgttctatggaaagcaaaacaatctgagaaagcctgcaaagtatttaggcagggcataagttgtacaggtatgcccgggcacacaattcttttgttttttaaccaagtatttacttcattatttgttcttggaaagcaaagaaatccaagaaagcctgtgaagtacaaggatatgccatttgtgctgtgaacagaaaacaactggaacctactgtagctattaactgaaacagtcgcagccacagcaagctcaaacgaccagcattgctggatccattttattgaaatggcaatcgctggtttgtcttttttttttcttatata

SEQ ID NO: 63220 - DNA, 3462 bp, Zea Mays
actcaacaaccattgagcaatgtctagagtaatttaagtacgatttagaagaacgaactgaccaatccaacaagtgacttggcttggccaaggatcactccaattgtatatttaatgcatataattctttagagcgaaaggaattgatcaactgaaggctgaacccgccctttctccgcaatcgacttgcgtttctgcacactttcgtgtgccgcgtgcgcctccagctccatgtgacgtcggataccgcgttccgttccacttcccacctgtattttacaaccccctagttcttgcctctccttttgttgtctgctactagtagagtactggtactggtcgcgatttttccgctaaagaaaagcaccggatccattttcctctcgggggagcggattgggtagttgcctgcttattgactagttcttggcgtggcggctaactattgtgaattttgttttagtctgtcctgttggcttcttccttccgcttctcctttctggccgccgaaggcaaaccacgcggcttgttcttattgaatccatcaaggacgcaggaaagataggatcttcggctccgattctcggagcaacagcgcgaccgcagcgggttttggtgcttcctttctttagggttgtgtccttgcagaagttgctctgtggaatggggacctgtgggaggagagttctgggggtatggtttttcttctggttcttgttgacacttgagcagtgcacatccctgaatcgtgaaggtgctgctctgctgagatttaaggcggcgatcgaggcagacccatatggtgctttgttggactggaatcaagagagtttgagcccctgtacttggtttggtgtggaatgctccgatgatggactagtcatgtctctgagcttagcaaatcttggtctaaagggcgttttgtctccagagcttggaaagcttatgcaaatgaaatctctaattttgcacaacaactcattctatggtaccatacctagagaaataggagacctgcaggatctaaaaatgttggatctgggatataataatttcagtggatcaattccatcagagctacaacacatattatcgctagaatttctatttcttgaaggtaacagactttctgggcgttcaccagttggagtacaccaactcactaggatatgtgaacatgaaaatcaagtacctaccactaccacaaggattgttacaatcaaaatcagaagactgttaatgagcaaacaaaaagattttaaaatggtcaatattacggggcatccaataagatttccattgaattctccggcagcaccatctccttctgatcccattccaccccctcccgcaccaccatctccttctgaacccattccacccccttctgcaccaccaagccaagagaacaagagcaaaagttctgcaacactatatgcatcgattggagcagttattgttttttttatggtggcctcgtcagcactatgtttcttttactactgccgcaagaagactagcactgttgtacctttgtctgcaaacagttcaagcaggcaattgcagaccactaccatggaaggttgcttgatgtgctaatattttgctatgcatatttgttcaatgattttttttcctgaaaacctggcacgagctctgcctctcaattaaggaaggaaagaggtttatgtacaggttcgcctgaaggcctgaaatgccccaaagtgctcacacagaaaacaggaaacacacaatcccctccctttggggattagactaaatagccaaatcgggttactaaagaccctagttcgcacatttgctcaatgctcacattgctgtagtgctttgcattcctgtagtttgcatatgctttaggtgtacgctgcaatactgcttgcttcaatgcacaaatagaacctgtgttcctcttctaacccctgtttatgcagggataactttattcagacgatctgagcttgaaacagcctgtgaaggtttcagcaacataattgacacactacctggatttacactgtttaaaggaactctcccatgtggagcagaaatagctgtggcgtctacatcggtggcttatgcaggaggttggtccgctatagatgaagcacattacatgaataaggttggagctttgtcaaaggtaaaccataagaatcttttgaaccttgtgggttattgtgaagacgaaaaaccattcattcggatgatggtgttcgagtatgcttcaaatggatcactatttgagcgcttgcatgttaaagaagcggagcatctgaattggcagtcacgcctacggatagctatgggagtactgtactgcctgcagtatatgcaccagcagaacactcctgtaaccctaaagaatctaaacagttcatacatatacttgactgaggacgatgccgcaaaggtttcagacatcagcttcagcgttgacaagagagaagatgatgagtatgatgctcctgatgagtatagcacagtgtataagtttgctttgctactgcttgagaccatctccggaaggcgtccatattctgaagacgatggcctccttgttctatgggcacgcagatatctcacctgcgctagcccggtgatgggtatgattgatccaacgctaaattcagtccccgaggagcatgccagagcattatcagagctgattcggttgtgcctaagtgaggaccgaaggcagaggccgacaatggcagaggtcaccaagaggatgcaagagatcactgggatcactcaagatcaggcgattccgaggaacagcgcactttggtgggcagaacttgaaatcatgacatcatgaagcctgtcgactgtgcaactgacttgccccgactctacagctcagtccatcttctatgagaaccgtaggaaattgtacagtttacccttttttaatacaaagatacacagctcttctgtgtcgagaaaaaaaaatgtgtacagtttagtatttttaagcggggcataagttgtacagcagtacaggtatacccagggtcacaattcttccgttctttttttaaccaaatatttattttgttatttgttccggggtcaattctttcattctttttgtagccaaatatttatttcattatttgttctatggaaagcaaaacaatctgagaaagcctgcaaagtatttaggcagggcataagttgtacaggtatgcccgggcacacaattcttttgttttttaaccaagtatttacttcattatttgttcttggaaagcaaagaaatccaagaaagcctgtgaagtacaaggatatgccatttgtgctgtgaacagaaaacaactggaacctactgtagctattaactgaaacagtcgcagccacagcaagctcaaacgaccagcattgctggatccattttattgaaatggcaatcgctggtttgtcttttttttttcttatata

SEQ ID NO: 63221 - DNA, 1760 bp, Zea Mays
ctacaattggcattcagttatgagtgtacatcgtacaatatgtcgcataaaactgggaggcataaatgttgcgcttggaaacatgagtgaagatgattggaagtggcatatgtatggcactattaagtgaagcgattggctcggttaccaggattttatttagtatatgtgcagagaagcaccaaaaactgttatagagcttgagaactatggattatcaaaaactgttatgaggagagaaaagatgcaagagaatgtagaggccggacgacaatgcggctgcttcggtggtgtcatgggaaagagataaacggccttatccattcgcagtgcattgcaagaagtttccagaaatcgacggttgttcgttaaaatgcgatcgtgcgatggagaataaaaaggacgatgtggcgcactgaggaagcagggcggatgaggaggtcactgatccaaaggctcacctagaggatcgttcaaaggctaagtgtctatcacagtggtatgaatatcagggttggatggtcccaaattactctctactgcttgtgctattagcaactcctgcattctgaatgcagctaatcatattagaaaaggggaaggtgtagtgagcataaatggatctttctagattacccgaggcagcaggcgactggtgactattgaaaccatcgactggcgccaccaaattggaagaaatacacttgaagaaccgtcctgtcagtctccttgtcgcggagcatttaccttttcttgcaggtaacttgggatcgacttactgacatgagcaacaatctgatgacactacaagacaccgctatgcaatggtcgccaccctctttgggatgatgcagaggtcaaagcaacaaatagctatattttaaaaagaaaaaagttaagaacatgtatcctaatttctctattcactgattataatttatgatcttaggaataactagatagtgttgtcggtaaagcaccaatactatcaccaaatattattgaccaacttactataggcagcacaaaaacttattcttgtaatttcctaaaatctaatgagtgggaaaagaggcccacaatataggcatatagctaccatagttggctaaaaacgtagttttgacctattactctaggcctattggatgttggtggttctttgttggcatcatatcaagagattcttgcatttctccaggtgtcatgtttatatcattggtttagattactagggtttataatgttactgcataattgttaacatgatctttgtagtcatgtttatagtcatatcatatcaatagatttttcttttggtaatcttatcttctaaatcaagtttgcattccgtttagactgtaggttatgttggtcataacaagctggaaaagatgatcatagtaacaaggaaagatcatatcaacagttcatgttatgtttgcagatatggatttcaatggttttctccacgttacgaaagcgggaagagtcttttctactcagttttatgttaacagtggtgttatggtgaaacagtcttgcgtgtatgaaccaacatctaaactgtaaacacgacattatcatagttgagtacagggataattatctcttatgtcttactgtaaaatctgaaacaattgtcttgcaactgcttagcatgcattttacgctacaattacctgaaatcacttcttgttgcattttacaccaatttataacatttattaatgcattttacgccaattcacgatatttct

SEQ ID NO: 63222 - DNA, 2575 bp, Zea Mays
ctcacgccgccggtgatcgctggtgaccacgggggcattacagcacacgccgccggtgatcgccggtgaccacgggggcattacagcaccgccgagctcctccccggcgccacgttcagacgtccgtcgagcggccggtgccgccgcgccgaggtgcgcccctgctccctgtttaggccgaacgcccaagctccgccacgcccccgcctccgccccgctcttgttcgtgcgttctgcccaaccatgaccgagatctgccatcggggaggacatcggcttcgtcaaccgccatcgatggagggcatcctcgcctaccgagccagaagagacgaactcgatcccgctacacaagaactgtcggccccatcacacggcacgcggcccagtccaccagaacggagccaatgcgtctggacctggtggtcgatcccgctacacaatatgtaaagggaggcataaatgttgcgcttggaaacatgagtgaagatgattggaagtggcatatgtatggcactattaagtgaagcgattggctcggttaccaggattttatttagtatatgtgcagagaagcaccaaaaactgttatagagcttgagaactatggattatcaaaaactgttatgaggagagaaaagatgcaagagaatgtagaggccggacgacaatgcggctgcttcggtggtgtcatgggaaagagataaacggccttatccattcgcagtgcattgcaagaagtttccagaaatcgacggttgttcgttaaaatgcgatcgtgcgatggagaataaaaaggacgatgtggcgcactgaggaagcagggcggatgaggaggtcactgatccaaaggctcacctagaggatcgttcaaaggctaagtgtctatcacagtggtatgaatatcagggttggatggtcccaaattactctctactgcttgtgctattagcaactcctgcattctgaatgcagctaatcatattagaaaaggggaaggtgtaggtgacttcattttcttgtgatctattctactataagtagtgtgtaattgcagttatagcctaaacatattggagagattcagtttaactgtgaggggacaagatcatcccatgcccatcggtgttaaaattggagaggtttagtttagttgtttggtagatggggagactactaaatgagaaacctgaatgacaaataagcctcagatgaatattgagttcgaatttgttctccaaatgaatttctatttttgtcagtttgtgtaggcctgaattagtcaagccacactttcttcttgtgtagtacaatccttaattggctgcttttagttctagcttcgtgagtcaaacgattttatacttgtttcctttctatgcttccgttcttattttgtgctaagctgaacaatgcttggttgcagtgagcataaatggatctttctagattacccgaggcagcaggcgactggtgactattgaaaccatcgactggcgccaccaaattggaagaaatacacttgaagaaccgtcctgtcagtctccttgtcgcggagcatttaccttttcttgcaggtaacttgggatcgacttactgacatgagcaacaatctgatgacactacaagacaccgctatgcaatggtcgccaccctctttgggatgatgcagaggtcaaagcaacaaatagctatattttaaaaagaaaaaagttaagaacatgtatcctaatttctctattcactgattataatttatgatcttaggaataactagatagtgttgtcggtaaagcaccaatactatcaccaaatattattgaccaacttactataggcagcacaaaaacttattcttgtaatttcctaaaatctaatgagtgggaaaagaggcccacaatataggcatatagctaccatagttggctaaaaacgtagttttgacctattactctaggcctattggatgttggtggttctttgttggcatcatatcaagagattcttgcatttctccaggtgtcatgtttatatcattggtttagattactagggtttataatgttactgcataattgttaacatgatctttgtagtcatgtttatagtcatatcatatcaatagatttttcttttggtaatcttatcttctaaatcaagtttgcattccgtttagactgtaggttatgttggtcataacaagctggaaaagatgatcatagtaacaaggaaagatcatatcaacagttcatgttatgtttgcagatatggatttcaatggttttctccacgttacgaaagcgggaagagtcttttctactcagttttatgttaacagtggtgttatggtgaaacagtcttgcgtgtatgaaccaacatctaaactgtaaacacgacattatcatagttgagtacagggataattatctcttatgtcttactgtaaaatctgaaacaattgtcttgcaactgcttagcatgcattttacgctacaattacctgaaatcacttcttgttgcattttacaccaatttataacatttattaatgcattttacgccaattcacgatatttct

SEQ ID NO: 63223 - DNA, 2058 bp, Zea Mays
ctcacgccgccggtgatcgctggtgaccacgggggcattacagcacacgccgccggtgatcgccggtgaccacgggggcattacagcaccgccgagctcctccccggcgccacgttcagacgtccgtcgagcggccggtgccgccgcgccgaggtgcgcccctgctccctgtttaggccgaacgcccaagctccgccacgcccccgcctccgccccgctcttgttcgtgcgttctgcccaaccatgaccgagatctgccatcggggaggacatcggcttcgtcaaccgccatcgatggagggcatcctcgcctaccgagccagaagagacgaactcgatcccgctacacaagaactgtcggccccatcacacggcacgcggcccagtccaccagaacggagccaatgcgtctggacctggtggtcgatcccgctacacaatatgtaaagggaggcataaatgttgcgcttggaaacatgagtgaagatgattggaagtggcatatgtatggcactattaagtgaagcgattggctcggttaccaggattttatttagtatatgtgcagagaagcaccaaaaactgttatagagcttgagaactatggattatcaaaaactgttatgaggagagaaaagatgcaagagaatgtagaggccggacgacaatgcggctgcttcggtggtgtcatgggaaagagataaacggccttatccattcgcagtgcattgcaagaagtttccagaaatcgacggttgttcgttaaaatgcgatcgtgcgatggagaataaaaaggacgatgtggcgcactgaggaagcagggcggatgaggaggtcactgatccaaaggctcacctagaggatcgttcaaaggctaagtgtctatcacagtggtatgaatatcagtgagcataaatggatctttctagattacccgaggcagcaggcgactggtgactattgaaaccatcgactggcgccaccaaattggaagaaatacacttgaagaaccgtcctgtcagtctccttgtcgcggagcatttaccttttcttgcaggtaacttgggatcgacttactgacatgagcaacaatctgatgacactacaagacaccgctatgcaatggtcgccaccctctttgggatgatgcagaggtcaaagcaacaaatagctatattttaaaaagaaaaaagttaagaacatgtatcctaatttctctattcactgattataatttatgatcttaggaataactagatagtgttgtcggtaaagcaccaatactatcaccaaatattattgaccaacttactataggcagcacaaaaacttattcttgtaatttcctaaaatctaatgagtgggaaaagaggcccacaatataggcatatagctaccatagttggctaaaaacgtagttttgacctattactctaggcctattggatgttggtggttctttgttggcatcatatcaagagattcttgcatttctccaggtgtcatgtttatatcattggtttagattactagggtttataatgttactgcataattgttaacatgatctttgtagtcatgtttatagtcatatcatatcaatagatttttcttttggtaatcttatcttctaaatcaagtttgcattccgtttagactgtaggttatgttggtcataacaagctggaaaagatgatcatagtaacaaggaaagatcatatcaacagttcatgttatgtttgcagatatggatttcaatggttttctccacgttacgaaagcgggaagagtcttttctactcagttttatgttaacagtggtgttatggtgaaacagtcttgcgtgtatgaaccaacatctaaactgtaaacacgacattatcatagttgagtacagggataattatctcttatgtcttactgtaaaatctgaaacaattgtcttgcaactgcttagcatgcattttacgctacaattacctgaaatcacttcttgttgcattttacaccaatttataacatttattaatgcattttacgccaattcacgatatttct

SEQ ID NO: 63224 - DNA, 902 bp, Zea Mays
caggaacatgcagtcaggcacaataatagggtttacattaaagttttccaaaagctagagttggtccactactctgaatgtgcttgcttcacactcaggataattattgcctttcttgtttgttcaaatcttcaaattcgttgatatttcataaaatataatgcttatatggtaacaaatgatttagtgcttttagtttagttcatatggtcaataaatttcagttcaagaaaactagagtctttgagtggtcttgacggcttatacaagaaagctcattttactgtactatataaagtctggaaatccgtgtagcccttaactatttgctacattagacatggcgggtttaaaatccatcatgttatactatcaacctatcactatagcattctcaatagaaccagttcaatatatgtttggttgtgtgcttgtaagggttgtactctaaatacttctcattaatgcaatgacccgtagctctcctgcttgtgtattcaacgacaaaaaagttcaactggagacagtagcgtagccaaaagctttcaggagtctgggcgacctcattatgcaaaaatatttagctagcaaattatagtatttttctttgatataaagaaatatttcatttgaacttcgccaatgagcccagccagtggcccacgggggtggatagcggctccgccactgactcaagagtcaaaattttgagaccaatagcagcagtactgtcagggtccaagagggcccgctacagtaatggcggcactgtatcacacccctcagattgtttagataaagatagactagtttgggataagattagaattagagataagattagatctagtgcttaggggttaagtaaccctcactatataatgagatggattgtatcaatt

SEQ ID NO: 63225 - DNA, 192 bp, Zea Mays
atgcgcacaacaagcagcgacagccttttgatcaggtcagaaaggccaccctcggatggacaattggacagcaaaacgcaggagcagccgatcgacgccaaatcgaagcgcaacaggcaggagtccagcggcaggccgatcggcaacggcaagcagcagcagcagcagcgaaaaagagatcgtgaaccatag
